(19) United States
(12) Patent Application Publication
(10) Pub. No.: US 2005/0287570 A1
(43) Pub. Date: Dec. 29, 2005

(54) Probe arrays for expression profiling of rat genes

(75) Inventor: William M. Mounts, Andover, MA (US)

Correspondence Address: NIXON PEABODY LP, 401 9TH STREET, N.W., SUITE 900, WASHINGTON, DC, 20004, US

(73) Assignee: Wyeth, Madison, NJ (US)

(21) Appl. No.: 11/136,527

(22) Filed: May 25, 2005

Related U.S. Application Data
(60) Provisional application No. 60/574,294, filed on May 26, 2004.

(51) Int. Cl. C12Q 1/68; C07H 21/04

(52) U.S. Cl. 435/6; 536/24.3

(57) ABSTRACT

The present invention provides probe arrays for expression profiling of rat genes. Each probe array comprises a plurality of probes, each of which is directed to a rat gene that encodes a sequence selected from SEQ ID NOs: 1-8,192. Suitable probes for the present invention include polynucleotides that can hybridize under stringent or nucleic acid array hybridization conditions to the RNA transcripts, or the complements thereof, of the corresponding rat genes. Suitable probes also include antibodies or other protein-binding molecules that can bind to the protein products of the corresponding rat genes. In one embodiment, a probe array of the present invention includes one or more probes, each of which is directed to a rat gene that encodes a sequence selected from SEQ ID NOs: 7622 and 8084-8124.

[0001] This application claims the benefit of, and incorporates by reference in its entirety, U.S. Provisional Application Ser. No. 60/574,294 filed May 26, 2004. All materials recorded in the compact discs labeled “Copy 1” and “Copy 2” are incorporated herein by reference in their entireties. Each of the compact discs includes the following files: “Table 1” (583 KB, created Apr. 12, 2004), “Table 2” (81 KB, created Apr. 12, 2004), “Table 4” (653 KB, created Apr. 12, 2004), “Table 5” (77 KB, created Apr. 12 , 2004), “Table 6” (5,576 KB, created Apr. 13, 2004), “Table 8” (10,321 KB, created Apr. 13, 2004), and “Sequence Listing.ST25.txt” (75,380 KB, created May 24, 2005).

### TECHNICAL FIELD

[0002] The present invention relates to probe arrays and methods of using the same for expression profiling of rat genes.

### BACKGROUND

[0003] The rat is one of the most widely used animal models of human disease. Many human disease genes have rat orthologs. Numerous rat models have been established for studying human diseases. Examples of these diseases include cancers, diabetes, arthritis, asthma, neurodegenerative diseases, hypertension, stroke, cardiovascular diseases, psychiatric stress, depression, and behavioral disorders. Moreover, rats are routinely used to demonstrate therapeutic efficacy or assess toxicity of novel drugs. Therefore, the rat is an indispensable platform for biomedical research and drug development.

[0004] Nucleic acid arrays, such as DNA microarrays, allow for simultaneous detection of a large number of genes. The use of nuclear acid arrays has significantly accelerated the process of drug discovery and development. Commercial rat nucleic acid arrays include the Rat Genome U34 arrays manufactured by Affymetrix. Each Rat Genome U34 array consists of probes for over 7,000 rat genes and 17,000 rat expression sequence tags (ESTs). Rat nucleic acid arrays have been employed in a variety of scientific disciplines such as toxicology, neurobiology, and physiology.

### SUMMARY OF THE INVENTION

[0005] The present invention features probe arrays for expression profiling of rat genes. The present invention also features methods of using these arrays for the identification and validation of drug targets and for the assessment and selection of drugs.

[0006] In one aspect, the probe arrays of the present invention are nucleic acid arrays. Each nucleic acid array includes polynucleotide probes capable of hybridizing under stringent or nucleic acid array hybridization conditions to the RNA transcripts, or the complements thereof, of corresponding rat genes. In another aspect, the probe arrays of the present invention are protein arrays. Each protein array includes antibodies or other molecules that can bind to the protein products of corresponding rat genes.

[0007] In one embodiment, a probe array of the present invention includes at least 10, 50, 100, 1,000, 2,000, 3,000, 4,000, or more probes, each of which is directed to a different respective rat gene that encodes a parent sequence selected from SEQ ID NOs: 1-4,096. In another embodiment, a probe array of the present invention includes at least 10, 50, 100, 1,000, 2,000, 3,000, 4,000, or more probes, each of which is directed to a different respective rat gene that encodes a tiling sequence selected from SEQ ID NOs: 4,097-8,192. In many cases, a substantial portion of all probes that are stably attached to a probe array of the present invention is probes for rat genes.

[0008] In yet another embodiment, a probe array of the present invention includes at least 1, 2, 3, 4, 5, 6, 7, 8, 9, 10, 20, 30, 40, or more probes, each of which is directed to a different respective rat gene that encodes a tiling sequence selected from the group consisting of WAN00OGR4, WAN00OGRF, WAN00OGS3, WAN00OGS4, WAN00OGS5, WAN00OGS6, WAN00OGS7, WAN00OGS8, WAN00OGS9, WAN00OGSA, WAN00OGSB, WAN00OGSC, WAN00OGSD, WAN00OGSE, WAN00OGSF, WAN00OGSG, WAN00OGSH, WAN00OGSI, WAN00OGSJ, WAN00OGSK, WAN00OGSL, WAN00OGSM, WAN00OGSN, WAN00OGSO, WAN00OGSP, WAN00OGSQ, WAN00OGSR, WAN00OGSS, WAN00OGST, WAN00OGSU, WAN00OGSV, WAN00OGSW, WAN00OGSX, WAN00OGSY, WAN00OGSZ, WAN00OGT0, WAN00OGT1, WAN00OGT2, WAN00OGT3, WAN00OGT4, WAN00OGT5, and WAN00OGT6.

[0009] In still yet another embodiment, a probe array of the present invention includes at least 1, 2, 3, 4, 5, 6, 7, 8, 9, or 10 probes, each of which is directed to a different respective rat gene that encodes a tiling sequence selected from the group consisting of WAN00OGR4, WAN00OGSD, WAN00OGSE, WAN00OGSH, WAN00OGSK, WAN00OGSN, WAN00OGSP, WAN00OGSQ, WAN00OGS4, and WAN00OGT4.

[0010] In still another embodiment, a probe array of the present invention includes at least one probe which is directed to a rat gene that encodes a tiling sequence selected from WAN00OGS4 and WAN00OGT4.

[0011] Multiple probes can be used for the detection of the same rat gene. In one example, a probe array of the present invention includes at least 25 probes for each rat gene being investigated. In another example, a probe array of the present invention includes each and every polynucleotide probe selected from SEQ ID NOs: 8,193-174,863, or the complement thereof.

[0012] The present invention also features methods of using probe arrays for detecting or monitoring gene expression in rat cells. In one embodiment, the probe array employed is a nucleic acid array, and the method comprises preparing a nucleic acid sample from rat cells and hybridizing the nucleic acid sample to the nucleic acid array. The hybridization signals are indicative of the expression levels of the corresponding genes in the rat cells. In another embodiment, the probe array employed is a protein array, and the method comprises preparing a protein sample from rat cells and contacting the protein sample with the protein array. The levels of binding to the protein array are indicative of the expression levels of the corresponding genes in the rat cells.

[0013] The present invention further features methods for identifying or evaluating agents that can modulate the expression of rat genes. In one embodiment, the methods include contacting an agent with rat cells, preparing a nucleic acid sample from the rat cells, and hybridizing the nucleic acid sample to a nucleic acid array of the present invention to determine if the agent is capable of modulating the expression of any rat gene. In many cases, the agents thus identified can modulate the expression of rat orthologs or homologs of human drug target genes. These human drug target genes encode, without limitation, kinases, phosphatases, proteases, G-protein coupled receptors, nuclear hormone receptors, or ion channels.

[0014] In addition, the present invention features polynucleotide or polypeptide collections. In one embodiment, a polynucleotide collection of the present invention includes at least one isolated polynucleotide comprising or consisting of a sequence selected from SEQ ID NOs: 1-8,192, or the full complement thereof. In another embodiment, a polynucleotide collection of the present invention includes at least one isolated polynucleotide comprising or consisting of a sequence selected from WAN00OGR4, WAN00OGRF, WAN00OGS3, WAN00OGS4, WAN00OGS5, WAN00OGS6, WAN00OGS7, WAN00OGS8, WAN00OGS9, WAN00OGSA, WAN00OGSB, WAN00OGSC, WAN00OGSD, WAN00OGSE, WAN00OGSF, WAN00OGSG, WAN00OGSH, WAN00OGSI, WAN00OGSJ, WAN00OGSK, WAN00OGSL, WAN00OGSM, WAN00OGSN, WAN00OGSO, WAN00OGSP, WAN00OGSQ, WAN00OGSR, WAN00OGSS, WAN00OGST, WAN00OGSU, WAN00OGSV, WAN00OGSW, WAN00OGSX, WAN00OGSY, WAN00OGSZ, WAN00OGT0, WAN00OGT1, WAN00OGT2, WAN00OGT3, WAN00OGT4, WAN00OGT5 and WAN00OGT6, or the full complement thereof. In still another embodiment, a polynucleotide collection of the present invention includes at least one isolated polynucleotide comprising or consisting of a sequence selected from WAN00OGR4, WAN00OGSD, WAN00OGSE, WAN00OGSH, WAN00OGSK, WAN00OGSN, WAN00OGSP, WAN00OGSQ, WAN00OGS4, and WAN00OGT4, or the full complement thereof. In yet another embodiment, a polynucleotide collection of the present invention includes at least one isolated polynucleotide comprising or consisting of a sequence selected from WAN00OGS4 and WAN00OGT4, or the full complement thereof. In still yet another embodiment, a polypeptide collection of the present invention comprises an isolated protein product of a rat gene that encodes a sequence selected from SEQ ID NOs: 1-8,192.

[0015] Other features, objects, and advantages of the present invention are apparent in the detailed description that follows. It should be understood, however, that the detailed description, while indicating preferred embodiments of the invention, is given by way of illustration only, not limitation. Various changes and modifications within the scope of the invention will become apparent to those skilled in the art from the detailed description.

### DETAILED DESCRIPTION

[0016] The present invention features probe arrays and methods of using the same for expression profiling of rat genes. In one embodiment, a probe array of the present invention includes a plurality of probes, each of which is directed to a rat gene that encodes a parent sequence selected from SEQ ID NOs: 1-4,096. In another embodiment, a probe array of the present invention includes a plurality of probes, each of which is directed to a rat gene that encodes a tiling sequence selected from SEQ ID NOs: 4,097-8,192. The probes employed in the present invention can be polynucleotides that can hybridize under stringent or nucleic acid array hybridization conditions to the RNA transcripts, or the complements thereof, of the corresponding rat genes. The probes can also be antibodies or other protein-binding molecules that can bind to the protein products of the corresponding rat genes with high affinities (e.g., at least 10⁶ M⁻¹, 10⁷ M⁻¹, 10⁸ M⁻¹, 10⁹ M⁻¹, or more). In one example, a probe array of the present invention includes one or more probes, each of which is directed to a rat gene that encodes a tiling sequence selected from WAN00OGR4, WAN00OGSD, WAN00OGSE, WAN00OGSH, WAN00OGSK, WAN00OGSN, WAN00OGSP, WAN00OGSQ, WAN00OGS4, and WAN00OGT4.

[0017] Various aspects of the invention are described in further detail in the following subsections. The use of subsections is not meant to limit the invention. Each subsection may apply to any aspect of the invention. In this application, the use of “or” means “and/or” unless otherwise stated.

A. Clustering of Rat Gene Sequences

[0018] mRNA, cDNA, and other coding or non-coding sequences of rat genes were collected from GenBank and other sources. The collected sequences were clustered and aligned using CAT (Clustering and Alignment Tool) software from DoubleTwist. See CLUSTERING AND ALIGNMENT TOOLS USER'S GUIDE (DoubleTwist, Inc., 2000). Each resulting cluster contained a set of highly homologous sequences that were aligned to derive consensus sequences. The consensus sequences were manually curated.

[0019] Examples of these consensus sequences are depicted in SEQ ID NOs: 1-3,519. Table 1 illustrates the headers for each consensus sequence. Each header includes a qualifier (e.g., “WAN00OE0” for SEQ ID NO: 1, “WAN00OE0R” for SEQ ID NO: 2, and so on) as well as other information of the corresponding rat gene.

[0020] The CAT program also generated exemplar sequences that did not cluster with any CAT sub-cluster. These exemplar sequences are depicted in SEQ ID NOs: 3,520-4,096. Table 2 provides the headers for these exemplar sequences.

[0021] The consensus and exemplar sequences are collectively referred to as the “parent sequences.” Any base ambiguity in a parent sequence is indicated according to the IUPAC (International Union of Pure and Applied Chemistry) guideline which is in consistence with WIPO Standard ST.25 (1998).

B. Preparation of Polynucleotide Probes for Rat Genes

[0022] The parent sequences depicted in SEQ ID NOs: 1-4,096 can be used to prepare polynucleotide probes for the corresponding rat genes. A polynucleotide probe for a rat gene can hybridize under stringent or nucleic acid array hybridization conditions to the RNA transcript(s), or the complement thereof, of the rat gene. Preferably, a polynucleotide probe for a rat gene is incapable of hybridizing under stringent or nucleic acid array hybridization conditions to the RNA transcripts, or the complements thereof, of other rat genes. In many embodiments, a polynucleotide probe for a rat gene can hybridize under stringent or nucleic acid array hybridization conditions to the parent sequence encoded by the gene, or the complement thereof, but not the parent sequences encoded by other rat genes or their complements.

[0023] Where a parent sequence contains an ambiguous residues (e.g., a “n” residue), the probes for the parent sequence can be designed to hybridize under stringent or nucleic acid array conditions to an unambiguous fragment of the parent sequence, or the complement of the unambiguous fragment. In one example, a probe for such a parent sequence comprises or consists of an unambiguous fragment of the parent sequence, or the complement thereof. In many instances, a polynucleotide probe for a parent sequence is incapable of hybridizing under stringent or nucleic acid array hybridization conditions to other parent sequences, or the complements thereof.

[0024] As used herein, “nucleic acid array hybridization conditions” refer to the temperature and ionic conditions that are normally employed in nucleic acid array hybridization. In many cases, the nucleic acid array hybridization conditions include 16-hour hybridization at 45° C., followed by at least three 10-minute washes at room temperature. The hybridization buffer includes 100 mM MES, 1 M [Na⁺], 20 mM EDTA, and 0.01% Tween 20. The wash buffer is 6×SSPET. 6×SSPET contains 0.9 M NaCl, 60 mM NaH₂PO₄, 6 mM EDTA, and 0.005% Triton X-100. Under more stringent nucleic acid array hybridization conditions, the wash buffer can be replaced with 100 mM MES, 0.1 M [Na⁺], and 0.01% Tween 20.

[0025] “Stringent conditions” are at least as stringent as, for example, conditions G-L in Table 3. In certain embodiments, highly stringent conditions A-F are employed. In Table 3, hybridization is carried out under the hybridization conditions (Hybridization Temperature and Buffer) for about four hours, followed by two 20-minute washes under the corresponding wash conditions (Wash Temp. and Buffer).

TABLE 3
Stringency Conditions

| Stringency | Poly-nucleotide | Hybrid | Hybridization | Wash Temp. |
|---|---|---|---|---|
| Condition | Hybrid | Length (bp)¹ | Temperature and Buffer^{H} | and Buffer^{H} |
| A | DNA:DNA | >50 | 65° C.; 1xSSC -or- | 65° C.; 0.3xSSC |
| | | | 42° C.; 1xSSC, 50% formamide | |
| B | DNA:DNA | <50 | T_{B}*; 1xSSC | T_{B}*; 1xSSC |
| C | DNA:RNA | >50 | 67° C.; 1xSSC -or- | 67° C.; 0.3xSSC |
| | | | 45° C.; 1xSSC, 50% formamide | |
| D | DNA:RNA | <50 | T_{D}*; 1xSSC | T_{D}*; 1xSSC |
| E | RNA:RNA | >50 | 70° C.; 1xSSC -or- | 70° C.; 0.3xSSC |
| | | | 50° C.; 1xSSC, 50% formamide | |
| F | RNA:RNA | <50 | T_{F}*; 1xSSC | T_{f}*; 1xSSC |
| G | DNA:DNA | >50 | 65° C.; 4xSSC -or- | 65° C.; 1xSSC |
| | | | 42° C.; 4xSSC, 50% formamide | |
| H | DNA:DNA | <50 | T_{H}*; 4xSSC | T_{H}*; 4xSSC |
| I | DNA:RNA | >50 | 67° C.; 4xSSC -or- | 67° C.; 1xSSC |
| | | | 45° C.; 4xSSC, 50% formamide | |
| J | DNA:RNA | <50 | T_{J}*; 4xSSC | T_{J}*; 4xSSC |
| K | RNA:RNA | >50 | 70° C.; 4xSSC -or- | 67° C.; 1xSSC |
| | | | 50° C.; 4xSSC, 50% formamide | |
| L | RNA:RNA | <50 | T_{L}*; 2xSSC | T_{L}*; 2xSSC |
| ¹The hybrid length is that anticipated for the hybridized region(s) of the hybridizing polynucleotides. When hybridizing a polynucleotide to a target polynucleotide of unknown sequence, the hybrid length is assumed to be that of the hybridizing polynucleotide. When polynucleotides of known sequence are hybridized, the hybrid length can be determined by aligning the sequences of the polynucleotides and identifying the region or regions of optimal sequence complementarity. | | | | |
| ^{H}SSPE (1xSSPE is 0.15M NaCl, 10 mM NaH₂PO₄, and 1.25 mM EDTA, pH 7.4) can be substituted for SSC (1xSSC is 0.15 M NaCl and 15 mM sodium citrate) in the hybridization and wash buffers. | | | | |
| T_{B}*-T_{R}*The hybridization temperature for hybrids anticipated to be less than 50 base pairs in length should be 5-10° C. less than the melting temperature (Tₘ) of the hybrid, where Tₘ is determined according to the following equations. For hybrids less than 18 base pairs in length, Tₘ(° C.) = 2(# of A + T bases) + 4(# of G + C bases). For hybrids between 18 and 49 base pairs in length, | | | | |
| # Tₘ(° C.) = 81.5 + 16.6(log₁₀Na⁺) + 0.41(% G + C) − (600/N), where N is the number of bases in the hybrid, and Na⁺ is the molar concentration of sodium ions in the hybridization buffer (Na⁺ for 1xSSC = 0.165 M). | | | | |

[0026] The length of a polynucleotide probe employed in the present invention can be selected to produce the desired hybridization effect. For example, a polynucleotide probe can be selected to have at least 10, 15, 20, 25, 30, 35, 40, 45, 50, 60, 70, 80, 90, 100, 200, 300, 400, or more nucleotide residues.

[0027] A polynucleotide probe of the present invention can include naturally occurring residues (e.g., deoxyadenylate, deoxycytidylate, deoxyguanylate, deoxythymidylate, adenylate, cytidylate, guanylate, or uridylate), synthetically-produced analogs, or combinations thereof. Examples of suitable synthetic analogs include, but are not limited to, aza or deaza pyrimidine analogs, aza or deaza purine analogs, and other heterocyclic base analogs, where one or more of the carbon and nitrogen atoms of the purine and pyrimidine rings are substituted by heteroatoms, such as oxygen, sulfur, selenium, and phosphorus.

[0028] The backbone of a polynucleotide probe of the present invention can employ a naturally occurring linkage (such as through 5′ to 3′ linkage), a modified linkage, or a combination thereof. In one embodiment, the nucleotide residues in a polynucleotide probe are covalently connected via a non-typical linkage, such as 5′ to 2′ linkage, provided that the linkage does not interfere with hybridization. In another embodiment, peptide nucleic acids, in which the constitute bases are joined by peptide bonds rather than phosphodiester linkages, are used.

[0029] In many cases, the polynucleotide probes of the present invention have relatively high sequence complexity and do not contain long stretches of the same nucleotide. In still many cases, each polynucleotide probe employed does not include any ambiguous residue. In one example, the polynucleotide probes of the present invention do not have a high proportion of G or C residues at the 3′ ends. In another example, the polynucleotide probes do not have a 3′ terminal T residue. Depending on the type of assay or detection to be performed, sequences that are predicted to form hairpins or interstrand structures, such as “primer dimers,” can be either included or excluded from the polynucleotide probes of the present invention.

[0030] Any part of a rat gene can be used to design polynucleotide probes. For instance, probes can be designed based on the protein-coding region, the 5′ untranslated region, or the 3′ untranslated region of a rat gene. Multiple probes, such as at least 5, 10, 15, 20, 25, 30, 40, 50, 60, 70, 80, 90, 100, or more probes, can be prepared for the same rat gene. These probes may or may not overlap each other, although overlap among probes is desirable in certain assays.

[0031] The polynucleotide probes for a parent sequence preferably have low sequence identity or similarity with other parent sequences or their complements. For instance, a polynucleotide probe for a parent sequence can have no more than 70%, 60%, 50%, or less sequence similarity with other parent sequences, or the complements thereof. This low sequence similarity reduces the risk of cross-hybridization. Sequence identity or similarity can be determined by a variety of algorithms, such as BLASTN, FASTA, FASTDB, or GCG programs.

[0032] The suitability of a polynucleotide probe for hybridization can be evaluated by numerous computer programs. Examples of these programs include, but are not limited to, LaserGene (DNAStar), Oligo (National Biosciences, Inc.), MacVector (Kodak/IBI), and GCG programs.

[0033] The polynucleotide probes of the present invention can be synthesized using any method known in the art. For instance, automated or high throughput DNA synthesizers can be employed to prepare polynucleotide probes. The synthesized probes can be purified by reverse phase chromatography, ethanol precipitation, gel filtration, electrophoresis, or other suitable means.

[0034] To facilitate the probe design, the parent sequences with relative large sizes can be divided into shorter sequence segments. These divided sequences, together with any undivided parent sequence, are collectively referred to as the “tiling sequences.” Examples of these tiling sequences are depicted in SEQ ID NOs: 4,097-8,192. Table 4 illustrates the headers for each tiling sequence. Each tiling sequence has the same qualifier as the corresponding parent sequence from which the tiling sequence is derived. Table 5 shows the location of each tiling sequence in the corresponding parent sequence. The 5′ and 3′ ends of each tiling sequence in the corresponding parent sequence are indicated under “TilingStart” and “TilingEnd,” respectively.

[0035] Table 4 includes the following tiling sequence: WAN00OGR4 (SEQ ID NO: 8084), WAN00OGRF (SEQ ID NO: 8085), WAN00OGS3 (SEQ ID NO: 8086), WAN00OGS4 (SEQ ID NO: 8087), WAN00OGS5 (SEQ ID NO: 8088), WAN00OGS6 (SEQ ID NO: 8089), WAN00OGS7 (SEQ ID NO: 8090), WAN00OGS8 (SEQ ID NO: 8091), WAN00OGS9 (SEQ ID NO: 8092), WAN00OGSA (SEQ ID NO: 8093), WAN00OGSB (SEQ ID NO: 8094), WAN00OGSC (SEQ ID NO: 7622), WAN00OGSD (SEQ ID NO: 8095), WAN00OGSE (SEQ ID NO: 8096), WAN00OGSF (SEQ ID NO: 8097), WAN00OGSG (SEQ ID NO: 8098), WAN00OGSH (SEQ ID NO: 8099), WAN00OGSI (SEQ ID NO: 8100), WAN00OGSJ (SEQ ID NO: 8101), WAN00OGSK (SEQ ID NO: 8102), WAN00OGSL (SEQ ID NO: 8103), WAN00OGSM (SEQ ID NO: 8104), WAN00OGSN (SEQ ID NO: 8105), WAN00OGSO (SEQ ID NO: 8106), WAN00OGSP (SEQ ID NO: 8107), WAN00OGSQ (SEQ ID NO: 8108), WAN00OGSR (SEQ ID NO: 8109), WAN00OGSS (SEQ ID NO: 8110), WAN00OGST (SEQ ID NO: 8111), WAN00OGSU (SEQ ID NO: 8112), WAN00OGSV (SEQ ID NO: 8113), WAN00OGSW (SEQ ID NO: 8114), WAN00OGSX (SEQ ID NO: 8115), WAN00OGSY (SEQ ID NO: 8116), WAN00OGSZ (SEQ ID NO: 8117), WAN00OGT0 (SEQ ID NO: 8118), WAN00OGT1 (SEQ ID NO: 8119), WAN00OGT2 (SEQ ID NO: 8120), WAN00OGT3 (SEQ ID NO: 8121), WAN00OGT4 (SEQ ID NO: 8122), WAN00OGT5 (SEQ ID NO: 8123), and WAN00OGT6 (SEQ ID NO: 8124).

[0036] A BLAST search of SEQ ID NO: 8084 (tiling:giRat1a:WAN00OGR4; WAN00OPIU CARD14) against the Rattus norvegicus genome database at National Center for Biotechnology Information (NCBI) did not produce any homologous sequence. SEQ ID NO: 8084 has over 98% sequence identity to human gene CARD14, which encodes member 14 of the caspase recruitment domain family. The CARD14 protein belongs to the membrane-associated guanylate kinase (MAGUK) family, a class of proteins that functions as molecular scaffolds for the assembly of multiprotein complexes at specialized regions of the plasma membrane. The protein is also a member of the CARD protein family, which is defined by carrying a characteristic caspase-associated recruitment domain (CARD). The CARD14 protein shares a similar domain structure with CARD11 protein. The CARD domains of both proteins have been shown to specifically interact with BCL10, a protein known to function as a positive regulator of cell apoptosis and NF-kappaB activation. When expressed in cells, the CARD14 protein can activate NF-kappaB and induce the phosphorylation of BCL10. At least two alternatively spliced isoforms have been reported for CARD14.

[0037] SEQ ID NO: 8085 (tiling:giRat1a:WAN00OGRF; WAN00OPIV zgrbrggam12xcpx) has about 100% sequence identify to rat gene LOC362381. LOC362381 is located on rat chromosome 4q31.

[0038] Nucleotides 1-1334 of SEQ ID NO: 8086 (tiling:giRat1a:WAN00OGS3; WAN00OPIW r84g5) have about 99% sequence identity to the rat gene that encodes histamine receptor H3. Histamine receptor H3 can inhibit forskolin-stimulated cAMP production in response to histamine. Histamine is a ubiquitous messenger molecule released from mast cells, enterochromaffin-like cells, and neurons. Its various actions are mediated by histamine receptors H1, H2, H3 and H4. Histamine receptor H3 belongs to the family 1 of G protein-coupled receptors. It is an integral membrane protein and can regulate neurotransmitter release. Histamine receptor H3 can also increase voltage-dependent calcium current in smooth muscles and innervates the blood vessels and the heart in cardiovascular system.

[0039] Fragments of SEQ ID NO: 8087 have sequence homology to a variety of rat genomic sequences. A BLAST search of SEQ ID NO: 8087 against the NCBI human genome did not produce any homologous sequence.

[0040] SEQ ID NO: 8088 (tiling:giRat1a:WAN00OGS5; WAN00OPIY NARC8) has at least 97% sequence identity to the rat gene that encodes nuclear receptor binding factor 1. Nucleotides 250-353 of SEQ ID NO: 8088 have about 90% sequence identity to human CGI-63, also known as NRBF1, which encodes nuclear receptor binding factor 1.

[0041] SEQ ID NO: 8089 (tiling:giRat1a:WAN00OGS6; WAN00OPIZ narc10a) has about 99% sequence identity to a rat genomic region on chromosome 4q24. The region is located within rat gene LOC362377 which encodes a protein similar to hect domain and RLD 3. Nucleotides 374 to 1343 of SEQ ID NO: 8089 have about 82% sequence identity to human gene NAP1L5 which encodes nucleosome assembly protein 1-like 5.

[0042] Nucleotides 1-1382 of SEQ ID NO: 8090 (tiling:giRat1a:WAN00OGS7; WAN00OPJ0 NARC13) have about 99% sequence identity to a rat genomic region on chromosome 19q12. The region is located between the protein-coding sequences of rat genes LOC292058 and LOC307913. LOC292058 encodes a protein similar to HSPC037 protein. LOC307913 encodes a protein similar to hypothetical protein KLAA0182. Nucleotides 1029 to 1375 of SEQ ID NO: 8090 have about 82% sequence identity to human gene KLAA0182.

[0043] SEQ ID NO: 8091 (tiling:giRat1a:WAN00OGS8; WAN00OPJ1 r8t) has about 98% sequence identity to rat gene Kcnip2. SEQ ID NO: 8091 aligns with the 3′ untranslated region and the protein-coding region of Kcnip2. Kcnip2 encodes Kv channel-interacting protein 2. The protein is a member of the family of voltage-gated potassium (Kv) channel-interacting proteins (KCNIPs), which belongs to the recoverin branch of the EF-hand superfamily. Members of the KCNIP family are small calcium binding proteins. Many members have EF-hand-like domains, and differ from each other in the N-terminus. They are integral subunit components of native Kv4 channel complexes. They may regulate A-type currents, and hence neuronal excitability, in response to changes in intracellular calcium. Multiple alternatively spliced transcript variants encoding distinct isoforms have been identified for this gene.

[0044] SEQ ID NO: 8092 (tiling:giRat1a:WAN00OGS9; WAN00OPJ2 rncs1) aligns with rat gene Hpca on chromosome 5q36. Hpca encodes hippocalcin, which is a member of neuron-specific calcium-binding proteins family found in the retina and brain. Hippocalcin is associated with the plasma membrane. It has similarities to proteins located in the photoreceptor cells that regulate photosignal transduction in a calcium-sensitive manner. Hippocalcin displays recoverin activity and a calcium-dependent inhibition of rhodopsin kinase.

[0045] SEQ ID NO: 8093 (tiling:giRat1a:WAN00OGSA; WAN00OPJ3 kchip2(9q)) has about 99% sequence identity to the 3′ untranslated region and the protein-coding region of rat gene Kcnip2.

[0046] SEQ ID NO: 8094 (tiling:giRat1a:WAN00OGSB; WAN00OPJ4 narc27) aligns with rat gene LOC298500. LOC298500 encodes a protein which is similar to hypothetical protein AL133206. LOC298500 is located on rat chromosome 5q36.

[0047] SEQ ID NO: 7622 (tiling:giRat1a:WAN00OGSC; WAN00OPJ5 r9q) aligns with a rat genomic region that overlaps the 3′ untranslated region of rat gene Kcnip2.

[0048] A BLAST search of SEQ ID NO: 8095 (tiling:giRat1a:WAN00OGSD; WAN00OPJ6 CARD6) against the NCBI rat genome produced no homologous sequence. SEQ ID NO: 8095 has about 99% sequence identity to a human genomic region that overlaps the 3′ untranslated region and the protein-coding region of human gene CARD6. CARD6 encodes member 6 of the caspase recruitment domain family. Members of the caspase recruitment domain family are defined by the presence of a characteristic caspase-associated recruitment domain (CARD). CARD is a protein interaction domain known to participate in activation or suppression of CARD containing members of the caspase family, and thus plays an important regulatory role in cell apoptosis.

[0049] A BLAST search of SEQ ID NO: 8096 (tiling:giRat1a:WAN00OGSE; WAN00OPJ7 CARD7) against the NCBI rat genome produced no homologous sequence. SEQ ID NO: 8096 has about 97% sequence identity to human gene NALP1. NALP1 encodes NACHT, leucine rich repeat and PYD containing 1, which is a member of the Ced4 family of apoptosis proteins. Ced-family members contain a caspase recruitment domain (CARD) and are known to be key mediators of programmed cell death. The NALP1 protein contains a distinct N-terminal pyrin-like motif, which is possibly involved in protein-protein interactions. This protein interacts strongly with caspase 2 and weakly with caspase 9. Overexpression of NALP1 gene can induce apoptosis in cells. Multiple alternatively spliced transcript variants encoding distinct isoforms have been found for NALP1 gene.

[0050] SEQ ID NO: 8097 (tiling:giRat1a:WAN00OGSF; WAN00OPJ8 zmrbr11pxcpx) aligns with rat gene LOC361071. LOC361071 encodes a protein similar to Succinyl-CoA ligase [ADP-forming] beta-chain, mitochondrial precursor (Succinyl-CoA synthetase, betaA chain) (SCS-betaA) (ATP-specific succinyl-CoA synthetase beta subunit). The gene is located on rat chromosome 15p11-q11. SEQ ID NO: 8097 has about 78-93% sequence identity to human gene SUCLA2 which encodes succinate-CoA ligase, ADP-forming, beta subunit.

[0051] SEQ ID NO: 8098 (tiling:giRat1a:WAN00OGSG; WAN00OPJ9 r1v) has about 98% sequence identity to rat gene Kcnip1. Kcnip1 encodes Kv channel interacting protein 1 which is a member of the family of voltage-gated potassium (Kv) channel-interacting proteins (KCNIPs).

[0052] A BLAST search of SEQ ID NO: 8099 (tiling:giRat1a:WAN00OGSH; WAN00OPJA CARD12) against the NCBI rat genome produced no homologous sequence. SEQ ID NO: 8099 has at least 99% sequence identity to human gene CARD12. CARD12 encodes member 12 of the caspase recruitment domain family.

[0053] Nucleotides 396-523 of SEQ ID NO: 8100 (tiling:giRat1a:WAN00OGSI; WAN00OPJB CARD9) have about 90% sequence identity to rat gene LOC360357. LOC360357 is a hypothetical gene supported by NM_{—}022303. SEQ ID NO: 8100 has about 96% sequence identity to human gene CARD9, which encodes member 9 of the caspase recruitment domain family.

[0054] A majority portion of SEQ ID NO: 8101 (tiling:giRat1a:WAN00OGSJ; WAN00OPJC narc16) aligns with the intron sequence of rat gene LOC362219. LOC362219 encodes hypothetical protein LK44.

[0055] A BLAST search of SEQ ID NO: 8102 (tiling:giRat1a:WAN00OGSK; WAN00OPJD CARD4) against the NCBO rat genome produced no homologous sequence. Nucleotides 1-1400 of SEQ ID NO: 8102 have about 99% sequence identity to human gene CARD4. CARD4 encodes member 4 of the caspase recruitment domain family.

[0056] Fragments of SEQ ID NO: 8103 (tiling:giRat1a:WAN00OGSL; WAN00OPJE narc6) have sequence homology to a variety of rat genomic sequences, including rat gene LOC363424. LOC363424 encodes a transcript similar to RIKEN cDNA 4933431D05.

[0057] Nucleotides 1-100 and 627-716 of SEQ ID NO: 8104 (tiling:giRat1a:WAN00OGSM; WAN00OPJF CARD3) have about 93-95% sequence identity to rat gene LOC362491. LOC362491 encodes a protein which is similar to receptor-interacting protein 2. SEQ ID NO: 8103 has about 99% sequence identity to human gene RIPK2, also known as CARD3, which encodes receptor-interacting serine-threonine kinase 2.

[0058] A BLAST search of SEQ ID NO: 8105 (tiling:giRat1a:WAN00OGSN; WAN00OPJG CARD10) against the NCBI rat genome produced no homologous sequence. Nucleotides 1-585 of SEQ ID NO: 8105 have about 99% sequence identity to human gene CARD10. CARD10 encodes member 10 of the caspase recruitment domain family.

[0059] Nucleotides 1-96 of SEQ ID NO: 8106 (tiling:giRat1a:WAN00OGSO; WAN00OPJH CARD11) have about 89% sequence identity to rat gene LOC304314. LOC304314 encodes a protein similar to member 11 of the caspase recruitment domain family. Nucleotides 1-585 of SEQ ID NO: 8106 have about 100% sequence identity to human gene CARD11, which encodes member 11 of the caspase recruitment domain family.

[0060] A BLAST search of SEQ ID NO: 8107 (tiling:giRat1a:WAN00OGSP; WAN00OPJI CARD5) against the NCBI rat genome produced no homologous sequence. Nucleotides 1-591 of SEQ ID NO: 8107 have 98% sequence identity to human gene ASC, also known as CARD5, which encodes apoptosis-associated speck-like protein containing a CARD. The ASC protein is an adaptor protein that is composed of two protein-protein interaction domains—namely an N-terminal PYRIN-PAAD-DAPIN domain (PYD) and a C-terminal caspase-recruitment domain (CARD). The PYD and CARD domains are members of the six-helix bundle death domain-fold superfamily that mediates assembly of large signaling complexes in the inflammatory and apoptotic signaling pathways via the activation of caspase. In normal cells, the ASC protein is localized to the cytoplasm. In cells undergoing apoptosis, the ASC protein forms ball-like aggregates near the nuclear periphery. At least three transcript variants encoding different isoforms have been reported for this gene.

[0061] A BLAST search of SEQ ID NO: 8108 (tiling:giRat1a:WAN00OGSQ; WAN00OPJJ CARD8) against the NCBI rat genome produced no homologous sequence. Nucleotides 1 to 600 of SEQ ID NO: 8108 have about 99% sequence identity to the 3′ untranslated region of human gene CARD8, which encodes member 8 of the caspase recruitment domain family.

[0062] SEQ ID NO: 8109 (tiling:giRat1a:WAN00OGSR; WAN00OPJK Caspase12) aligns with rat gene caspase 12. Increased expression of caspase 12 was observed in rat neurons after traumatic brain injury. The gene is believed to be involved in apoptosis.

[0063] SEQ ID NO: 8110 (tiling:giRat1a:WAN00OGSS; WAN00OPJL flr9o) has about 100% sequence identity to a rat genomic sequence located 3′ to the protein-coding region of LOC309828. LOC309828 encodes a transcript similar to RIKEN cDNA 2610102M01.

[0064] SEQ ID NO: 8111 (tiling:giRat1a:WAN00OGST; WAN00OPJM hkng) aligns with rat gene LOC367345. LOC367345 encodes a protein similar to clusterin-like 1 (retinal) (a prepropeptide specific to rod photoreceptor). The gene is located on rat chromosome 9q38.

[0065] SEQ ID NO: 8111 (tiling:giRat1a:WAN00OGSU; WAN00OPJN kv4.2(5′utr)) aligns with rat gene Kcnd2, which encodes potassium voltage gated channel, Shal-related family, member 2. The gene is located on rat chromosome 4q22.

[0066] A majority portion of SEQ ID NO: 8113 (tiling:giRat1a:WAN00OGSV; WAN00OPJ0 narc19) overlaps with the 3′ untranslated region of the rat gene that encodes epididymal secretory protein 1.

[0067] SEQ ID NO: 8114 (tiling:giRat1a:WAN00OGSW; WAN00OPJP narc9) has significant sequence identity to a rat genomic sequence located 3′ to the protein-coding region of rat gene LOC362219. LOC362219 is located on chromosome 3q36 and encodes hypothetical protein LK44.

[0068] SEQ ID NO: 8115 (tiling:giRat1a:WAN00OGSX; WAN00OPJQ PABLO) aligns with rat gene LOC294568, which encodes a protein similar to WASP family 1.

[0069] SEQ ID NO: 8116 (tiling:giRat1a:WAN00OGSY; WAN00OPJR r19r) aligns with rat gene Pitpn, which encodes phosphatidylinositol transfer protein. Phosphatidylinositol transfer protein is a member of cytosolic phospholipid transfer proteins.

[0070] SEQ ID NO: 8117 (tiling:giRat1a:WAN00OGSZ; WAN00OPJS rp19) aligns with rat gene Csen, which encodes calsenilin, presenilin binding protein, EF hand transcription factor. The Csen protein is a member of the family of voltage-gated potassium (Kv) channel-interacting proteins (KCNIPs), which belong to the recoverin branch of the EF-hand superfamily. The Csen protein can function as a calcium-regulated transcriptional repressor, and to interact with presenilins. Mutations in the presenilin genes have been implicated in Alzheimer's disease.

[0071] SEQ ID NO: 8118 (tiling:giRat1a:WAN00OGT0; WAN00OPJT zgrbrgbetalxcpx) has about 99% sequence identity to a rat genomic region which overlaps with the 3′ untranslated region of rat gene Gnb1. Gnb1 encodes guanine nucleotide binding protein, beta 1, and is located on chromosome 5q36. The Gnb1 protein is a component of heterotrimeric G-proteins. It can mediate activity of effector molecules and contribute to the specificity of G-protein receptor interaction.

[0072] SEQ ID NO: 8118 also has about 99% sequence identity to rat gene LOC301910, which encodes a protein similar to guanine nucleotide-binding protein, beta-1 subunit. LOC301910 is located on chromosome 1p11. Moreover, SEQ ID NO: 8118 has about 98% sequence identity to a rat genomic sequence locate on chromosome 16.

[0073] SEQ ID NO: 8119 (tiling:giRat1a:WAN00OGT1; WAN00OPJU zgrbrgbeta2xcpx) corresponds to a rat genomic sequence which is located 3′ to the protein-coding region of rat gene Gnb2. Gnb2 encodes guanine nucleotide binding protein, beta polypeptide 2. Many heterotrimeric guanine nucleotide-binding proteins (G proteins), which integrate signals between receptors and effector proteins, are composed of an alpha, a beta, and a gamma subunit. These subunits are encoded by families of related genes. The Gnb2 gene encodes a beta subunit. Beta subunits are important regulators of alpha subunits, as well as of certain signal transduction receptors and effectors.

[0074] SEQ ID NO: 8120 (tiling:giRat1a:WAN00OGT2; WAN00OPJV zgrbrgbeta4xcpx) has about 99% sequence identity to a genomic region on rat chromosome 2q25. The region is located between the protein-coding sequences of rat genes mitofusin 1 and LOC294962. LOC294962 encodes a protein similar to guanine nucleotide binding protein beta 4.

[0075] SEQ ID NO: 8121 (tiling:giRat1a:WAN00OGT3; WAN00OPJW zgrbrgbeta5xcpx) corresponds to rat gene Gnb5, which encodes guanine nucleotide binding protein beta 5.

[0076] A BLAST search of SEQ ID NO: 8122 (tiling:giRat1a:WAN00OGT4; WAN00OPJY zgrbrggam2xcpx) against the NCBI rat genome produced no homologous sequence.

[0077] SEQ ID NO: 8123 (tiling:giRat1a:WAN00OGT5; WAN00OPJZ zgrbrggam3xcpx) has significant sequence identity to a rat genomic region on chromosome 1q43. The region is located between the protein-coding sequences of rat genes LOC361722 and LOC361721. LOC361722 encodes a protein similar to seipin. LOC361721 encodes a protein similar to a hypothetical protein. SEQ ID NO: 8123 has about 96% sequence identity to human gene GNG3, which encodes guanine nucleotide binding protein, gamma 3.

[0078] SEQ ID NO: 8124 (tiling:giRat1a:WAN00OGT6; WAN00OPK1 PSGL-1) has significant sequence identity with rat gene LOC363930, which encodes a protein similar to P-selectin glycoprotein ligand precursor and is located on chromosome 12q16. Nucleotides 304-600 of SEQ ID NO: 8124 have about 81% sequence identity to human gene SELPLG, which encodes selectin P ligand. The SELPLG protein is the high affinity counter-receptor for P-selectin on myeloid cells and stimulated T lymphocytes. The protein may play a critical role in the tethering of these cells to activated platelets or endothelia expressing P-selectin. The organization of the human SELPG gene closely resembles that of human CD43 and the human platelet glycoprotein GpIb-alpha, both of which have an intron in the 5′ noncoding region, a long second exon containing the complete coding region, and TATA-less promoters.

[0079] Each tiling sequence depicted in Table 4 can be used to prepare polynucleotide probes for the corresponding rat gene(s). These polynucleotide probes can hybridize under stringent or nucleic acid array hybridization conditions to the tiling sequence, or the complement thereof. In one embodiment, a polynucleotide probe for a tiling sequence can hybridize under highly stringent conditions to the tiling sequence, or the complement thereof. In another embodiment, the polynucleotide probes for a tiling sequence are incapable of hybridizing under stringent or nucleic acid array hybridization conditions to other tiling sequences, or the complements thereof. Where a tiling sequence contains an ambiguous residue, the probes for the tiling sequence can be designed to hybridize under stringent or nucleic acid array conditions to an unambiguous segment of the tiling sequence, or the complement of the unambiguous segment.

[0080] In one embodiment, the polynucleotide probes for each tiling sequence are generated using Array Designer, a software package provided by TeleChem International, Inc (Sunnyvale, Calif. 94089). Examples of the probes thus generated are depicted in SEQ ID NOs: 8,193-174,863. The qualifiers of these probes are illustrated in Table 6. The qualifier of each probe is identical to that of the corresponding tiling sequence from which the probe is derived. Other methods or software programs can also be used to generate hybridization probes for the tiling sequences of the present invention.

[0081] The parent sequences, tiling sequences, and polynucleotide probes of the present invention can be used for expression profiling of rat genes. Methods suitable for this purpose include, but are not limited to, nucleic acid arrays (including bead arrays), Northern Blot, in situ hybridization, PCR, or RT-PCR.

C. Nucleic Acid Arrays for Expression Profiling of Rat Genes

[0082] The polynucleotide probes of the present invention can be used to make nucleic acid arrays. A typical nucleic acid array includes at least one substrate support which has a plurality of discrete regions. The location of each discrete region is either known or determinable. The discrete regions can be organized in various forms or patterns. In one example, the discrete regions are organized as an array of regularly spaced areas on a surface of the substrate support. Other regular or irregular patterns, such as linear, concentric or spiral patterns, can also be used.

[0083] Polynucleotide probes can be stably attached to the discrete regions via covalent or non-covalent interactions. By “stably attached” or “stably associated,” it means that a polynucleotide probe retains its position relative to the attached discrete region during nucleic acid array hybridization and subsequent signal detection. Any method known in the art can be used to stably attach a polynucleotide probe to a discrete region on a nucleic acid array. In one embodiment, the attachment is achieved by first depositing polynucleotide probes to the respective discrete regions and then exposing the substrate surface to a solution of a cross-linking agent, such as glutaraldehyde, borohydride, or other bifunctional agents. In another embodiment, polynucleotide probes are covalently bound to a substrate support via an alkylamino-linker group or by coating the glass slides with polyethylenimine followed by activation with cyanuric chloride for coupling the polynucleotides. In yet another embodiment, polynucleotide probes are covalently attached to a nucleic acid array through polymer linkers. The polymer linkers can improve the accessibility of the probes to their purported targets. The polymer linkers can be selected to minimize any interference with the interactions between the probes and the purported targets.

[0084] A polynucleotide probe can also be stably attached to a nucleic acid array via non-covalent interactions. In one embodiment, polynucleotide probes are attached to a substrate surface through electrostatic interactions between positively charged surface groups and the negatively charged probes. In another embodiment, the substrate support is a glass slide having a coating of a polycationic polymer on its surface, such as a cationic polypeptide, and polynucleotide probes are stably bound to these polycationic polymers. In still another embodiment, the methods described in U.S. Pat. No. 6,440,723 are used to stably attach polynucleotide probes to a nucleic acid array of the present invention.

[0085] Various materials can be used to make nucleic acid array substrate supports. Suitable materials include, but are not limited to, glass, silica, ceramics, nylons, quartz wafers, gels, metals, and papers. The substrate supports can be flexible or rigid. In one embodiment, the substrate supports are in the form of a tape which is wound up on a reel or cassette.

[0086] A nucleic acid array of the present invention can have only one substrate support. A nucleic acid array of the present invention can also include two or more substrate supports. In many cases, the substrate support(s) in a nucleic acid array is non-reactive with reagents that are used in nucleic acid array hybridization.

[0087] The surface(s) of a substrate support can be smooth and substantially planar. The surface(s) of a substrate support can also include a variety of configurations, such as raised or depressed regions, trenches, v-grooves, mesa structures, or other regular or irregular structures. The surface(s) of a substrate support can be coated with one or more modification layers. Suitable modification layers include inorganic or organic layers, such as metals, metal oxides, polymers, or small organic molecules. The surface(s) of a substrate support can also be chemically treated to include groups such as hydroxyl, carboxyl, amine, aldehyde, or sulfhydryl groups.

[0088] The discrete regions on a nucleic acid array can be of any size, shape, or density. For instance, they can be squares, ellipsoids, rectangles, triangles, or circles. Other regular or irregular geometric shapes can also be used. The discrete regions on a substrate support can have the same or different shapes. Each discrete region can have, for example, a surface area of less than 10⁻¹, 10⁻², 10⁻³, 10⁻⁴, 10⁻⁵, 10⁻⁶, 10⁻⁷ cm², cm², or lesser. The spacing between each discrete region and its closest neighbor, measured from center-to-center, can range, without limitation, from about 10 to about 400 μm. In a non-limiting example, the density of the discrete regions on a nucleic acid array is between 50 and 50,000 regions/cm².

[0089] Numerous methods can be used to make the nucleic acid arrays of the present invention. In one embodiment, polynucleotide probes are synthesized in a step-by-step manner on a substrate support. A variety of algorithms can be used to reduce the number of synthesis cycles. In one example, a nucleic acid array of the present invention is synthesized in a combinational fashion by delivering monomers to the discrete regions through mechanically constrained flowpaths. In another example, a nucleic acid array of the present invention is synthesized by spotting monomer reagents onto a substrate support using an ink jet printer, such as the DeskWriter C manufactured by Hewlett-Packard. In yet another example, photolithography techniques are used to immobilize polynucleotide probes. Polynucleotide probes can also be deposited to a substrate support in pre-synthesized forms.

[0090] The present invention features any type of nucleic acid array, such as oligonucleotide arrays, cDNA arrays, or bead arrays. A bead array includes a plurality of beads to which polynucleotide probes are stably attached.

[0091] A nucleic acid array of the present invention can include any number of polynucleotide probes. In many embodiments, a substantial portion of all probes on a nucleic acid array is probes for rat genes. For instance, rat gene probes can constitute at least 15%, 20%, 25%, 30%, 35%, 40%, 45%, or 50% of all polynucleotides (including perfect match and perfect mismatch probes) that are stably attached to a nucleic acid array of the present invention. These rat gene probes can be attached to one substrate support. They can also be attached to two or more substrate supports.

[0092] In one embodiment, a nucleic acid array of the present invention includes at least 2, 5, 10, 20, 30, 40, 50, 100, 200, 300, 400, 500, 1,000, 2,000, 3,000, 4,000, or more probes, each of which can hybridize under stringent or nucleic acid array hybridization conditions to a different respective rat gene. As used herein, a probe can hybridize to a gene if the probe can hybridize to an RNA transcript, or the complement thereof, of the gene.

[0093] In another embodiment, a nucleic acid array of the present invention includes at least 2, 5, 10, 20, 30, 40, 50, 100, 200, 300, 400, 500, 1,000, 2,000, 3,000, 4,000, or more probes, each of which can hybridize under stringent or nucleic acid array hybridization conditions to a different respective tiling sequence selected from SEQ ID NOs: 4,097-8,192, or the complement thereof. In yet another embodiment, a nucleic acid array of the present invention includes at least 2, 5, 10, 20, 30, 40, 50, 100, 200, 300, 400, 500, 1,000, 2,000, 3,000, 4,000, or more probes, each of which can hybridize under stringent or nucleic acid array hybridization conditions to a different respective rat gene that encodes a tiling sequence selected from SEQ ID NOs: 4,097-8,192. In a further embodiment, a nucleic acid array of the present invention comprises at least one probe for each tiling sequence selected from SEQ ID NOs: 4,097-8,192. As used herein, a probe for a sequence refers to a probe which can hybridize under stringent or nucleic acid hybridization conditions to the sequence or the complement thereof. In still yet another embodiment, a nucleic acid array of the present invention comprises at least one probe for each rat gene that encodes a tiling sequence selected from SEQ ID NOs: 4,097-8,192.

[0094] In another embodiment, a nucleic acid array of the present invention includes at least 2, 5, 10, 20, 30, 40, 50, 100, 200, 300, 400, 500, 1,000, 2,000, 3,000, 4,000, or more probes, each of which can hybridize under stringent or nucleic acid array hybridization conditions to a different respective parent sequence selected from SEQ ID NOs: 1-4,096, or the complement thereof. In yet another embodiment, a nucleic acid array of the present invention includes at least 2, 5, 10, 20, 30, 40, 50, 100, 200, 300, 400, 500, 1,000, 2,000, 3,000, 4,000, or more probes, each of which can hybridize under stringent or nucleic acid array hybridization conditions to a different respective rat gene that encodes a parent sequence selected from SEQ ID NOs: 1-4,096.

[0095] In a further embodiment, a nucleic acid array of the present invention includes at least 1, 2, 3, 4, 5, 6, 7, 8, 9, 10, 15, 20, 25, 30, 35, 40, or 42 polynucleotide probes, each of which can hybridize under stringent or nucleic acid array hybridization conditions to a different respective rat gene that encodes a sequence selected from the group consisting of WAN00OGR4 (SEQ ID NO: 8084), WAN00OGRF (SEQ ID NO: 8085), WAN00OGS3 (SEQ ID NO: 8086), WAN00OGS4 (SEQ ID NO: 8087), WAN00OGS5 (SEQ ID NO: 8088), WAN00OGS6 (SEQ ID NO: 8089), WAN00OGS7 (SEQ ID NO: 8090), WAN00OGS8 (SEQ ID NO: 8091), WAN00OGS9 (SEQ ID NO: 8092), WAN00OGSA (SEQ ID NO: 8093), WAN00OGSB (SEQ ID NO: 8094), WAN00OGSC (SEQ ID NO: 7622), WAN00OGSD (SEQ ID NO: 8095), WAN00OGSE (SEQ ID NO: 8096), WAN00OGSF (SEQ ID NO: 8097), WAN00OGSG (SEQ ID NO: 8098), WAN00OGSH (SEQ ID NO: 8099), WAN00OGSI (SEQ ID NO: 8100), WAN00OGSJ (SEQ ID NO: 8101), WAN00OGSK (SEQ ID NO: 8102), WAN00OGSL (SEQ ID NO: 8103), WAN00OGSM (SEQ ID NO: 8104), WAN00OGSN (SEQ ID NO: 8105), WAN00OGSO (SEQ ID NO: 8106), WAN00OGSP (SEQ ID NO: 8107), WAN00OGSQ (SEQ ID NO: 8108), WAN00OGSR (SEQ ID NO: 8109), WAN00OGSS (SEQ ID NO: 8110), WAN00OGST (SEQ ID NO: 8111), WAN00OGSU (SEQ ID NO: 8112), WAN00OGSV (SEQ ID NO: 8113), WAN00OGSW (SEQ ID NO: 8114), WAN00OGSX (SEQ ID NO: 8115), WAN00OGSY (SEQ ID NO: 8116), WAN00OGSZ (SEQ ID NO: 8117), WAN00OGT0 (SEQ ID NO: 8118), WAN00OGT1 (SEQ ID NO: 8119), WAN00OGT2 (SEQ ID NO: 8120), WAN00OGT3 (SEQ ID NO: 8121), WAN00OGT4 (SEQ ID NO: 8122), WAN00OGT5 (SEQ ID NO: 8123), and WAN00OGT6 (SEQ ID NO: 8124).

[0096] In another embodiment, a nucleic acid array of the present invention includes at least 1, 2, 3, 4, 5, 6, 7, 8, 9, or 10 probes, each of which can hybridize under stringent or nucleic acid array hybridization conditions to a different respective rat gene that encodes a sequence selected from the group consisting of WAN00OGR4 (SEQ ID NO: 8084), WAN00OGSD (SEQ ID NO: 8095), WAN00OGSE (SEQ ID NO: 8096), WAN00OGSH (SEQ ID NO: 8099), WAN00OGSK (SEQ ID NO: 8102), WAN00OGSN (SEQ ID NO: 8105), WAN00OGSP (SEQ ID NO: 8107), WAN00OGSQ (SEQ ID NO: 8108), WAN00OGS4 (SEQ ID NO: 8087), and WAN00OGT4 (SEQ ID NO: 8122).

[0097] In still another embodiment, a nucleic acid array of the present invention includes at least one probe which can hybridize under stringent or nucleic acid array hybridization conditions to a rat gene that encodes WAN00OGS4 (SEQ ID NO: 8087), and/or at least one probe which can hybridize under stringent or nucleic acid array hybridization conditions to a rat gene that encodes WAN00OGT4 (SEQ ID NO: 8122).

[0098] Multiple probes for the same rat gene or tiling sequence can be included in a nucleic acid array of the present invention. For instance, at least 2, 5, 10, 15, 20, 25, 30, 35, 40, 45, 50, 55, 60, 65, 70, or more probes can be used for each rat gene or tiling sequence being analyzed. In many instances, reliability and reproducibility of the probe set signal values decrease substantially if less than 20 probe pairs per transcript are used. By increasing the number of probe pairs for each rat gene or tile sequence, a more robust and reliable detection can be produced.

[0099] Different polynucleotide probes can be attached to different respective discrete regions on a nucleic acid array of the present invention. Different probes can also be attached to the same discrete region. The concentration of one probe with respect to other probe or probes in the same region may vary according to the objectives and requirements of the particular experiment. In one example, different probes in the same region are present in approximately equimolar ratio. Likewise, probes for different rat genes or tiling sequences can be attached to the same or different discrete regions on a nucleic acid array.

[0100] A nucleic acid array of the present invention can further include control probes which can hybridize under stringent or nucleic acid array hybridization conditions to respective control sequences, or the complements thereof. Examples of suitable control sequences are depicted in SEQ ID NO: 174,864-174,982. Table 7 illustrates the headers for each control sequence. Each header includes a qualifier as well as other information of the corresponding control sequence.

TABLE 7
Control Sequences

| SEQ ID | Header |
|---|---|
| 174864 | >control: giRat1a: Unassigned; Rat 18S rRNA gene, complete. |
| 174865 | >control: giRat1a: Unassigned; Rat 18S rRNA gene, complete. |
| 174866 | >control: giRat1a: Unassigned; Rat 18S rRNA gene, complete. |
| 174867 | >control: giRat1a: Unassigned; R. norvegicus 5S rRNA gene (clone pRA5S2). |
| 174868 | >control: giRat1a: Unassigned; Rat gene encoding cytoplasmic beta-actin. |
| 174869 | >control: giRat1a: Unassigned; Rat gene encoding cytoplasmic beta-actin. |
| 174870 | >control: giRat1a: Unassigned; Rat gene encoding cytoplasmic beta-actin. |
| 174871 | >control: giRat1a: Unassigned; Rat mRNA for glyceraldehyde-3-phosphate- |
| | dehydrogenase (GAPDH) (GAPDH, EC 1.2.1.12). |
| 174872 | >control: giRat1a: Unassigned; Rat mRNA for glyceraldehyde-3-phosphate- |
| | dehydrogenase (GAPDH) (GAPDH, EC 1.2.1.12). |
| 174873 | >control: giRat1a: Unassigned; Rat mRNA for glyceraldehyde-3-phosphate- |
| | dehydrogenase (GAPDH) (GAPDH, EC 1.2.1.12). |
| 174874 | >control: giRat1a: Unassigned; Rattus norvegicus brain hexokinase mRNA, |
| | complete cds. |
| 174875 | >control: giRat1a: Unassigned; Rattus norvegicus brain hexokinase mRNA, |
| | complete cds. |
| 174876 | >control: giRat1a: Unassigned; Rattus norvegicus brain hexokinase mRNA, |
| | complete cds. |
| 174877 | >control: giRat1a: Unassigned; Rat DNA for B1 repeat (1-42) from gamma |
| | crystallin gene cluster. |
| 174878 | >control: giRat1a: Unassigned; Rat DNA for B2 repeat (1-12) from gamma |
| | crystallin gene cluster. |
| 174879 | >control: giRat1a: J04423; J04423 E coli bioB gene biotin synthetase (-5, -M, -3 |
| | represent transcript regions 5 prime, Middle, and 3 prime respectively) |
| 174880 | >control: giRat1a: J04423; J04423 E coli bioB gene biotin synthetase (-5, -M, -3 |
| | represent transcript regions 5 prime, Middle, and 3 prime respectively) |
| 174881 | >control: giRat1a: J04423; J04423 E coli bioB gene biotin synthetase (-5, -M, -3 |
| | represent transcript regions 5 prime, Middle, and 3 prime respectively) |
| 174882 | >control: giRat1a: J04423; J04423 E coli bioC protein (-5 and -3 represent |
| | transcript regions 5 prime and 3 prime respectively) |
| 174883 | >control: giRat1a: J04423; J04423 E coli bioC protein (-5 and -3 represent |
| | transcript regions 5 prime and 3 prime respectively) |
| 174884 | >control: giRat1a: J04423; J04423 E coli bioD gene dethiobiotin synthetase (-5 |
| | and -3 represent transcript regions 5 prime and 3 prime respectively) |
| 174885 | >control: giRat1a: J04423; J04423 E coli bioD gene dethiobiotin synthetase (-5 |
| | and -3 represent transcript regions 5 prime and 3 prime respectively) |
| 174886 | >control: giRat1a: X03453; X03453 Bacteriophage P1 cre recombinase protein (-5 |
| | and -3 represent transcript regions 5 prime and 3 prime respectively) |
| 174887 | >control: giRat1a: X03453; X03453 Bacteriophage P1 cre recombinase protein (-5 |
| | and -3 represent transcript regions 5 prime and 3 prime respectively) |
| 174888 | >control: giRat1a: L38424; L38424 B subtilis dapB, jojF, jojG genes |
| | corresponding to nucleotides 1358-3197 of L38424 (-5, -M, -3 represent |
| | transcript regions 5 prime, Middle, and 3 prime respectively) |
| 174889 | >control: giRat1a: L38424; L38424 B subtilis dapB, jojF, jojG genes |
| | corresponding to nucleotides 1358-3197 of L38424 (-5, -M, -3 represent |
| | transcript regions 5 prime, Middle, and 3 prime respectively) |
| 174890 | >control: giRat1a: L38424; L38424 B subtilis dapB, jojF, jojG genes |
| | corresponding to nucleotides 1358-3197 of L38424 (-5, -M, -3 represent |
| | transcript regions 5 prime, Middle, and 3 prime respectively) |
| 174891 | >control: giRat1a: X17013; X17013 B subtilis lys gene for diaminopimelate |
| | decarboxylase corresponding to nucleotides 350-1345 of X17013 (-5, -M, -3 |
| | represent transcript regions 5 prime, Middle, and 3 prime respectively) |
| 174892 | >control: giRat1a: X17013; X17013 B subtilis lys gene for diaminopimelate |
| | decarboxylase corresponding to nucleotides 350-1345 of X17013 (-5, -M, -3 |
| | represent transcript regions 5 prime, Middle, and 3 prime respectively) |
| 174893 | >control: giRat1a: X17013; X17013 B subtilis lys gene for diaminopimelate |
| | decarboxylase corresponding to nucleotides 350-1345 of X17013 (-5, -M, -3 |
| | represent transcript regions 5 prime, Middle, and 3 prime respectively) |
| 174894 | >control: giRat1a: M24537; M24537 B subtilis pheB, pheA genes corresponding |
| | to nucleotides 2017-3334 of M24537 (-5, -M, -3 represent transcript regions 5 |
| | prime, Middle, and 3 prime respectively) |
| 174895 | >control: giRat1a: M24537; M24537 B subtilis pheB, pheA genes corresponding |
| | to nucleotides 2017-3334 of M24537 (-5, -M, -3 represent transcript regions 5 |
| | prime, Middle, and 3 prime respectively) |
| 174896 | >control: giRat1a: M24537; M24537 B subtilis pheB, pheA genes corresponding |
| | to nucleotides 2017-3334 of M24537 (-5, -M, -3 represent transcript regions 5 |
| | prime, Middle, and 3 prime respectively) |
| 174897 | >control: giRat1a: X04603; X04603 B subtilis thrC, thrB genes corresponding to |
| | nucleotides 248-2229 of X04603 (-5, -M, -3 represent transcript regions 5 prime, |
| | Middle, and 3 prime respectively) |
| 174898 | >control: giRat1a: X04603; X04603 B subtilis thrC, thrB genes corresponding to |
| | nucleotides 248-2229 of X04603 (-5, -M, -3 represent transcript regions 5 prime, |
| | Middle, and 3 prime respectively) |
| 174899 | >control: giRat1a: K01391; K01391 B subtilis TrpE protein, TrpD protein, TrpC |
| | protein corresponding to nucleotides 1883-4400 of K01391 (-5, -M, -3 represent |
| | transcript regions 5 prime, Middle, and 3 prime respectively) |
| 174900 | >control: giRat1a: K01391; K01391 B subtilis TrpE protein, TrpD protein, TrpC |
| | protein corresponding to nucleotides 1883-4400 of K01391 (-5, -M, -3 represent |
| | transcript regions 5 prime, Middle, and 3 prime respectively) |
| 174901 | >control: giRat1a: K01391; K01391 B subtilis TrpE protein, TrpD protein, TrpC |
| | protein corresponding to nucleotides 1883-4400 of K01391 (-5, -M, -3 represent |
| | transcript regions 5 prime, Middle, and 3 prime respectively) |
| 174902 | >control: giRat1a: Unassigned; Rat gene encoding cytoplasmic beta-actin. |
| 174903 | >control: giRat1a: Unassigned; Rat gene encoding cytoplasmic beta-actin. |
| 174904 | >control: giRat1a: Unassigned; Rat gene encoding cytoplasmic beta-actin. |
| 174905 | >control: giRat1a: Unassigned; E. coli biotin synthetase (bioB), complete cds. |
| 174906 | >control: giRat1a: Unassigned; E. coli biotin synthetase (bioB), complete cds. |
| 174907 | >control: giRat1a: Unassigned; E. coli biotin synthetase (bioB), complete cds. |
| 174908 | >control: giRat1a: Unassigned; E. coli biotin synthetase (bioB), complete cds. |
| 174909 | >control: giRat1a: Unassigned; E. coli biotin synthetase (bioB), complete cds. |
| 174910 | >control: gikat1a: Unassigned; E. coli biotin synthetase (bioB), complete cds. |
| 174911 | >control: giRat1a: Unassigned; E. coli biotin synthetase (bioB), complete cds. |
| 174912 | >control: giRat1a: Unassigned; E. coli biotin synthetase (bioB), complete cds. |
| 174913 | >control: giRat1a: Unassigned; E. coli biotin synthetase (bioB), complete cds. |
| 174914 | >control: giRat1a: Unassigned; E. coli biotin synthetase (bioB), complete cds. |
| 174915 | >control: giRat1a: Unassigned; E. coli biotin synthetase (bioB), complete cds. |
| 174916 | >control: giRat1a: Unassigned; E. coli biotin synthetase (bioB), complete cds. |
| 174917 | >control: giRat1a: Unassigned; E. coli biotin synthetase (bioB), complete cds. |
| 174918 | >control: giRat1a: Unassigned; E. coli biotin synthetase (bioB), complete cds. |
| 174919 | >control: giRat1a: Unassigned; E. coli biotin synthetase (bioB), complete cds. |
| 174920 | >control: giRat1a: Unassigned; E. coli bioC protein, complete cds. |
| 174921 | >control: giRat1a: Unassigned; E. coli bioC protein, complete cds. |
| 174922 | >control: giRat1a: Unassigned; E. coli bioC protein, complete cds. |
| 174923 | >control: giRat1a: Unassigned; E. coli bioC protein, complete cds. |
| 174924 | >control: giRat1a: Unassigned; E. coli bioC protein, complete cds. |
| 174925 | >control: giRat1a: Unassigned; E. coli bioC protein, complete cds. |
| 174926 | >control: giRat1a: Unassigned; E. coli bioC protein, complete cds. |
| 174927 | >control: giRat1a: Unassigned; E. coli bioC protein, complete cds. |
| 174928 | >control: giRat1a: Unassigned; E. coli bioC protein, complete cds. |
| 174929 | >control: giRat1a: Unassigned; E. coli bioC protein, complete cds. |
| 174930 | >control: giRat1a: Unassigned; E. coli dethiobiotin synthetase (bioD), complete |
| | cds. |
| 174931 | >control: giRat1a: Unassigned; E. coli dethiobiotin synthetase (bioD), complete |
| | cds. |
| 174932 | >control: giRat1a: Unassigned; E. coli dethiobiotin synthetase (bioD), complete |
| | cds. |
| 174933 | >control: giRat1a: Unassigned; E. coli dethiobiotin synthetase (bioD), complete |
| | cds. |
| 174934 | >control: giRat1a: Unassigned; E. coli dethiobiotin synthetase (bioD), complete |
| | cds. |
| 174935 | >control: giRat1a: Unassigned; E. coli dethiobiotin synthetase (bioD), complete |
| | cds. |
| 174936 | >control: giRat1a: Unassigned; Bacteriophage P1 cre gene for recombinase |
| | protein. |
| 174937 | >control: giRat1a: Unassigned; Bacteriophage P1 cre gene for recombinase |
| | protein. |
| 174938 | >control: giRat1a: Unassigned; Bacteriophage P1 cre gene for recombinase |
| | protein. |
| 174939 | >control: giRat1a: Unassigned; Bacteriophage P1 cre gene for recombinase |
| | protein. |
| 174940 | >control: giRat1a: Unassigned; Bacteriophage P1 cre gene for recombinase |
| | protein. |
| 174941 | >control: giRat1a: Unassigned; Bacteriophage P1 cre gene for recombinase |
| | protein. |
| 174942 | >control: giRat1a: Unassigned; Bacteriophage P1 cre gene for recombinase |
| | protein. |
| 174943 | >control: giRat1a: Unassigned; Bacteriophage P1 cre gene for recombinase |
| | protein. |
| 174944 | >control: giRat1a: Unassigned; Bacteriophage P1 cre gene for recombinase |
| | protein. |
| 174945 | >control: giRat1a: Unassigned; Bacteriophage P1 cre gene for recombinase |
| | protein. |
| 174946 | >control: giRat1a: Unassigned; Bacillus subtilis dihydropicolinate reductase |
| | (dapB), jojF, jojG, complete cds's. |
| 174947 | >control: giRat1a: Unassigned; Bacillus subtilis dihydropicolinate reductase |
| | (dapB), jojF, jojG, complete cds's. |
| 174948 | >control: giRat1a: Unassigned; Bacillus subtilis dihydropicolinate reductase |
| | (dapB), jojF, jojG, complete cds's. |
| 174949 | >control: giRat1a: Unassigned; Bacillus subtilis dihydropicolinate reductase |
| | (dapB), jojF, jojG, complete cds's. |
| 174950 | >control: giRat1a: Unassigned; Bacillus subtilis dihydropicolinate reductase |
| | (dapB), jojF, jojG, complete cds's. |
| 174951 | >control: giRat1a: Unassigned; Bacillus subtilis dihydropicolinate reductase |
| | (dapB), jojF, jojG, complete cds's. |
| 174952 | >control: giRat1a: Unassigned; Bacillus subtilis dihydropicolinate reductase |
| | (dapB), jojF, jojG, complete cds's. |
| 174953 | >control: giRat1a: Unassigned; Bacillus subtilis dihydropicolinate reductase |
| | (dapB), jojF, jojG, complete cds's. |
| 174954 | >control: giRat1a: Unassigned; Bacillus subtilis dihydropicolinate reductase |
| | (dapB), jojF, jojG, complete cds's. |
| 174955 | >control: giRat1a: Unassigned; Bacillus subtilis dihydropicolinate reductase |
| | (dapB), jojF, jojG, complete cds's. |
| 174956 | >control: giRat1a: Unassigned; Bacillus subtilis dihydropicolinate reductase |
| | (dapB), jojF, jojG, complete cds's. |
| 174957 | >control: giRat1a: Unassigned; Bacillus subtilis dihydropicolinate reductase |
| | (dapB), jojF, jojG, complete cds's. |
| 174958 | >control: giRat1a: Unassigned; Bacillus subtilis dihydropicolinate reductase |
| | (dapB), jojF, jojG, complete cds's. |
| 174959 | >control: giRat1a: Unassigned; Bacillus subtilis dihydropicolinate reductase |
| | (dapB), jojF, jojG, complete cds's. |
| 174960 | >control: giRat1a: Unassigned; Bacillus subtilis dihydropicolinate reductase |
| | (dapB), jojF, jojG, complete cds's. |
| 174961 | >control: giRat1a: Unassigned; Rat glyceraldehyde-3-phosphate-dehydrogenase |
| | (GAPDH) mRNA, complete cds. |
| 174962 | >control: giRat1a: Unassigned; Rat glyceraldehyde-3-phosphate-dehydrogenase |
| | (GAPDH) mRNA, complete cds. |
| 174963 | >control: giRat1a: Unassigned; Rat glyceraldehyde-3-phosphate-dehydrogenase |
| | (GAPDH) mRNA, complete cds. |
| 174964 | >control: giRat1a: Unassigned; Bacillus subtilis lys gene for diaminopimelate |
| | decarboxylase (EC 4.1.1.20). |
| 174965 | >control: giRat1a: Unassigned; Bacillus subtilis lys gene for diaminopimelate |
| | decarboxylase (EC 4.1.1.20). |
| 174966 | >control: giRat1a: Unassigned; Bacillus subtilis lys gene for diaminopimelate |
| | decarboxylase (EC 4.1.1.20). |
| 174967 | >control: giRat1a: Unassigned; Bacillus subtillis phenylalanine biosynthesis |
| | associated protein (pheB), and monofunctional prephenate dehydratase (pheA) |
| | genes, complete cds. |
| 174968 | >control: giRat1a: Unassigned; Bacillus subtillis phenylalanine biosynthesis |
| | associated protein (pheB), and monofunctional prephenate dehydratase (pheA) |
| | genes, complete cds. |
| 174969 | >control: giRat1a: Unassigned; Bacillus subtillis phenylalanine biosynthesis |
| | associated protein (pheB), and monofunctional prephenate dehydratase (pheA) |
| | genes, complete cds. |
| 174970 | >control: giRat1a: Unassigned; Rattus norvegicus pyruvate carboxylase mRNA, |
| | complete cds. |
| 174971 | >control: giRat1a: Unassigned; Rattus norvegicus pyruvate carboxylase mRNA, |
| | complete cds. |
| 174972 | >control: giRat1a: Unassigned; Rattus norvegicus pyruvate carboxylase mRNA, |
| | complete cds. |
| 174973 | >control: giRat1a: Unassigned; Rattus norvegicus pyruvate carboxylase mRNA, |
| | complete cds. |
| 174974 | >control: giRat1a: Unassigned; B. subtilis thrB and thrC genes for homoserine |
| | kinase and threonine synthase (EC 2.7.1.39 and EC 4.2.99.2, respectively). |
| 174975 | >control: giRat1a: Unassigned; B. subtilis thrB and thrC genes for homoserine |
| | kinase and threonine synthase (EC 2.7.1.39 and EC 4.2.99.2, respectively). |
| 174976 | >control: giRat1a: Unassigned; B. subtilis thrB and thrC genes for homoserine |
| | kinase and threonine synthase (EC 2.7.1.39 and EC 4.2.99.2, respectively). |
| 174977 | >control: giRat1a: Unassigned; Rat transferrin receptor mRNA, 3′ end. |
| 174978 | >control: giRat1a: Unassigned; Rat transferrin receptor mRNA, 3′ end. |
| 174979 | >control: giRat1a: Unassigned; Rat transferrin receptor mRNA, 3′ end. |
| 174980 | >control: giRat1a: Unassigned; B. subtilis tryptophan (trp) operon, complete cds. |
| 174981 | >control: giRat1a: Unassigned; B. subtilis tryptophan (trp) operon, complete cds. |
| 174982 | >control: giRat1a: Unassigned; B. subtilis tryptophan (trp) operon, complete cds. |

[0101] In many embodiments, a nucleic acid array of the present invention also includes mismatch probes for each perfect match probe. Suitable mismatch probes include, without limitation, perfect mismatch probes. A perfect mismatch probe has the same sequence as the corresponding perfect match probe except for a homomeric substitution (A to T, T to A, G to C, and C to G) at or near the center of the mismatch probe. For instance, if a perfect match probe has 2n nucleotides, the homomeric substitution in the corresponding perfect mismatch probe is either at the n or n+1 position, but not at both positions. If a perfect match probe has 2n+1 nucleotides, the homomeric substitution in the corresponding perfect mismatch probe is at the n+1 position. The center location of the mismatched residue is more likely to destabilize the duplex formed with the target sequence under the hybridization conditions. Each perfect match probe and the corresponding perfect mistmatch are typically attached to different regions on a nucleic acid array.

[0102] In one example, a nucleic acid array of the present invention includes each and every polynucleotide probe selected from SEQ ID NOs: 8,193-174,863 (or the complement thereof). In another example, a nucleic acid array of the present invention includes each and every polynucleotide probe selected from SEQ ID NOs: 8,193-174,863 (or the complement thereof), and its perfect mismatch probe.

D. Protein Arrays for Expression Profiling of Rat Genes

[0103] The present invention also features protein arrays for the detection, quantitation, and differential expression analysis of rat genes. Each protein array of the present invention includes probes that can specifically bind to the protein products of corresponding rat genes. In one embodiment, the probes on a protein array of the present invention are antibodies, and each antibody can bind to the corresponding rat protein with an affinity constant of at least 10⁴ M⁻¹, 10⁵ M⁻¹, 10⁶ M⁻¹, 10⁷ M⁻¹, 10⁸ M⁻¹, 10⁹ M⁻¹, or more. In many instances, the antibody does not bind to other rat proteins. Antibodies suitable for this purpose include, but are not limited to, polyclonal antibodies, monoclonal antibodies, chimeric antibodies, single chain antibodies, Fab fragments, or fragments produced by Fab expression libraries. Other peptides, scaffolds, or protein-binding molecules can also be used to construct the protein arrays of the present invention.

[0104] Antibodies or other protein-binding molecules can be immobilized to a protein array using a variety of methods. Examples of these methods include, but are not limited to, diffusion (e.g., agarose or polyacrylamide gel), surface absorption (e.g., nitrocellulose or PVDF), covalent binding (e.g., silanes or aldehyde), or non-covalent affinity binding (e.g., biotin-streptavidin). Examples of protein array fabrication methods include, but are not limited to, ink-jetting, robotic contact printing, photolithography, or piezoelectric spotting. The method described in MacBeath and Schreiber, SCIENCE, 289: 1760-1763 (2000) can also be used. Suitable substrate supports for a protein array of the present invention include, but are not limited to, glass, membranes, mass spectrometer plates, microtiter wells, silica, or beads.

[0105] In one embodiment, a protein array of the present invention includes at least 2, 5, 10, 20, 30, 40, 50, 100, 200, 300, 400, 500, 1,000, 2,000, 3,000, 4,000, or more probes, and each of these probes can specifically bind to a different respective rat protein. In another embodiment, a protein array of the present invention includes at least 2, 5, 10, 20, 30, 40, 50, 100, 200, 300, 400, 500, 1,000, 2,000, 3,000, 4,000, or more probes, and each of these probes can bind to a protein product of a different respective rat gene that encodes a sequence selected from SEQ ID NOs: 4,097-8,192.

[0106] In yet another embodiment, a protein array of the present invention includes at least 1, 2, 3, 4, 5, 6, 7, 8, 9, 10, 20, 30, 40, or 42 probes, and each of these probes can specifically bind to a protein product of a different respective rat gene that encodes a sequence selected from the group consisting of WAN00OGR4 (SEQ ID NO: 8084), WAN00OGRF (SEQ ID NO: 8085), WAN00OGS3 (SEQ ID NO: 8086), WAN00OGS4 (SEQ ID NO: 8087), WAN00OGS5 (SEQ ID NO: 8088), WAN00OGS6 (SEQ ID NO: 8089), WAN00OGS7 (SEQ ID NO: 8090), WAN00OGS8 (SEQ ID NO: 8091), WAN00OGS9 (SEQ ID NO: 8092), WAN00OGSA (SEQ ID NO: 8093), WAN00OGSB (SEQ ID NO: 8094), WAN00OGSC (SEQ ID NO: 7622), WAN00OGSD (SEQ ID NO: 8095), WAN00OGSE (SEQ ID NO: 8096), WAN00OGSF (SEQ ID NO: 8097), WAN00OGSG (SEQ ID NO: 8098), WAN00OGSH (SEQ ID NO: 8099), WAN00OGSI (SEQ ID NO: 8100), WAN00OGSJ (SEQ ID NO: 8101), WAN00OGSK (SEQ ID NO: 8102), WAN00OGSL (SEQ ID NO: 8103), WAN00OGSM (SEQ ID NO: 8104), WAN00OGSN (SEQ ID NO: 8105), WAN00OGSO (SEQ ID NO: 8106), WAN00OGSP (SEQ ID NO: 8107), WAN00OGSQ (SEQ ID NO: 8108), WAN00OGSR (SEQ ID NO: 8109), WAN00OGSS (SEQ ID NO: 8110), WAN00OGST (SEQ ID NO: 8111), WAN00OGSU (SEQ ID NO: 8112), WAN00OGSV (SEQ ID NO: 8113), WAN00OGSW (SEQ ID NO: 8114), WAN00OGSX (SEQ ID NO: 8115), WAN00OGSY (SEQ ID NO: 8116), WAN00OGSZ (SEQ ID NO: 8117), WAN00OGT0 (SEQ ID NO: 8118), WAN00OGT1 (SEQ ID NO: 8119), WAN00OGT2 (SEQ ID NO: 8120), WAN00OGT3 (SEQ ID NO: 8121), WAN00OGT4 (SEQ ID NO: 8122), WAN00OGT5 (SEQ ID NO: 8123), and WAN00OGT6 (SEQ ID NO: 8124).

[0107] In still another embodiment, a protein array of the present invention includes at least 1, 2, 3, 4, 5, 6, 7, 8, 9, or 10 probes, each of which can specifically bind to a protein product of a different respective rat gene that encodes a sequence selected from the group consisting of WAN00OGR4 (SEQ ID NO: 8084), WAN00OGSD (SEQ ID NO: 8095), WAN00OGSE (SEQ ID NO: 8096), WAN00OGSH (SEQ ID NO: 8099), WAN00OGSK (SEQ ID NO: 8102), WAN00OGSN (SEQ ID NO: 8105), WAN00OGSP (SEQ ID NO: 8107), WAN00OGSQ (SEQ ID NO: 8108), WAN00OGS4 (SEQ ID NO: 8087), and WAN00OGT4 (SEQ ID NO: 8122).

[0108] In yet another embodiment, a protein array of the present invention includes at least one probe which can specifically bind to a protein product of a rat gene that encodes WAN00OGS4 (SEQ ID NO: 8087), and/or at least one probe which can specifically bind to a protein product of a rat gene that encodes WAN00OGT4 (SEQ ID NO: 8122).

[0109] The protein-coding sequences of rat genes can be determined using a variety of methods. Many rat protein sequences are obtainable from NCBI or other public or commercial sequence databases. The protein-coding sequences of rat genes can also be extracted from the corresponding tiling or parent sequences using an open reading frame (ORF) prediction program. Examples of ORF prediction programs include, but are not limited to, GeneMark (provided by the European Bioinformatics Institute), Glimmer (provided by The Institute for Genomic Research), and ORF Finder (provided by NCBI). Where a parent or tiling sequence represents the 5′ or 3′ untranslated region of a rat gene, a BLAST search of the sequence against a rat genome database can be conducted to determine the protein-coding region of the gene.

E. Applications

[0110] The probe arrays of the present invention can be used to detect or monitor the expression profile of rat genes. The probe arrays of the present invention can also be used to detect or evaluate agents that can modulate the expression profile of rat genes. In addition, the probe arrays of the present invention can be used to identity or validate drug targets, or to select or assess the toxicity or efficacy of drug candidates. Other applications of probe array technology, such as genotyping, protein functional analysis, or diagnosis, are also contemplated by the present invention.

[0111] Numerous protocols are available for nucleic acid array hybridization. Exemplary protocols include, but are not limited to, those provided by Affymetrix for its GeneChip® arrays. Samples amenable to nucleic acid array analysis can be prepared from any rat cell or tissue. Suitable samples include, but are not limited to, RNA samples (e.g., mRNA or cRNA) or DNA samples (e.g., cDNA).

[0112] A variety of methods can be used to isolate RNA from cells or tissues. Examples of these methods include RNeasy kits (QIAGEN Inc.), MasterPure kits (Epicentre Technologies), and TRIZOL (Gibco BRL). The RNA isolation methods provided by Affymetrix can also be used.

[0113] In many embodiments, the isolated RNA is amplified and/or labeled before being hybridized to a nucleic acid array of the present invention. Examples of RNA amplification methods include, but are not limited to, reverse transcriptase PCR, isothermal amplification, ligase chain reaction, and Qbeta replicase method. The final amplification products can be either cDNA or cRNA.

[0114] cDNA, cRNA, or other nucleic acid molecules can be labeled with one or more labeling moieties to allow for detection of hybridized polynucleotide complexes. The labeling moieties can include compositions that are detectable by spectroscopic, photochemical, biochemical, bioelectronic, immunochemical, electrical, optical, or chemical means. Suitable labeling moieties include, but are not limited to, radioisotopes, chemiluminescent compounds, labeled binding proteins, heavy metal atoms, spectroscopic markers (such as fluorescent markers or dyes), magnetic labels, linked enzymes, mass spectrometry tags, spin labels, or electron transfer donors or acceptors.

[0115] In many cases, nucleic acid molecules are fragmented before being labeled with detectable moieties. Examples of fragmentation methods include, but are not limited to, heat or ion-mediated hydrolysis.

[0116] Hybridization reactions can be performed in absolute or differential hybridization formats. In the absolute hybridization format, polynucleotides derived from one sample are hybridized to the probes in a nucleic acid array of the present invention. Signals detected after the formation of hybridization complexes correlate to the polynucleotide levels in the sample. In the differential hybridization format, polynucleotides derived from two samples are labeled with different labeling moieties. A mixture of these differently labeled polynucleotides is added to a nucleic acid array of the present invention. The nucleic acid array is then examined under conditions in which the emissions from the two different labels are individually detectable. In one embodiment, the fluorophores Cy3 and Cy5 (Amersham Pharmacia Biotech, Piscataway, N.J.) are used as the labeling moieties for the differential hybridization format.

[0117] Signals gathered from a nucleic acid array can be analyzed using commercially available software, such as those provided by Affymetrix or Agilent Technologies. Controls, such as those for scan sensitivity, probe labeling, or cDNA or cRNA quantitation, can be included in the hybridization experiments. Hybridization signals can be scaled or normalized before being further analyzed. For instance, hybridization signals for each individual probe can be normalized to take into account variations in hybridization intensities when more than one array is used under similar test conditions. Hybridization signals can also be normalized using the intensities derived from internal normalization controls contained on each array. In addition, genes with relatively consistent expression levels across the samples can be used to normalize the expression levels of other genes. In one example, probes for certain maintenance genes are included in a nucleic acid array. These genes are chosen because they show stable levels of expression across a diverse set of tissues. Hybridization signals can be normalized or scaled based on the expression levels of these maintenance genes.

[0118] In one embodiment, probes for certain exogenous transcripts are included in the nucleic acid array. These transcripts can be chosen such that they show no similarity to eukaryotic transcripts. In one example, eleven exogenous transcripts at different known concentrations are spiked into each sample. The array is first scaled to a trimmed-mean target value of 100. Based on the scaled hybridization signal of these eleven probe sets, a standard curve can be drawn such that all transcripts present in the sample can be converted from a signal value to a more meaningful concentration value. In another example, a standard curve correlating the signal value read off of the array and known frequency (molarity) can be generated when the array image is read and the probe set expression values are generated. From this standard curve, each signal value can then be converted to a “parts per million” or picomolarity value. The exogenous controls spiked into each sample can include, for instance, E. coli BioB-5, E. coli BioB-M, E. coli BioB-3, E. coli BioC-5, E. coli BioC-3, E. coli BioD-3, E. coli BioD-5, Bacteriophage P1 Cre-5, Bacteriophage P1 Cre-3, E. coli Dap-5, B. subtilis Dap-M, and B. subtilis Dap-3. Probes for these transcripts can be readily designed according to the present invention. Other suitable control sequences are depicted in Table 7.

[0119] In addition to expression profiling, the nucleic acid arrays of the present invention can also be used to detect or evaluate agents that can modulate the expression profile of rat genes. In one exemplary method, an agent of interest is first contacted with rat cells. mRNA is extracted from the cells and amplified and labeled. The amplified mRNA (e.g., cDNA or cRNA) is hybridized to a nucleic acid array of the present invention to determine if the agent can modulate the expression profile of a rat gene of interest. This can be achieved by comparing the transcript profiles before and after the treatment with the agent of interest.

[0120] Any agent of interest can be evaluated using the present invention. In one embodiment, the agent is a small molecule, an antibody, a toxin (including a recombinant immunotoxin), a substrate or pseudosubstrate recognizable by a protein product of a rat gene, or a naturally-occurring factor or an analog thereof. Examples of naturally-occurring factors include, but are not limited to, endocrine factors, paracrine factors, autocrine factors, intracellular factors, and factors interacting with cell receptors. In another embodiment, the agent is an antisense RNA, a double stranded RNA having RNA interference (RNAi) effect, or a vector encoding an antisense or RNAi sequence. Once a lead agent is identified, its derivatives or analogs can be further screened or tested for the optimal modulatory effect.

[0121] Any in vitro or in vivo assay format can be used to detect or evaluate modulators of rat genes. Suitable assay formats include, but are not limited to, in vitro transcription and translation, cultured cell lines, primary cell cultures, or tissue cultures. In one embodiment, high-throughput screen assays or compound libraries are employed for the identification of desired modulators.

[0122] The modulatory effect of an agent can be further detected or evaluated in rat. In an exemplary method, an agent of interest is first administered to a rat. A nucleic acid sample is prepared from the rat and hybridized to a nucleic acid array of the present invention. Hybridization signals are then analyzed to determine if the agent can modulate the expression profile of a rat gene in a desired manner.

[0123] In many embodiments, the rat genes being investigated are rat orthologs or homologs of human drug target or disease genes. Examples of drug target genes include, but are not limited to, kinase genes, phosphatase genes, protease genes, G-protein coupled receptor genes, nuclear hormone receptor genes, or ion channel genes. Examples of disease genes include, but are not limited to, those that are differentially expressed in diseased tissues as compared to the corresponding healthy tissues.

[0124] The nucleic acid arrays of the present invention can also be used to assess the specificity or toxicity of a drug candidate. An ideal drug candidate modulates only the specified rat gene(s) without significantly affecting the expression or function of other rat genes. The nucleic acid arrays of the present invention allow for the identification of compounds that only modulate a particular rat gene or genes.

[0125] Furthermore, the nucleic acid arrays of the present invention can be used to investigate drug-drug interactions. Simultaneous administration of several drugs is often necessary to achieve desired therapeutic objectives. For instance, in cancer chemotherapy, antimicrobial therapy or AIDS treatment, drug combination is usually desirable in order to delay the emergence of drug resistant tumor cells, microbes or viruses. However, drug combination may also cause unexpected adverse effects. These adverse effects can be the result of an unintended activation or suppression of certain signaling pathways. The expression profile of each component in these signaling pathways can be monitored using a nucleic acid array of the present invention to determine if a drug combination can produce any unintended effect on these pathways.

[0126] The hybridization data generated from the nucleic acid arrays of the present invention can be stored in a database for future analysis. This database can be used as an informational translator that takes information on a gene directly to a compound that has been found to affect the expression of that gene. For instance, if the database reveals that compound X alters the expression of gene Y, and a paper is published reporting that the expression of gene Y is sensitive to a particular signal transduction pathway, then compound X becomes a candidate for modulating that signal transduction pathway. This effectively leverages the value of the publicly available data on the identification of potential drug candidates.

[0127] The same instrumentation as used for nucleic acid array analysis is readily applicable to the protein arrays of the present invention. Many genes have alternatively spliced isoforms, which may have different functions. Post-translational modifications also give protein variations. The protein arrays of the present invention allow the detection or assessment of one specific form of a protein and therefore enable drug target validation at the proteomics level.

[0128] The agents identified in the present invention can be used to treat patients who have a disease caused by abnormal expression of one or more disease genes. An agent that modulates the expression of these disease genes can be administered to a patient in need thereof. Any method known in the art may be used to administer a desired agent to a patient of interest.

[0129] The present invention further contemplates polynucleotide or polypeptide collections. In one embodiment, a polynucleotide collection of the present invention comprises at least 1, 2, 5, 10, 50, 100, 500, 1,000, 2,000, 3,000, 4,000, or more probes, and each of these probes is capable of hybridizing under stringent or nucleic acid array hybridization conditions to a respective tiling sequence selected from SEQ ID NOs: 4,097-8,192, or the complement thereof. In another embodiment, a polynucleotide collection of the present invention comprises at least one sequence selected from SEQ ID NOs: 1-8,192, or the complement thereof. In still another embodiment, a polypeptide collection of the present invention includes at least 1, 2, 5, 10, 50, 100, 500, 1,000, or more polypeptides, each of which is a protein product of a respective rat gene that encodes a sequence selected from SEQ ID NOs: 1-8,192.

[0130] It should be understood that the above-described embodiments and the following examples are given by way of illustration, not limitation. Various changes and modifications within the scope of the present invention will become apparent to those skilled in the art from the present description.

### F. EXAMPLES

### Example 1

### Nucleic Acid Array

[0131] The tiling sequences depicted in SEQ ID NOs: 4,097-8,192 were submitted to Affymetrix for custom array design. Affymetrix selected probes for each tiling sequence using its probe-picking algorithm. Non-ambiguous probes with 25 bases in length were selected. Forty-six probe-pairs were requested for each tiling sequence with a minimum number of acceptable probe-pairs set to twenty-five. The final array was directed to 3,964 rat transcripts and 120 endogenous and exogenous control probes sets. The perfect match probes on the final array are depicted in SEQ ID NOs: 174,983-362,830. The qualifiers of these probes are illustrated in Table 8.

### Example 2

### Nucleic Acid Array Hybridization

[0132] 10 μg of biotin-labeled sample DNA/RNA is diluted in 1×MES buffer with 100 μg/ml herring sperm DNA and 50 μg/ml acetylated BSA. To normalize arrays to each other and to estimate the sensitivity of the nucleic acid arrays, in vitro synthesized transcripts of control genes are included in each hybridization reaction. The abundance of these transcripts can range from 1:300,000 (3 ppm) to 1:1000 (1000 ppm) stated in terms of the number of control transcripts per total transcripts. As determined by the signal response from these control transcripts, the sensitivity of detection of the arrays can range, for example, between about 1:300,000 and 1:100,000 copies/million. Labeled DNA/RNA are denatured at 99° C. for 5 minutes and then 45° C. for 5 minutes and hybridized to the nucleic array of Example 1. The array is hybridized for 16 hours at 45° C. The hybridization buffer includes 100 mM MES, 1 M [Na⁺], 20 mM EDTA, and 0.01% Tween 20. After hybridization, the cartridge(s) is washed extensively with wash buffer (6×SSPET), for instance, three 10-minute washes at room temperature. The washed cartridge(s) is then stained with phycoerythrin coupled to streptavidin.

[0133] 12×MES stock contains 1.22 M MES and 0.89 M [Na⁺]. For 1000 ml, the stock can be prepared by mixing 70.4 g MES free acid monohydrate, 193.3 g MES sodium salt and 800 ml of molecular biology grade water, and adjusting volume to 1000 ml. The pH should be between 6.5 and 6.7. 2×hybridization buffer can be prepared by mixing 8.3 ml of 12×MES stock, 17.7 ml of 5 M NaCl, 4.0 ml of 0.5 M EDTA, 0.1 ml of 10% Tween 20 and 19.9 ml of water. 6×SSPET contains 0.9 M NaCl, 60 mM NaH₂PO₄, 6 mM EDTA, pH 7.4, and 0.005% Triton X-100. In some cases, the wash buffer can be replaced with a more stringent wash buffer. 1000 ml stringent wash buffer can be prepared by mixing 83.3 ml of 12×MES stock, 5.2 ml of 5 M NaCl, 1.0 ml of 10% Tween 20 and 910.5 ml of water.

[0134] The foregoing description of the present invention provides illustration and description, but is not intended to be exhaustive or to limit the invention to the precise one disclosed. Modifications and variations are possible consistent with the above teachings or may be acquired from practice of the invention. Thus, it is noted that the scope of the invention is defined by the claims and their equivalents.

1. A nucleic acid array comprising at least one polynucleotide which is capable of hybridizing under stringent or nucleic acid array hybridization conditions to a rat gene that encodes a sequence selected from the group consisting of SEQ ID NOs: 7622 and 8084-8124.

2. The nucleic acid array of claim 1, comprising at least five polynucleotides, each of which is capable of hybridizing under stringent or nucleic acid array hybridization conditions to a different respective rat gene that encodes a sequence selected from the group consisting of SEQ ID NOs: 7622 and 8084-8124.

3. The nucleic acid array of claim 1, comprising at least ten polynucleotides, each of which is capable of hybridizing under stringent or nucleic acid array hybridization conditions to a different respective rat gene that encodes a sequence selected from the group consisting of SEQ ID NOs: 7622 and 8084-8124.

4. The nucleic acid array of claim 1, wherein said polynucleotide is capable of hybridizing under stringent or nucleic acid array hybridization conditions to a sequence selected from the group consisting of SEQ ID NOs: 7622 and 8084-8124, or the complement thereof.

5. The nucleic acid array of claim 1, comprising at least five polynucleotides, each of which is capable of hybridizing under stringent or nucleic acid array hybridization conditions to a different respective sequence selected from the group consisting of SEQ ID NOs: 7622 and 8084-8124, or the complement thereof.

6. The nucleic acid array of claim 1, comprising at least ten polynucleotides, each of which is capable of hybridizing under stringent or nucleic acid array hybridization conditions to a different respective sequence selected from the group consisting of SEQ ID NOs: 7622 and 8084-8124, or the complement thereof.

7. The nucleic acid array of claim 1, comprising at least 42 polynucleotides, each of which is capable of hybridizing under stringent or nucleic acid array hybridization conditions to a different respective sequence selected from the group consisting of SEQ ID NOs: 7622 and 8084-8124.

8. The nucleic acid array of claim 1, comprising at least 42 polynucleotides, each of which is capable of hybridizing under stringent or nucleic acid array hybridization conditions to the complement of a different respective sequence selected from the group consisting of SEQ ID NOs: 7622 and 8084-8124.

9. The nucleic acid array of claim 1, wherein said polynucleotide is capable of hybridizing under stringent or nucleic acid array hybridization conditions to a sequence selected from the group consisting of WAN00OGR4 (SEQ ID NO: 8084), WAN00OGSD (SEQ ID NO: 8095), WAN00OGSE (SEQ ID NO: 8096), WAN00OGSH (SEQ ID NO: 8099), WAN00OGSK (SEQ ID NO: 8102), WAN00OGSN (SEQ ID NO: 8105), WAN00OGSP (SEQ ID NO: 8107), WAN00OGSQ (SEQ ID NO: 8108), WAN00OGS4 (SEQ ID NO: 8087) and WAN00OGT4 (SEQ ID NO: 8122), or the complement of said sequence.

10. The nucleic acid array of claim 1, wherein said polynucleotide is capable of hybridizing under stringent or nucleic acid array hybridization conditions to a sequence selected from the group consisting of WAN00OGS4 (SEQ ID NO: 8087) and WAN00OGT4 (SEQ ID NO: 8122), or the complement of said sequence.

11. The nucleic acid array of claim 1, comprising at least 100 polynucleotides, each of which is capable of hybridizing under stringent or nucleic acid array hybridization conditions to a different respective tiling sequence selected from SEQ ID NOs: 4,097-8,192, or the complement thereof.

12. The nucleic acid array of claim 1, comprising at least 1,000 polynucleotides, each of which is capable of hybridizing under stringent or nucleic acid array hybridization conditions to a different respective tiling sequence selected from SEQ ID NOs: 4,097-8,192, or the complement thereof.

13. The nucleic acid array of claim 1, wherein a substantial portion of all polynucleotides that are stably attached to the nucleic acid array is probes for rat genes.

14. A method for expression profiling of rat genes, comprising:
preparing a nucleic acid sample from rat cells; and
hybridizing said nucleic acid sample to the nucleic acid array of claim 13.

15. A method for identifying or evaluating an agent capable of modulating gene expression in rat cells, comprising:
contacting said agent with said rat cells;
preparing a nucleic acid sample from said rat cells; and
hybridizing the nucleic acid sample to the nucleic acid array of claim 13,
wherein a change in gene expression profile in said rat cells after said contacting, as compared to before said contacting, is indicative that said agent is capable of modulating gene expression in said rat cells.

16. The method of claim 15, wherein said agent modulates the expression of a rat gene in said rat cells, and said rat gene is an ortholog of a human drug target gene or a human disease gene.

17. A probe array comprising probes for rat genes, wherein said rat genes include at least one gene which encodes a sequence selected from the group consisting of SEQ ID NOs: 7622 and 8084-8124.

18. The probe array of claim 17, wherein a substantial portion of all probes that are stably attached to the probe array is antibodies that are specific for the protein products of said rat genes.

19. The probe array of claim 17, wherein said probes include an antibody which is specific for a protein product of a rat gene that encodes a sequence selected from the group consisting of WAN00OGR4 (SEQ ID NO: 8084), WAN00OGSD (SEQ ID NO: 8095), WAN00OGSE (SEQ ID NO: 8096), WAN00OGSH (SEQ ID NO: 8099), WAN00OGSK (SEQ ID NO: 8102), WAN00OGSN (SEQ ID NO: 8105), WAN00OGSP (SEQ ID NO: 8107), WAN00OGSQ (SEQ ID NO: 8108), WAN00OGS4 (SEQ ID NO: 8087), and WAN00OGT4 (SEQ ID NO: 8122).

20. A biomolecule collection comprising:
(1) at least one isolated polynucleotide comprising a sequence selected from SEQ ID NOs: 1-8,192, or the complement thereof;
(2) at least one isolated polypeptide product of a rat gene which encodes a sequence selected from SEQ ID NOs: 1-8,192; or
(3) at least one antibody specifically recognizing said polypeptide product.

The application's sequence listing, which the Patent Office published only in electronic form, follows.

SEQUENCE LISTING (362830 sequences)

SEQ ID NO: 1 - DNA, 961 bp, Rattus norvegicus
agaatccaacatacaagttctttgagcagatgcagaactaaaccccgccccccgccacagcagcggcctctgaacttggacagcaaaaccattgcttcactacccatcggtgttcatttataaaatmacgwggaaagaaacaaacccgtctgtttatttactcacccysggcttttgacagctgtgctgtaacacaagtagatgcytgaactcgaattwwtatmcaaatcmawwatgkatbctctctttctctcttwacattstggtctctacackrcmkyawkrwtkkkttykgwsdaskgtaaaaaaaaaatttagctgtatcaaactagtgcatgaatagattctctcytgagtatytgtcacatacatagcccmttagcccgttgwawattattcwtgtggtdtgkggcccraaaaaytcvwacttgaaawacgcttwaaaaaaatcgatggggratgcttcgtgtgaacgtgggcgttwagstgcttctcctctcttaagtattctyttcstgatcactakgcaybhtggacatttktgagtattccaaatgatttagaaaarktcgttwtycatgaytscwtcttactgwmcagattgsyrckwbkgctctctttgsgatataggamtacgaggatacmcattgattyctttgtgccyghwttatgtgcacacattaggcattgaggatttgaayttttttttgyccatgwaycttkggatctttgataaaaaaaawwhwaaammwmrwrwmmmwrwwmawmrtawgcacyttkrcggsyggggggagggagtgttytgytggtmtccaattamcaagaattctccaaaaataattttytgcaggatgattgtacagaatcattgcttatgccatgatagctttytacmctgtwttacataaataaattaaattawwtwmmwmmarrmmaaaaaamaraaaagaaaaaaaaaaaa

SEQ ID NO: 2 - DNA, 349 bp, Rattus norvegicus
cttcggactccccagatgaagtctatgcacagaagatgaagtacaaggccatcagcgaggagytsgrcaacgsgctcawdsahvwswybychctctgagttcccactgtggccatcgcaggcccctttcttctttttccattctctctgaggggagggggcagccakgaggagcacaaactggccatgttgcacagccagtytgagggcagcytgaggaacacgcytgccacccytgccacccactttggcactggctttctcctgtcatctatccaccgtccactgacttccacccctcctytacttaatawactctgaacttggtctccaaaaaaaaaaaaaaaaaa

SEQ ID NO: 3 - DNA, 1704 bp, Rattus norvegicus
  misc_feature (691)..(701): n is a, c, g, or t
cacgagggtyrckrssgccatacacgctcgcagykcktrsckcttctgtcggaaactggtgtctkttcccttgctgttctccaacccctctctttccccttgcttcctctcacctgctctgggacwcctaactcagagacctcccttctcccccygccggcyggattatggcagagaacgatgtggacaatgagctcttggactatgaagacgatgaggtggagacggccgmtggggcagatgggaccgaagctcccgccaagaaagacgtcaagggctcctatgtctccatccacagctccggctttcgagatttcctacttaagccagasytgctccgggccattgytgactgtggctytgagcatccatcaraggtccagcatgaatgcatcccccaggccattctgkggatggatgtcctgtgccasgccaagtcaggcatgggaaaaacagcagtgtttgtcctggccacactgcagcagctggasccagttactgggcargtgtcagtgctggtgatgtktcacaccagggagctggctttccagatcagcaaggaatatgagcgcttctcaaagtacatgccgaatgtcaaggtggcagtgttttttggcggactgtctatcaagaaggatgaagaggtgctgaagaagaactgcccacacattgttgtggggactcctggccnnnnnnnnnnnctggcccgaaataagagcctgaacctcaaacacattaaacactttatcttggacgaatgtgacaagatgcttgaacagctcgacatgcgtcgggatgtccaggaaatttttcgcatgaccccccatgagaagcaggtcatgatgttcagtgctaccttgagcaaagagatccgcccagtgtgccgcaagttcatgcaagatcctatggagatcttcgtggatgacgagaccaagttgacactgcacgggttgcagcaatactacktraaamtgaaggacaacgagaagaaccggaagctctttrwycttctcgatgtcctcgagttcamccaggtkgtgatctttgtgaagtccgtgcagcgctgcatcgccytggcccagcttctagtgrascrgrrcwtsccagccrtkgmtmksmaysrbggratgccccaggaggagaggctctctcggtatcagcagttcaaggattttcrscsgasrabdmkkgtggctaccaacctsktygsccgwggcatggayattgwgcgygtgaacatygctttyaactwtgacatgccagaggactcsgacacbtacctgmacagggtggccagagcggsccgrwwtgscaccaagggmttgrccatcacatttgtgkcagabgagaaygwykccaagatcctgaatgacgtkcaggaccgtwtsgaggtcaacatcagygagckgcmygakgagatbgacatttcctcstacattgarcagacacggtagaggaatcaccyattytggacygtggcagtctkytgtakmmsmgkmcgmmkgsdtyrkrgakswraywhwrhhgmyccacyycyrwcdcbtcwgcccacccthtcyatgcytbthtbtgcgtcaccwycamtyytaaacytagtcytgatttatcasmkytgtttgtktgyttgtktgkttktktttwytaacaaamctwagwwtkrammmmmhrwvaaaaaaaaaaarwwawmwtatgcggcctcttgcc

SEQ ID NO: 4 - DNA, 1066 bp, Rattus norvegicus
ctggrakscwarcwgsaymtacwmaragytattyatratgycagactatacttggtttgaaggaataccttttcmtgcctttkggwttycmaaagaaaytytgsaaaatrkttgtaakaagtttgtggtraaagamgamgayttgatywtattgrcttaycccaagtcaggaacraactggctgatygarattgtctgcttgattcagaccaagggagatcccaagtggatccaatctrtgmcyatctgggatcgctcaccctggatagagactgrtkyaggatatgatawrttaaycaaaawgraaggmccacgaytcatracctcccatcttcccatgcatcttttctcmaagtctctcttcagtyccaagkccaaggtgatmtatctcrtcmgaaatcccagagatgttcttgtwyctgsttattwtttctggrgtaagaymrcyctkgmgaagaarccagactcrytgggaacktaygytgaatgktycctcaaaggawawgttsyrtatggatcatggtttgagcacatccgtgsctggctgtmymtgmrasamtkrgacaasttsktkktactgbacwakkmmgacwtgaaraaggvtmcadtgggahccmtaaagargatatgtgacttcctrgggaaaaaaythgagccmgatgagctgratktggtccycaagtayagtkcctdccaagtcrtgaaagaaamyracatgyccarttatarycycmtgrwgaarraayyrattyttmctggwwytrsyytcatgmgraamggcacwryyrrkgactggaagaatcasttcamwgtakcccmagctgaagcctttgmtaaagtgtyycaggagaaawtgkccgktytccctscagggatgttcccatgggawtaaawtttcaaaagtkwtaaatatyttatgaacaytgatdtwtatgwwymtgttgttctatgtctgaataastgaatgtkrycatygaataamtyctrwwstgghwwwrwraaarwraaaaaaaaaaaaaaaaaaaaaaaaaaaaaaaaaaaaaaaaaaaaaaaaaaaaaaaaaaaa

SEQ ID NO: 5 - DNA, 927 bp, Rattus norvegicus
  misc_feature (521)..(521): n is a, c, g, or t
agcggccgctccrmsatctagawtsskmacrmrsswsstakgcggtcggctgwgtcaagatgaagctgaatatctccttccctgccactggctgtcagaaactcakagaagwggatgacgaacgcaagcttcgtacgtwctatgagaagcgcatggccacagamghrgcygmwgatkckctwsgwgaagagyggaagggktatgtggtccsrwtcagcggtgggaatgacaaacaaggktttcccatgaagcaaggcgttttgacccatggcwgagtgcgcctgcttwtragyaargggcattcttgktakhgrcckmkgagaactggagagaggwwgcgcaagtctktcckaggatgcattgtggatsccaacstgagtrytctcaacttggttattkkaraawwmrrmrmrarrrrtattycaggactgacaratwccastgtscmtygtcgrdtgggacytaaaagagytagkmgaawccsraagcytkttawtytyyycmaasmmswwrawsdmmsnmrskakgktgkyaraaagcccttaawcmwagaagktaarawgcmmakgrccawagcgcccwagattyagmrtcytgttactcmcsgtgycytgcaamacaaacscbgacgtattgctytgaagamgcawcgchbtaagaaaaacaaggasgagssygcagaatwtsctaaacttttgbccaagagawtgawggaascsaaagwgaagcsccaggaacagmttbccaagagacktagsctstyttcgctgagagctthtactthtamatbtgagkccmgtcaaaawtaagtctttaaagrgtaacamataaataatgdgvccytrdamaaaaamaaarmhvwmwmkamwasrwatctctaagtgagtaaagaatcaatattgtccccccaaaaaaaaaaaaaaaaaa

SEQ ID NO: 6 - DNA, 765 bp, Rattus norvegicus
gctctyccggkgygtrgassgckstyscggcrgwsrmcysggsdgyagwggsmsgwcgvggcggtcgcykkgscagcagtggcrgaatgttggctaccagggcacttascctwmttgscwagaswsccatywckayttcggtktkccwtcgkgywcwwgggagtkttgtgaagagtgaagaytatgytctcccatcttatgkyrmkmggmgtgaywacccyttgcvtgatgtggcccasgtcaagytgctgtbtgccagccagaaggcyctgaaggagaaggagaagsccgactksagcavccytkvcasggakkrgaaagkccarktgtacskmabccagtttaacgagagyytsghtgagwtgaacaaggscmccaatgagtkgaagacagtrstggrcstggccatgttcttmatcggstwcrmtgcgcdtgwrmtgathtgskaraagagvtacgtgtatggccccatccctcawacctttgatygtgactrggwgsccatrcagaccaagcggatgytggacatgaaggtcaaccccattcagggvttywccgscaagtgggmmhacaacaagaatgaatggaagaagtgrgagcctgstgstgtgggmtcctccctccctycctccctcagcatghtgsaagctgctgtgtccaatggwccatgktaatamatgaccagttbacgtgrdrmarmawmamwwwmmmwmmacgaccctcacaccttattctcttctccaaccaccctcgggattgtttctc

SEQ ID NO: 7 - DNA, 1186 bp, Rattus norvegicus
cacgagggccgagcggggaagctccgaagaggtgggctaagaagcggaggctgcgctgaacagacttggagccatgaatatatttgatcggaagatcaactttgatgccctcttaaaattttcccacataactccctccacacagcagcacctaaagaaggtctatgccagttttgcactgtgcttttctttgttggttttttaaattgtcaaccgttgttactgattggtctccactgggtggctgtggtgtcttgggaaaggacagggaaggagactggctgagcctcggctaaccgaaccgaggccttcctgccacacacgcttatggaagagccgcagctccgggtgactgggctggctcttcagtgcgtttttgtctgtctgcctggacatgatttgggagtatcaggacaactgtgaggcagcagggaacagtcgctaacagacatagagaacagtcgctaacacgtacttgagttatttgggtttgttcacytgtttccagagatttttggtcttttgggcarawgsccrttgwmcwgaytgkkskccatctkrrtstgcrtgrwrwsktggcgaaaggacagggaaggagactggmtmccaagcccmtgacmgcccgttaccagrrggatggtggwtttgactttcttcactcaaaaccagtgcagytgacacagtggctgctggttmactgtcccatgaaactgcttctggtgtgktgcgscmmgagcgmcatcktgccacscwskwkrcctggwgcctccyytggctcgrgcttacaachtgagggacgscagcagctctccagaaaaatgatbccacgaggcctcaggacccgrbtgagtyccacctcttgaagccagaytccaccktttgygcttyyttgcttgggaaaaaggagtttytctttagrmacaktsccawgawtgmtaaagatdtmaamactacttttaaataaaatgcytgtcaggtttktaacccaggcctccctgsgtctccactytatccccggttcwttgtttccggctcaarstgcattctytaactcaaactgtgaagacaacggggtttttgattamaaaaaatatatctacatagtcttaatttgtaaaaaataaagaaaattccttammmwwwhaaaaaaaaaaaaaaaaaaaaaaaaaaaaaaaaaaaaaaaaaa

SEQ ID NO: 8 - DNA, 1910 bp, Rattus norvegicus
atgaaccactgcccwygcrgggccrgrgccsswwggrgagkywgyycgawtcyckmkaycyrgwyggywmctrbgwccwgyybmcrgacagcgtrgaggatgartttgaaytrtccackgtgtgtcaccgrccygagggyctggaacaactscaggarcaraccaagttcacacgcarrgagytgcaggtcctgtaccgaggcttcaagaacgartgycccagyggratygtcaaygaggagaacttcaagcagatttaytcycagttctttccycaaggagactccagcamctaygctacttttctcttcaatgcctttgacaccaaccacgayggctcygtcagyttygaggactttgtggctggyttgtcggtgattcttcggggracsrtagatgayagactgarytgggcyttcaacttrtatgacctcaacaaggacggctgyatcacwaaggaggaaatgctygacatyatgaagtccatctatgacatgatgggcaagtacacrtaccctgcmctccgsgaggaggccccaagrgaacaygtggagagcttcttccagaagatggacagraacaaggayggmgtggtgaccatygaggaattcatcgagtcttgtcaamaggacgagaacatcatgaggtccatgcagctctttgayaatgtcatctagctccccagggagaggggttagtgtgtcctagggtgaccaggctgtagtcctagtccagacgaacctaaccctctctctccaggcctgtcctcatcttacctgtaccctgggggctgtagggattcaatatcctggggcttcagtagtccagatccctgagctaagtcacaaaagtaggcaagagtaggcaagctaaatctgggggcttcccaacccccgacagctctcaccccttctcaactgatacctagtgctgaggacacccctggtgtagggaccaagtggttctccaccttctagtcccactctagaaaccacattagacagaaggtctcctgctatggtgctttccccatccctaatctcttagattttcctcaagactcccttctcagagaacacgctctgtccatgtccccagctggcttctcagcctagcctttgagggccctgtggggaggcggggacaagaaagcagaaaagtcttggccccgagctagtggttaggtcctaggaattggctggagtggaggccagaaagcctgggcagatgatgagagcccagctgggctgtcactgcaggttccagggcctacagccctgggtcagcagagtatgagttcccagactttccagaaggtccttagcaatgtcccagaaattcaccatacacttctcagtgtcccggatgatgcctgtcaaggtcccacctcccctccggctgttctcatgacagctgtttggttctccatgacccctatctagatgtagaggcatggagtgagtcagggatttcccgaacttgagttttaccactcctcctagtggctgccttaggggaatgggaagaacccagtgtgggggcacccattagaatctttgcccggttcctcacaatgccctagggtcccctagggtacccgctccctctgtttagtctacccagagatgctcctgagctcacctagagggtagggacggtaggctccaggtccaacctctccaggtcagcaccctgccatgctgctgctcctcattaacaaacctgcttgtctcctcctgcgccccttctcagtcagccagggtctgaggggaagggcctcccgtttccccatccgtcagacatggttgactgctttgcattttgggctcttctatctattttgtaaaataagacatcagatccaataaaacacacggctatgcacaaaaaaaaaaaaaaaaaactcgagt

SEQ ID NO: 9 - DNA, 1796 bp, Rattus norvegicus
atggaggaggacattgatacccgcaaaatcaacaacagtttcctgcgcgaccacagctatgcaaccgaagctgacattatctctacggtagaattcaaccacactggagagttactagcgacgggggacaaggggggtagggttgtaatatttcagcgagaacaggagagtaaaaatcaggttcatcgtaggggtgaatacaatgtttacagcacattccagagccatgaacccgagttcgattacctgaaaagtttagaaatagaagaaaaaatcaataaaataagatggctccctcaacaaaatgcagcttactttcttctgtctaccaacgataaaactgtgaagctatggaaagttagtgagcgtgataagaggccagaaggctacaacctgaaagatgaggagggccggctccgggatcctgccaccatcacaaccctgcgggtgcctgtcctgagacccatggacttgatggtggaggccaccccacgaagagtgtttgccaatgcgcacacataccacatcaactccatatctgtcaacagcgactatgagacctacatgtctgctgatgacctgaggattaacctgtggaactttgagataaccaatcagagttttaatatcgtggacatcaagccagccaacatggaggagctcacagaagtgatcacagcagccgagktccacccccaccactgcaacaccttkgtatacagcagcagcaaggggacaatycsgctgtgtgacatgcgggcatctgcgctgtgtgacaggcacaccaagttttttgaagagccasragatccaagcaatagatcgtttttctctgaaattatctcttcaatttcsgatgtgaagttcagccacagtgggaggtatatcatgaccagagactatctgaccgcgaaagtctgggrtctcaacaykgaaaatsgccccgwagagacatacmmggttcatgrctacctycgtagcaagttgtgctccctctacgaaaatgactgcatttttgataaattcgagtgtgtgtggaatgggtcagacagcgtcatcatgacgggctcctacaataacttcttcaggatgttcgaccgaaacaccaagcgwgatgtgacccttgaggcctcaagggaaaacagcaaaccscggkctatsctcaaaccccgaaaagtgtgcgtcggggscaascgaaraaaarakgaraymagkgttgacagtctggacyttakcaaaaagmkmkkgcatacagcttggcatccttcagaaaatattatagcagtggcggctacaaataacttatatatattccaggacaaggktwattakgaggacaagktactacttagtctcacatactgaatactagtcaaacaagtttttaaawgtttctttgggtcttcattttgatgcakkgackytcatwtycctctgcataaaacaattggaatagaacttaaaaggagttcaatgktctcaactccccaawtctwaraaacskctgtywaactcggtaggcttgggacacytytgtttagagktgagagctgbcmacggsagkwactcttycacagkmcmctgaatgtctgatgcgttcgttcattgsccagtwctctctggtgggktctgtgkttwgtktctaggwgwytgctgcgataaaatgagattgtctgtagtatttaasgagraaaagagataaggttkkwkttttaattaagcaattccatttgtttgaaaaaamtcaacaacamaaaaataaacactgtttactcttaaaaaaaaaaaaaaaaaaa

SEQ ID NO: 10 - DNA, 1918 bp, Rattus norvegicus
  misc_feature (1463)..(1463): n is a, c, g, or t
  misc_feature (1535)..(1535): n is a, c, g, or t
  misc_feature (1580)..(1580): n is a, c, g, or t
ggccgctgcttgmamgakskttttmrrgggccagtgtgccgccgccccctcggcycgccatgctcytttcggtgccgctcctgcttggcctcctcggcctggctgccgcagaccctgccatctatttcaaagagcagttcttggacggagatgcctggaccaaccgctgggtcgaatccaaacataagtctgattttggcaaattckkcctsagytstggcaaattctacggggaccaggagaaggataaagggttgcagacaagcmaagatgcccgattttacgcgctgtccgcmagattcgaacccttmagcaacaagggccagacactggtggtacagttcaccgtgaagcatgakcagaatatcgactgtgggggcggctacgtraagctgtttccgggtggcttggaccaraasgmcatgcatggagactcagamtataacrkcaygtwkggyccggacatctgcggtcctggcaccaagaaggttcatgtcatctttaactacaagggcaagaacgtgctgatcaacaaggatatccggtgtaaggatgatgaattyacacatctatacacgctgattgtgcggccrgacaacacctacgaggtgaaaattgacaacagccaggtggagtcgggctccttggaggatgattgggactttctgccgcccaagaagattaaggatcctgacgctgccaagccagaagactgggatgaacgagccaagattgatgaccccacagattccaagcctgaggactgggacaagccagagcacatccctgaccctgatgctaagaagcctgaggactgggacgaagagatggatggagagtgggaaccaccagtgattcaaaatcbtswwkasmaggscgmatggaagccacgtcaaattgacaacccagattacaagggtacctggatacacccagagattgacaatcctgaatactcccccgatgcgaatatctatgcctatgatagttttgctgtactgggcttagacctctggcaggtcaagtctggcacaatttttgacaacttcctcatcaccaatgatgaggcctatgcagaggagtttggcaatgagacctggggtgtcaccaaggctgcagagaagcagatgaaggacaagcaggmtgaggagcagaggcttaaggaagargaagaagacaagaagcgtaaagaggaagaggassccsasgatwamsaggaykasrwtgacagabawkaarrwraarawraararratgagaaggaasamgakgaggaggatgccactggccmarccaaggatkagctgtakaggccacaccacctksctycarggstggactgaggcytgaacaccccgscacagagctggctgstcccaataatgtctctatgagactcaagaacttttywttttttttycaggcaggttcaggbcwgggrwkgwwtstgakwkddgytvhsntgmskymsvrdyytccmmacccmscyttttttttwaswggbrbdwgkmydtaattvktcagccckcachtynkggccththatktttraatcaacrktbttthwttytgtccctwtnwmmwwmwvktggkyactatysdccrasbytaggaacaggkwtkkwsdwwwwkyyctrkgcbtgagatttvatytgckstyctttytkaatctyavargarggtmggavaagggggtgstatyttcchtscccccarmaytgargaaraakggggskyttcccctttytcccttgyccccaggactgggccatttgtggggcasccagttytagcacagctcacaytgrgagtgtaagaastmcaaacamaatttbtattaaattaarktttgtgthddmhmwaraaaaaaaaaaaaaaawraaaaaaaraawaaraawawmaaaaaaaaaaaaaaaaa

SEQ ID NO: 11 - DNA, 782 bp, Rattus norvegicus
  misc_feature (49)..(49): n is a, c, g, or t
  misc_feature (240)..(240): n is a, c, g, or t
  misc_feature (260)..(260): n is a, c, g, or t
  misc_feature (350)..(350): n is a, c, g, or t
  misc_feature (739)..(739): n is a, c, g, or t
  misc_feature (746)..(746): n is a, c, g, or t
  misc_feature (753)..(753): n is a, c, g, or t
  misc_feature (761)..(761): n is a, c, g, or t
ttttttttttttttttgctgggtgcctgctgctcgctgtcggtgagtanaggcctttagagggtcttgcaatccgccgccatcgcggccccggggtcgggttgctgggctcgttcagactctgagcctttggcggcttcacgacragttgcgtccctccagtagaacctccgggcgcgtggcctaaagtgatataaagtcgcgggcctacgaccggggcwsgmrsgtarrrgtyrgcdmnrkggvhtwbsgshhhvbdknyydvdbwvbtykkydmvddghhbbhkgywydmkgymrmawtsggmmmgwbkwkgahacmsggraaagtsktgykkswcswrghtgracgntactmcrrrcgcaaasccktmwtbstaaaraacattgatgatggcacctmcgaccgcchtwacakbcatgcchtggtggctggaattgmcmghwatcccadaaaagtkrcarmtscmawgrrmawdmrkrvgakckccaagcgayccaagatcwagtcctttgtraaagtttmtaastrcaaccmcbtcatgcccacaakgtactytstggawatmcccttgghcawamctgttgtcahcargrwtgtgttcaragacccagcaytgaaacgcaaggccaggcgggagkccaaggtcmakywygmrgagcgmtmcarkacagggragaacaaatggtttykccagaagctyskctyttmgatswayktytvbywwcgycmtkmmvwaanwdhwwrnwdamrvndwrdhdrnmwaraaaamaattgcggccgc

SEQ ID NO: 12 - DNA, 828 bp, Rattus norvegicus
  misc_feature (195)..(209): n is a, c, g, or t
  misc_feature (249)..(249): n is a, c, g, or t
  misc_feature (560)..(560): n is a, c, g, or t
  misc_feature (578)..(578): n is a, c, g, or t
  misc_feature (594)..(594): n is a, c, g, or t
  misc_feature (711)..(711): n is a, c, g, or t
  misc_feature (813)..(816): n is a, c, g, or t
aagagccgagatccaaatacatgaacttaaatgacttgtggactgagagaaaggcaagcttccttcactgagcttcaaagacttggttgcttgcacagaccttttacaaccaaggagtgcttcttagaatcccaagacttgttttgaagggaactacagaaagggctgagggagcaactcagttggtggagtgcnnnnnnnnnnnnnnnaaggccctgtgttcmgttcccytysygshgrakkmkdsdngrsvsgacgwkcagaaatgbmacctyghaagggsaagvrmamsaargawgaacaggtcwycagccttgsacctcasgtgsytgaagraragraksyaydwsgwgtctsycacatctktgmatycyycaatgatmcckytghscmtgwtactratctttstggcaaggaaaccatytvccgagtaaytggtggmaygarggygadbkchbmbsgvdadgarwycdsbmsrwrbgvrsccmwswtgsctsyccmgratktgsccymrrggtgcaaggaactggkcmtcahtsycbtgmatawyaaayhccgsncchsvggrggaamcasgnccaaghcccytggrcntggagcccmgycmsscctyaragytbdtgctcgcthtgsgatgaagawtgsgcrgwttgaggatdycmcccccatccyctytgacagcmctbgaaggaagggwgswyktcggvrwcnccgwctkwgaacmggmcttyycaashhrtttthtgtkaawaaaytgctttgtargctwmammamaaaaaamawaaaaaaaaaaaaaaaaaaaaaaaaaaaannnnctatttagtgag

SEQ ID NO: 13 - DNA, 560 bp, Rattus norvegicus
  misc_feature (521)..(522): n is a, c, g, or t
  misc_feature (525)..(525): n is a, c, g, or t
  misc_feature (530)..(530): n is a, c, g, or t
  misc_feature (533)..(533): n is a, c, g, or t
  misc_feature (535)..(535): n is a, c, g, or t
  misc_feature (541)..(541): n is a, c, g, or t
cgggaggsgmrykvggyvcgwddwcgrywsrmrsgksmrbkwkvggmsssrmtsgckgbtgmygbkskbwvgttttcatcgcagacacttbtgctscaaagatggtcaacgtacctraaacccgaaggacttthtgtaaraaatktgscaagcmccrscctcacaawgtgrcccvgtwtaagargggcaaggwwtccctgtatgccyaaggaaagcggcgytacgaccggargcagagtgsctatggcgggcaracaaagccaatttytcgaaagaagsccaaamccmcaaagaagattgtgctcakgcttgagtgtgttgagcccaactgcagatytaarrggatgctggccattmagagatgcragcattttgaactgggaggcgmcaagaagagaaagggtcaagtgatccagttytaaaacttgtgttwtcttagaggaaaatactgaagcagkagaawmatgacctgctagagaataaaagytattgktwctggtahwaaaaaaaaaaaaaaaaannaanaaaanaananaaaaanaaaaaaaaaaaaaaaaaaa

SEQ ID NO: 14 - DNA, 938 bp, Rattus norvegicus
  misc_feature (347)..(361): n is a, c, g, or t
  misc_feature (537)..(537): n is a, c, g, or t
cacgaggcctccttccccttcccagatgctcttcccttcatcagtctttccagcagaactgagtctagtgagtctgtgccatttctcattagccctaatgaagaggccccatcctcaccaccatttggtagcattttgagaggcaggggattatattggtgtgcagtaaggggctactcaaatataccccatctaacctgacatttcccaccsgcctctccgcccttgkttctgraaacctttttcttctyagcctttttggkgtcatcatgtaataattgkaggagtttctcggctcattttratcctttacyttttcaatggaggctgaatcagccagtcccccnnnnnnnnnnnnnnngtagggaggatgatcagcggrtgacsagttgctgcaaggctksaggcagtakcagtggrmrgcagwrratgacagtagatggcctccactctmtcaggtggctgcagagcagagagcgctcactytaaacachtggccttccmtggcaagagttttctatccatgaagcagagcanccgcagagggctgkggctcggacghtggccaaagaagttcctascctttccytttyccbtaaactssatcagggaagaatcyttatcgstrgcttggytttcacawgaggtttyytgagraagsgrahtgsgatargaagtmtgtcatgtmgtaawgtagmcaagaaatcytattaatccagttgtatttcagagctgtttgtccmtatgatttytaaagtcaagtttaatttcacaaagrmtykykkyckgaaattactyttggggtaatatytaaaatgagagacattytgtaaccytgtwaaatacmtagggaatmtwacattccaatktacacamcgaaggcaaattctttaatcaaataaaagagthttmtaaahwrrrmaaaaaaaaaaaaaaaa

SEQ ID NO: 15 - DNA, 417 bp, Rattus norvegicus
cagaccacctaggaaggaggtctgaattttcctggtgtttttcacacagtttttttttccctatccctctcccccaacccccaaatactgtgagtagggactgaacgaaagcggggccgccagacctatacgcgctaccagaccctggagctggagaaagaattycactwcaaycgctacctgactcggcggcgscgcatcgagatcgcsmacgcgctctgcctcaccgarmgmcagatcaagatctggttycagaaycggcgcatgaagtggaaaaaggaraayaaawcwtcakyccagsarccackggsmaggacaaggcggaacggacgaggaggaagaggaggaagagtgagagacagagaaagggaagagaggaggaaagagaagagagggagaacccaattgtggaactga

SEQ ID NO: 16 - DNA, 519 bp, Rattus norvegicus
ggcacgaggagctcttccccctctagtctctatggttcrcgmggcskyrskagbmkcggcrcswsrctagtactgmggcwtcsarstttgtggtcgatctctgascgttgttggggcttggcgctgcgctatktccgwgawgaagcascctgtcgacttgggtytcctggaagaggacgacgagttcgaggagtttcccscggaagactggkccggcttwgwtgaagatgaagatscacmtktctgggaggataattgggatgatgacaatktwgaagacgacttykccaatcagttacgcgctgagytggagaagcatkgttacaagatggrgacttcatwgcatccaggaatkttmcaggaacttaaacwtggactytaccacattctcggacagrgaaaccmgcmtgggrtactttagagratatgtttatttcattatctctgggatttahttktgtttgtwtaagaaaaacmtaagtaartaaatgttttkatctwawaaaaaaaaaaaaaaaa

SEQ ID NO: 17 - DNA, 698 bp, Rattus norvegicus
ggaggaatccctgctccagcagctgcaaggtccaagaagaagaagaccccagcgaggaaaatgtgctggagacccctgtgccggttcctgtggctttggtcctatctgtcctatgttcaagctgtgcctatccacaaagtccaggatgacaccaaaaccctcatcaagaccattgtcaccaggatcaatgacatttcacacacgcagtcggtatccgccaggcagagggtcaccggtttggacttcattcccgggcttcaccccattctgagtttgtccaagatggaccagaccctggcagtctatcaacagatcctcaccagcttgccttcccaaaacgtgctgcagatagctcatgacctggagaacctscgagacctcctccatctgctggccttctccaagagctgctccctgccgcagacccgtggcctgcagaagccagagagcctggatggcgtcctggaagcctcsctctactccacagaggtggtggctctgagcaggctgcagggctctctgcaggacattcttcaacagttggaysttagccctgaatgctgargtttccaagaccaccgggctcccgaggatcatgttgagggaagaaaccttggctcccaggtatcctcaggagaagagagccatgtgttcacacccctcatccaggaccctgtccgtttctcctactcctctag

SEQ ID NO: 18 - DNA, 3508 bp, Rattus norvegicus
  misc_feature (400)..(420): n is a, c, g, or t
  misc_feature (441)..(472): n is a, c, g, or t
  misc_feature (639)..(654): n is a, c, g, or t
  misc_feature (3275)..(3275): n is a, c, g, or t
taagcttgcgtcatttccactgtgttgcccaggagagtgctacagctggtgagggtcagggacagctctcccaactctcatgatcctgagccagctcttgaactgcttcagatggcaaggggtggggccaactttgcacagctcttgaacatcaacatggtcctagaccaaggaaatctgcatggtctttggcagtaatatgaaccagggacatcgacactcatccctgctgttgcggaatcatgcacccagatatggctcttggccatagcacattctgggacttcaysrcaggccsamgcagctgggcysgycwytcrgaacaggtatgggagttctgtctggataagaatgaagagggtggtggatcccccggaagtgatgtcacagatacttgtgnnnnnnnnnnnnnnnnnnnnnagttaaatccgagttccctgnnnnnnnnnnnnnnnnnnnnnnnnnnnnnnnncataatctcgagcttcaacaatgatgacacgcgagttgtgagagtgaaggttatagctggcataggtctggccaagaaagacatcttgggagccagtgatccttatgtaagagtkacattgtrtgacccgatgagtggagtccttaccagcgtgcagacgaaaactnnnnnnnnnnnnnnnnatccaaaatggaacgaagaaatactgttcagagtccttccacaacagcaccggattcttttcgaagtgtttgatgaaaatcgtttgacaagagatgatttcctgggtcaagtggatgtccctctctatcctttaccgactgaaaacccaagaatggagagaccatatacatttaaggattttgttcttcatccaagaagccacaaatcaagagttaaaggttatctgagattaaaaatgacttacttacctaaaaacggctcagatgatgaaaatgcagaccaggctgaggmgttagagcctggctgggttgttttggaccaaccagatgctgccacccatttgcagcatccaccagaaccttctcccctacctccagggtgggaagagaggcaggatgtccttggaaggacctactacgtaaaccatgagtctagaacaacacaatggaaaagaccaagccctgaggatgaccycwcagatgmygagaatggtgacattcagctgcaggcgcmsggagcatttmccaccaggcggcagatatcggmggatgtggatggccctgacaaccacgagtcccctgarmmttgggagattgtacgagaagatgagaacaccatstacagtggtcaggctgttcagtcgsctccgtcaggtcacccagacgtgcaggtccgcctcgcagaggagttagataccagactcaccatgtatggaaacccggccaccagccagccagtcaccagctcaaaccattccagcagaggaggcagctcgcaaacctgtatctttgaggaacagcstacacttcctgtgcttttgcctacttcatctggattgccaccaggttgggaagaaaaacaagatgacagaggacgatcgtactatgtagaccacaactctaagacaaycacatggtccaagcccaccatgcaggatgatccaagatcgaaaattcctgctcatctgagaggaaagacaccagtcgactccaatgacctgggacctttacctccaggctgggaagaaagaacgcacacagatggaagggtcttcttcataaatcacaatataaagaagacacagtgggaagatcctcggatgcagaatgtggccataactggaccagcagwgccctactccagagattacaaaagaaagwawrarwwwwtccgaaggaagctgaagaagcagactgacattccaaacaaatttgaaatgaaacttcgccgtgcaaacattctggaggattcttaccggagaattatgggtgtgaagagagctgacttcctcaaggcccgactctggattgaktttgatggtgaaaagggccttgactatggaggagttgcccgagaatggttcttcctcatctcaaaggagatgtttaatccctattatggcctgtttgawtattccgctacggacaattacactctgcagataaatmcamactcgggctygtgtratgaagatcacctctcatactyyaagttcattggccghgtggctgkgatggcggtttatcatggcaagstgtkggatgggtttttcatycgccccttttacaagawgatgcttcagaaactgataacactgcacgacatggagtcygtggatagtgaatattacagktctctgcgatggattcttgaaaatgacccgacggagctgkrcctsrgatttatcatagrtgaagagctttttggacagacacatcaacacgrgctgdaaactgrtggatcggaggdtgtggtcaccaacaagaacaaaaaggagtrtatctaccttgtratccagtggcgatttgtgaacagaatccasaagcaaatggctgsttttaaagagggattttttgaactgataccacaggatctgatcaagatattcgatgaaaatgaactagagcttctcatgtgtggwctgggagatgtggacgtgaaygactggagggaacatacaaaatacaaaaatggatacagcttaaaccaccaggtcatccactggttctggaaggctgwtttgatgatggattcagaaaaaagaatacgyttrcttsrgytkgwtaskrgmryakcycktgtgcckawkwmkgsrhkwgctgaactctatggctcaaatggaccacagtccttcacagtggaacagtggggcacccctgataagctgcccmsmscamayayctgcttmaaccgcctggacctgccaccctatgaatcctttgacgaactctgggataaacttcagatggckattkaraacacgcagggctttgatggggttsattagattacaaaravccaagctgtggwgtcttatacmccatrgttcytaagcaaaagcaaaaacaaaatcacatttdagcaydwksmasatamyttytaaaagatgsccaytggctykkcamgagtccagagsacagtttgwtkatccatgatttcagccaccmccrykstgacktgwtsswkygbmcrgttgwtggggttcatgtgyacgvcagdatgtgagtcctgtgtgcctgagtyctgacygtatttcatcttgmtaggcacatccttmtaaaaykabtgagatkccamctgtgaaatatctgtmatgagtagctggysgsmvvmwwwgrynctwtkwtaagatgaaatytggwcmaagaaagtcytyaatgattgattcataaaccgsgacacacttrktrccacktgtcgcwtacttactctgtagacmtgcswagwgtacsttatcgcctagacmccttkaakccgcktkggaagatgwhtccacatgtgttttaagtcacttaagtaagtcacktgtgtttwaaaaaaaaaaaaaaahhmtctyrtgcsgcccctcgtgcc

SEQ ID NO: 19 - DNA, 600 bp, Rattus norvegicus
  misc_feature (121)..(121): n is a, c, g, or t
  misc_feature (212)..(212): n is a, c, g, or t
  misc_feature (220)..(220): n is a, c, g, or t
  misc_feature (276)..(276): n is a, c, g, or t
  misc_feature (385)..(385): n is a, c, g, or t
  misc_feature (438)..(438): n is a, c, g, or t
  misc_feature (446)..(446): n is a, c, g, or t
  misc_feature (454)..(454): n is a, c, g, or t
  misc_feature (496)..(496): n is a, c, g, or t
  misc_feature (537)..(537): n is a, c, g, or t
gaasactatctgtctgccatcctgaacsgtctgyrygwgstgcatgagawgaccccagtgagcsagaaggtcmccaagtgctgtastggktccytgdkgkaawkrcgscyrtkwkdhwhkncwstsammgttramgrraywtatgtybccamasagtttaaagytgwrmcsttcacbtyycactctgakayctgcamactccchgmcawggngaagcwsntwavgarscawacggmtstygbtgakstgbtgamacacaagcccawgkccacvgmngatcagctgawgacgrtgatsggtgacttsgmacaaytsstggmcaagtsthgcaaggctvcmrmcaaggwtaavtgyttssycahtgadggbccaaaccytgytgbtngaakcaamgaagcbttakcytawacacatcacahccatytcaggbtaccbtgngaaaaaangachtgangacycaggactcathtmtthtgytggtstaaavccaacmccntawggdacmcaaatttcyttgaacatttgamyymttttyyntgtkccgcamttadtwaarawtrgmmaramwwwaawwrwaaaaamaraaaaaaaaaagtgtgg

SEQ ID NO: 20 - DNA, 662 bp, Rattus norvegicus
tttttttttttwtttttkkkhhycmayccakghwtttattgaarkggkagggctttcaatgctctatraaaactaacactgkcaraatactcaggaagttcaattttstttwwwwraarraarwararaarwscccaaawtwtyykggatgatttgaaaaamacacagtacctraactgacaccacarggmaaattwtkacmawyttggscccctgtragccctmaaraaatgttcctggwgaggaggaaravccarggytgcccavtabktcctgtgcyccgkggbcyccccactgyargggctgtggggtcwayaracggkcacvccagmctcccamgttcsadmccargwctgtaarggctcctkggtkscycawarcttcaktcaaccaaggaggtgabcacaggtgtcraggggctgctgtgtwgggcadaaggaaggtaacctggcttgtgaagctggktggtctgtacagttgcaacacaacacaaragggcttccaagtcagtcckyttagagctyaaaacaaaaagcattcttctccctctctstsrwgmstagtgcattcagttggttggtmagcgggtagatgtcaggwggtktytsctgtgtgagaacctctgcacacgctccaccagatgcaccatcagcttgtctgag

SEQ ID NO: 21 - DNA, 984 bp, Rattus norvegicus
  misc_feature (761)..(761): n is a, c, g, or t
  misc_feature (875)..(875): n is a, c, g, or t
actaacgggaacaaaagctggagctccaccgcggtggyggssrctckagamcyagtggatccyycrsgctsyagghmwkckmkchagckktcctcctgggattcagkcatttaaagattgagwccaagattgaragsrtggctgacctcaagcagctcatggacaacgaggtgttgatggcctttacctcctatgcaacgatcattcttgccaagatratgttcctragctccgcgactgcattccagaggctarccaacaaggtttttgccaacccggaagactgtgctggmttcggcaagggggagaatsccaaraagttccttcggactgacgagaaggtggaacgcgtgcgaagagcccacctgaaygaccttgaaaacatcgttccytttctcggtatcggcctcstgtactccctgagcggaccggatctctctacagccctcattcacttcaraatctttgtgggcgytcgratytwccacaccattgsttacttgactcccyttcbtcagccaaacaggggcttggcattttbtgttggmwacggagttaytttgtcaatggcttacargytgctcakgagcagactgtacttgtaaakagatttgtgaccgtcaccctbtgatwgawttmrrmamdtarrggwttytwtwtytstrgtgtawwaaaaaamwwwmwaarrwhttatgtatgaaaggwgcagagaaatcaggaatcagggaaaattctgtttgaagactaccatccacaggctntacccttttgtacstgggttagacatttmacatgaccggccttagvtatgctgtctaactcstaaagtactttgtcctaagtcttgrgtkccttrtaaattgtaacattccttntacatttcctgtggtgyatctataaaagagtgctcacacctgtgtgaagcctgggtttcattggcayctgaattaaaaamrkkvcarrtgraaaaaaaaaaaaaaaaaa

SEQ ID NO: 22 - DNA, 651 bp, Rattus norvegicus
tttttttktttttttttwttttahkyyamgttatkttatttkkcattattttctaacacacagagttagaaaaatgcattttggcaccatgaataaagactttcttcaagtttaacctttaaattaamracagtagctckaatmaagatatttaaaccycaytcasasaaatattaaaaattcamatmaaaattttgctgtgggaatttttaaamagtggggtasaggaaaagtwatawcwagactaagaatgagaaagtmgkttatgatgaggaaaagaaatgcccctcctccaggaaaaacaaagagaccaactwccaactacggccaaaggtwagaacaggctcaaaaactattttcctgatataaaattcaagtacttaatcgttaaaaaagaagatagtaaaatgtactactaatctcaatgaaactgatattwtkccttacyattttctataattagaggggaaaaacagawggaaacacatmctgtttgacttggagctgacrcctgaagcactctgtaaagcasgcagatgtgagcttyccctgagagcttgccctggagacacacaggggcccartttccaacggacaggagcacctgcctcacaagctgaggatctccagtggatgggcttccactggcca

SEQ ID NO: 23 - DNA, 731 bp, Rattus norvegicus
ttttttttttttttttctctcatacytyyytttwtkwwwhhwkktwkkgaraattcawtawwatttttattttgaattawgacckattcygaattcaamaaaatckmctttggmaammacctcaktgggtgttgacttactaataaaaagtamrtcatcactgtttgaacataayatadaatwcacrwtaaattatatttacatgcwctgascavattatcacasacaasgtawamamwtacagtrktttatgyacattcwtaaagatttacattttcacataggtttataaagttamamaktcymtgyacaamatcttccgtgtasagartgtmcacatcttcrwccttawggctkkatckccacacagaactgctttaaactagcactacaacactggmrggytcacttcatattcasatcttgryacccatgthcamcacatcatgaaatgtgaattatawwacmmtyagaaagtaatcatgcagctatcttaatacawgaaagtgagatgagctgatcagcacttaycacctccatttctgktcgtatywgtgccasytcctgctstgtgtatgccwattccasttcctgttccgctttcacacakgtgcatgcaaaactagcagattwtgaactttttaggcaacaataaagtaatactacatcctgacaatgcttargtwtgaagaatgcagctaacagtcctaacttggtggcaatttctgctt

SEQ ID NO: 24 - DNA, 563 bp, Rattus norvegicus
ttttttttttttttttttmhykwkkaaamaatttatttgtgatctgtacacgtgataaagtggggctycattgtagatctttaaaggtakaacaaaacaaaaatycaamgtmrraakgtataaatacaatatatrttttctwmcaaaaatgggagattwmcaaaatatacwtactgcactgtctctatttwacaamtttcacatgcacttaasagmtaaaacatataagatgccaaacctgtgtastggsagctcaaamaammraaaaaaaaacctgwcaggtgagatyactttgaaagttttaagaaatacargatcaytttaactataagagcagctccagtmaactgatcgtgacatataraaagtaatttgtwctcctgacagwmcccccctggttggsatttaaaaactgctytgagaaactgaagagcttygcaaaatcggrggacagtcagtgtcaaaggtagggtaaaggttaactcccawgatgctctgsttaactttacaccattatgccaaagaaccagacttctattgcaggggaaaaaaaaaaaaaaaaa

SEQ ID NO: 25 - DNA, 479 bp, Rattus norvegicus
tttttttttttttttttawtttaacaatkttttayttaattcyawgtatccaaaatattatcatttaaaacacataatggttataaacaaattgagatttttaacawtattttgtgttgtaytavtaagtaccygarttccaacawgtttgcacatttacgcatatctgcattcaracaagccacataktaactgktcawctgtmagtggctggtggctgakactggmcagtgtgcctawgactgaatctgaaacagtacttgtcayaagtgaggacaattcarcaacagccactatgtgttgactaatgcaagagacaycacccyacagtagtctasccaraccaaarrgaawctcaatgtggtcagccttcaaaggcaattatcagtttacsgaaatacaaasgagaaaaaccctcaccaaatggcatgctawaaatgctcacagtaacacatargctacgggagcttaatacatga

SEQ ID NO: 26 - DNA, 1352 bp, Rattus norvegicus
acgaggggaacatggacatgaagaggaggatccacctggagctgaggaaccggaccccggcagctgttcaagagcttgtcttggacaattgcaaagcaaatgatggaaaaatcgaggggttaacagatgaatttgtgaacttagagttcctcagtttaataaatgtaggcttgttttcagtttcagacctcccgaagctacctaagttgaaaaagcttgagctcagtgaaaatagaatcttcggaggtctcgacagactagcagaagaacttccaagcctcacacatctgaacctaagtggaaataacctgaaagatatcagcaccttggagccgttgaaaaggttggattgtctgaaaagcctggatctgtttggctgtgaagtcactaaccggagtgattaccgagagaccgtcttcaggctgctgccccagctgtcctatctggatggctatgaccgagaggaccaggaagcacctgactcagatgtggaggtggatagtgtagaggaagcccccgactcagacgggraagtggatggtgtggacaaagaggaagaggatgaagaaggagaggatgaagaggaagaggaggatgaggatggtgaggaggaagaagatgaagaygaagaggatgaasaygargaygaggatgtagaaggagaagatgatgaagatgaaktcrgcsgrgrggaagaagagtttggacatgatggagaagytgatgaagatgaagaagatgaggatgaagatgaggatgaagaggaggaagamrgyrsgarrsrygavragakmaasagmgrmacagakgmcsarggagaagatsacywasccccgggacagcctgcaggacacagaactgttgmgtatggttggactgykcatggatttggtagctsttktwaaaaggtasctgtgatacaagccycaggacacccccacccaargagccaaagaatagttcccgcgacathccgccttcctccgtktagccccktggtamtccaccaccaagcctggggacttcgccccaacaaaattgwawkcgkyrykaggttttcgtgtaagactcwtgctgtatmgtgacasctgtgattggtgagktgrccgtcctggctgccagtkacamtgcgattgtaayaacatttttactttcygtrcaacaaggaaaagctttgtaaataaaatcttarcatttwrrvwvhwwwmwmawrmwwwdcykwwttctttctttctttctttttttttttttttaaagacattaggacattttgtgtgataactgccaaaaccgtattttctaagactaagcaaaataaatgcattactctttggtaaaaaaaaaaaaaaaaa

SEQ ID NO: 27 - DNA, 1945 bp, Rattus norvegicus
  misc_feature (1894)..(1894): n is a, c, g, or t
cctcgsccaacccccgccgtagctgccgctgctcccgccgtcaccgcctccgagaacatggctgtgcctcccacatatgctgatcttggcaagtccgccagggatgtyttcaccaagggctacggctttggcttaataaaacttgatttgaaaacgragtccgagaatggattggaatttactagctcaggttctgccaacacggrgaccaccaaagtgamsggcagtctggaaaccaagtacagatggaccgagtatgkgctgacgtttactgagaagtggaacacagacaacaccctgggctctgagatcaccgtggaagaccagcttgctcgtggactgaagctgacctttgattcatctttctcgcctaacactgggaaaaaaaatgctaaaatcaagacagggtacaagagggagcatatcaacctgggctgtgatatggactttgacatcgctgggccctcaatccggggcgctctggtgcttggctatgagggttttgacatcgctgggccctcaatccggggcgctctggtgcttggctatgagggttggcttgctggctaccagatgaattttgagacctcgaagtcccgagtgacccagagcaactttgcagttggctacaagacggacgaattccagcttcatactaatgtgaatgatgggacggagtttggtggctccatttaccagaaggtgaacaagaagttggagactgctgtcaatctcgcctggaccgcaggaaacagtaacactcgctttggaatagcagccaagtatcaggtcgaccctgatgcctgcttttcggccaaagtgaacaactccagtctaattggcttagggtacactcagaccctaaaaccaggtatcaaactgacactgtcagccctgctggatggcaagaacgtcaatgcgggtggccacaagcttggtttaggactggagtttcaagcgtaaatgaatattgtacaatcgttaattttaaactattttgcagcatagctaccttcagagtttagtgtaccttttaatgtcatatgttggggatgcgagagttgattgataccacgttagacctccaggctaaggatgactcggctttaaggtgtttaccgtywcagrggtacagcggaaaccccattccaggaagggtcctttttagctgtaggcgttgggctggggaggagctcctctagagatscsaggctssaagtggaagctgggaacgtgtggaccctttgtaaatctgtatccagtccgcacatgaaattgtgacttcctgaacatcgaaccccggtgtcccgatcctgtctgctcggaagcatgtacacacctacgtgaaagggacggtttttttttttttttatcggatggtcacgccctgttcccatcgtgcmckrkkcccatcctagcccatcagttacctgttttacaccaaaagtagtctttagggtgtagttagcaatttcttttgtgccattttaggktgraragggtgggcatgatkaarccagtcattcasgacttaattcttcchtgygbyryggkgkggytttcttccbttvwtstgkwkkttkktttwawttyytktttttttsccattgcvccmgrgtwtgaaatagsttccaggttytccggstcaragctggscggstgattgtggtcacaccctgacaacrbtwgggatytcaacggactcctyttgtagccgcaccamtatttttagcmgyttaatgkgtacattatarrgtcttccattktgtgtggaattagctmctccccttcaaatgctgtaattaacmtcmcttaaaataaaacttgaataaaatrctrwwammwmmraamwwwawmaarrwaaaawmaraawramwwraarmttkaggrrrgngcccggccccggttcgccctatacccaagtgtatcccatattaagtgccgt

SEQ ID NO: 28 - DNA, 2476 bp, Rattus norvegicus
gaactaaaaagatcgtgtgcgcggatgtgctgtgtctgtagtgactttttccgggcctcttttttgggagaaggtaccagtctgcctcggtgaggcagaaaaggtccgtgatgccattgggctttgcccttctagaaaacaagctctagctggacggtccagaggctccaatggctgcgggctctggggtcgccccgccacctctcggcgttgggctttgtgcggtgaaagtggaggaggactctcccgggagtcaggagccctccggttccggagattggcagaatcccgaaacttctcgaaaacagttcagacaattgcgctaccaggaagtagccggccctgaggaggcgctgagccgactttgggagctctgtcggcggtggctgaggccggagctgcgctccaaagagcagatcatggagctactggtgctggagcagtttcttaccatcctgcctcgggagctccaggcctacgtgcgggaccactgccctgagagcggggaggaggctgcggctttggcgcggactctgcaaagagcactggacggggcctccctccagagctttgcaactttcaaggatgtggctgaatctctgacctgggaagagtgggagcagctggctgcagctcggaagggtttctgccgagagagcacaaaggaccctgggagtacagttggccctggcttggaaaccaaagctgtgaccacagacgtgattctaaagcaagaaatgtcaaaggaggcagagtcccaggcatggctacaagaagtgtcccagggaaaggtcccagtatttaccaaatgtggtgatacctgggaggactgggaggaacggcttccaaaagctgccgaattgctgccgctccagagttctcctgaagagcaaggacgcactgccatcccgcatctccttggcgtgtccaaagatgaaagcgattctaaagataatgaatttgagaacagcggcagcttggtccttggtcagcacatccagacagcagagggtctggtcaccaatggtgaatgtggggaggatcacaaacaaggcttacatgcgaaatgccacacggtgaagcctcacagctctgttgacaatgctttggggcttcttgagagccagaggcatttccaagaaggcagaccttataagtgtgataactgcgagaagagattcagacagcgctcagacctcttcaaacaccagaggactcacacaggtgagaaaccctatcagtgccaagaatgtgggaaaagcttcagtcagagtgctgccctggtgaaacaccagcggacacacacaggtgagaagccatatgcatgcccagaatgcggggaatgcttcaggcagagctcacacctcagtcggcatcagagaacccatggcagcgagaagtactgtaaatgtgaggagtgtggggagatctttcatatctccagcttatttaaacatcagagactgcataaaggggagagaccacacaagtgtgaagtctgtgagaagagctttaaacagcgctcagacctctttaagcaccagagaatccatacaggagagaagccctacatgtgctttgtctgtgagagaagattcagtcagagtgcaaccctcattaaacaccagcgaactcacactggagaaaaaccttataaatgttttcaatgtggcgaaagatttagacagagtacacaccttgtccgacaccaaagaatccatcacaattcagtctctgggcttagggtggagaagcaacatggtaacckcckgagctggtgaccctctggatgcwaagartggaaatgccccaywcgmbbagsgcaytgacccatcgmgggagaaattgacccctscrcagctgcagtttatgcgccaggtacaactagcccagtggcagaaaacmctgccacagcggcggaccyggaacatcgtsmccssccygggcatsggrgccctggtgttagctatttatggttacmccttytactcagtgscccaggarcrkttccttgatgagctggaagatgaagccaaaghtgcccgagcccgmgytcttgrragagagmgagcatcaggmccctwamtgyacggaccatyttcaaactgytggagccccccgtacatgttgaatgatgcctggtggtctcrcagcatcactggcatagkaactkyggaytatgattgarcccaagaagccacagactatgyatttggctactgccaaggggagattgctcacrtcacatgcagtttgtacatttactcarcccctttttattwccttgtttgaraggtatgcrcgaccttgcctttccccaaactytgtggtttacctyttcamctcccaggggcccaatkttaagggggagggtktggcctaamtgcagagttkgracctaaagtgggaaagatagggtcaagtaaagagtaatwaaawrarwmawhwhwmmmhwarmmaaaaaaaaaaaaaaaaa

SEQ ID NO: 29 - DNA, 3014 bp, Rattus norvegicus
  misc_feature (249)..(249): n is a, c, g, or t
  misc_feature (895)..(895): n is a, c, g, or t
  misc_feature (2568)..(2568): n is a, c, g, or t
  misc_feature (2613)..(2613): n is a, c, g, or t
cggscgcccggsctcgccgtccgtgtccgcgccgccgycgcctcccgtcycaccggctccggagcaccgcgacttcgttcggtccgactccccggcggggtggcggcsgccgggtcyccackgtggcggccggagcadcggctgcaggagcccggctctakgatgaagttcawgcccaaccagackcggacatacgaccgcgagggcttcaagaagcgggcggcctgcctgtgcttccgcakcgagcmngaggacgakgtgctgttggtgagcarcagtcggtacscagaccaatggatcgtgccgggaggaggggtsswgccggakgaggagcctggcggygctgctgmaasggaagtgtatgaagaggctggagtcaaaggaaaattakgcagactcctgsgaatatttgagaatcaagaccggaagcacagracatatgtttatgttctgacagtcactgraatattggragactgggawgactctgttaacatakggakgaasagagartsvtycramvkgkaagacgcaatcaargytsttcagtgymacawgcctgtycacgcagagtwcctgbaaaggctgaagmtgggrtgttytycgvccaamkkkwwttcyacrgtycvwwymstcccakawwacaatgccttgtttgtgrctvccgcaccaccytmtggggtgccatscagtatarkakavrgwgbtggrkcccctcccccwccgtgtcatggcmcatgtcaragggagagaggcttttttacttctaacacatbtgactgctghtggcaractytagattysccatgcaggggtttcaaataatttgcatgyatttcarawgctttcaactcttttwwaatwaatamcaaaatagcaaaaatamwwwwmrwhnmhhdwrmmawrwrrawwwwwtttaaagccttaattgtaagtctaccccattactttggttctcatttttataacctttcttaaaatttcacttttgaacactcaacattctatggtttattttgrcagakcaactggttgttgggtatgtttttgccctaatatttttttcttacagtatcaaatagtcaccaaatctttgggaattaatgaaaaatattcttggtatttaaaaaaatatatatgtgccccaaaacttgtttaagagagtcgcattctctccacttgtaagctgcaggtttgcgctgatttgtatggacgggccagttgcctttgaccaagcactcaagtttactctatccgagaatttgtacacagcaagaattatgtcagtgcacaggcactgcctcccctctgacacggtgattccatatgaatcactccatttttagggaaaactgtcagraacttgcctgtggcaccgcacagctcattctgaaactgttcagagaagtctgttcagcacgctctgcggctgcttcctccctgctccttccgacacagactgtgttaggggccacattgctcccatggccagtgctcttcatattttcagtctagcaacaacaytgttgaccagtgsaykagrctctaaccttrgatacagcagtcactgactggcatccmasgwkagatcacactaaacaaaatggctgtcctaggcctaagacactgtcttgagtgtcagtaagcagcttgtcagatgagtgtgagggaactagaactatgttaccttgtctttgtgctctctcaaaacgggccaccccatggaaaagtacctacatttccttcaggaagtcatggargaagtgaaggggkaggggrgagaggaaaagatctttcgcagtacagttaggacatctgtaacctgttaaccyttaaattgtaatgwtgstgctgccaatgtccttacctgtaaggaaggaaaatgrgatytcgtgccmcaaatgcmgcmgaactaaaaacmttwggttacaaagcmgaaaaacccaaccmgtwgtgttcattytaaawtatgtagcstaaacaaatgtgatcgtccmgaccttttytatttttcyttgtacmgrggtcatgtactctgggtgtgttttaaaagaaacattttaaagaaammmmmmrrwwgacattttctatcttttcgttttctcacgattytytgcaatttttccmtgtactaaacacaacmgaaactggactgttttgtatagaatactgcttccagctaaaaccmtcacaagtgcccgggrgtttatgtggacatgrtagrtactytgggcggtmataatgcatgaacctgttttwtaaactcttgaactgtgtattgccmtgtaaaatatgtacmgtwttaatswcrassmtctctttaaaagttwgcctwtgaamawwrwwrhawaawwwctttggtcagaaacatttggactaagtyatgtcacctgkgtcaggaykwksttcaaygccgtgtagcaaaactgtctttagtctatgcaaatagcgagtcactgagtgtgacagawtgcaacttcactgktaaacttcacmtgaggkdyyctcattykggaatccagactgcaagattwtaaaggraargacctawrgcaattcagtkcktynwgcaaatcaattgaatccmcgagagatgtctmccagcgagatgtntaccagcccagcsgcstgcagyctgcagcmtgctstgtgtgcttawttgtgcgctsrataaaatggggcagctaaattykycagktccatatgcctccraagtycmaakraavraaagcaargtaacatgttagactkgmcttgtgtgscggsgtaaagaaatggcatyttcscackargrwcrvacyawcmakttcttybktcasyywcmctrtkwmmyagkgwrrstgamrrgamgaamtggttatgtgtgcackmatcgctttgcatkgtytcawgagatggytgcattcsamckgttttaaraattgtaaggatcttgacttttyyacatttggaaacatcmawtaaaaacaaacataatctgwrraaaaaaaaaaaaaaaaaaaaawmwcgcggcc

SEQ ID NO: 30 - DNA, 995 bp, Rattus norvegicus
  misc_feature (68)..(68): n is a, c, g, or t
  misc_feature (74)..(118): n is a, c, g, or t
  misc_feature (695)..(695): n is a, c, g, or t
  misc_feature (727)..(727): n is a, c, g, or t
ttgggaagatggcggctgtktcggygtttcaggcaccgsycggaggcttttcttttgataattgccgnaggaannnnnnnnnnnnnnnnnnnnnnnnnnnnnnnnnnnnnnnnnnnnncgaaagctcggaaaactggcactaccatcgcgggggtggtctataaggatggaatagttcttggagcagacacgagagcaactgaagggatggttgttgctgacaaaaactgttcaaawattcacttcatatctcctaatatttattgctgwggwgctgggacagctgcagacacagacatgacaacccagcttatttckkctaacttggrgctccactctytcaccaccggccgccttcccagagttgtcacagcgaatcggatgctgaagcagatgctyttcaggtatcaaggttacattggtgcagccytagttttggggggagtcgakgttactggacstcatctstacagcatctatccgcatgkatyaactgataaactsycttatgtcaccatgggttctggctccttggcagcaatggctgwgtttkragatarktttaggccwsatwtggrggaggawgawsccamkaagctwktgagygaagctattgcrrbtggcatmtttaawgactyggggkctggawrcaacattgwwctgygygktmtcascarragcaagytgrrsttthncmgtccatastyaktgcccaacaagaaagggnccasgtttggccsrkacaggkgksrgaaagrcactrccgctktystyasggagaargkcrcycctytggagctskaggtgctwgaagagattsttcagrcamtsgacacttcgtgaatggtgctgcgggcagttggwtagctctytgggtgastsggtgtacrtgccacccctgccccaccccactvtaccccaatcagaaaacatscayytggctattgctcaattaaaacaamccvgaaammwwmawawaaaaaaaaaaaaaaaaa

SEQ ID NO: 31 - DNA, 1272 bp, Rattus norvegicus
  misc_feature (217)..(272): n is a, c, g, or t
gaggttgtgctggggctccgcgcggcctgcagtcccgggcccgcgacgcgcgccgcccgcccgccatggagcctggccccgacggcccagccgcgcccggccccgccgccatccgtgagggttggttccgagagacctgcagcctgtggcctggccaggccctgtcgctgcaagtggagcagctgctgcaccaccggcgctcgcggtaccaagacannnnnnnnnnnnnnnnnnnnnnnnnnnnnnnnnnnnnnnnnnnnnnnnnnnnnnnncagtgtaccgagagggacgagttctcctaccaggagatgatagccaacctgccgctctgcagccaccccaacccgcggaaggtgctgatcatcgggggtggagatgggggcgtcctacgggaagtggtgaagcacccctctgtggagtctgtggtccagtgcgagatcgatgaggatgtcattgaggtctctaagaagttcctgcctggcatggccgttggctactccagctcaaagctgactctccacgtgggcgatggctttgagttcatgaagcagaaccaagatgcctttgrtktmakmaksamsgamtsytcwgaccyhwtrsgccytgctgavavcctyttcaagragtcywattacyagywmatgaagmmagcmytcaaagaagatggcatcytstgytgcmagggygagtgccagtggctgcacytggacctcatcaagragatraggcayttctgcaartctytyttcccygtggtgrrctaygcctactgtascattccyacctatccmagyggcmmgakcggcttcatgctgtgtagcaaaaacccgagcaccaacttccgggagccmgtgcagcagytkacacaggcccaggtrgagcagatgcagctgaartamtrtaaytcrgacatgcaccgygcsgccttcgtrctgccdgmrykmrsccgraaggccctsaatgacataagytgaawccaggtgccamtgtracaccacccgagacctcartyggattggaccaaggakctwcmaarytgthtgggaccaccagtcctggaccaaactcccagatgactcttgcccaccaaccaagtgttacaggccccagamtgstgcmtsgcmtgccvtgmtgggtggactcartcwytgtgtctgymwatctmtrtggcgttcagccccacgcytataccagctctgtacascmccacstatgccytgtgacccaacaaaawacaygtgtayttwtamcaadhwmaaaaaaaaaaaaaaa

SEQ ID NO: 32 - DNA, 615 bp, Rattus norvegicus
attcggcacgaggckcsscwcgaggvhbrvgscagacacagaggcagactcacaggacasscgrsacrwsrtgaagagcytgctycctmtggccatcctggctgcgctggccgtggcagccmtgtgsyaygarksksaygaragcawggaatcytatgaagtcagtcmyttcaccamccggvbamrwgscaacacstttatakscmckmrgcagarwtgrcacgctaragcycaggmamgagkccggsaaskmrrcaagcytgcccaggagatcahmaggraggcctgtgatgactacaagctgwgtragcgmtacgccctratytrcgggtacaacgccgcctacaaccghtacttcaggcagcgcsgaggagccaawtaagagcgcaagkaaacagtcgctttgtwacggrgtctggtttcatattcccctgcagwagcattmccgatacacagawtcgtgtkykttgcttgttcctcacatratytyctgtctggvtggsccactcyttmcttccgcgggwtgaamgtaatgaaagagyagtattaagaaatgtgtttatatataataaaattckggtttgwtmmwwwmmmaaaaaaaaaaaaaaaaaaaaa

SEQ ID NO: 33 - DNA, 801 bp, Rattus norvegicus
ttttttttttttttttttkktkyaacawacagttytttattwtmwtrmaatattgawawkctttcggaraagggtaaaccaatcttagtgatgttctacatttttcatatagtymaaaamatcttaryakccacamaccaaaataatgccaagtagctctcattttgccgatgttttacttccaawctccttatttkaattttatgtgcattgrtgttctgccgacatgtctatctswgtggggtgtcaawccacctakagctggrwacagaccgttgtgagctgctgtgagggtactgggaattgaaymtgsgtcctctaktgrwrcagccagtgctcttgaccacagaggtatctstccagtccctatttscaaactccgagtggsttccctaacgatkacatttavggatracaraagtargtgagtaacctttgtgagtagcccgttcagttgatttytgtctgagatyctccaccgkttgtatggkcgtcaaatcctttaactctgagcttchaartaaagtggcagtattggcatcaargtgtgttwsagrgktggaatgagacaccttggrcagaaaaagctctttatatagttgraatactatctaawtacatgtaatgcatatggtccaggcgataraatctgggagaacaaggccatcagtgctgtgaaaagaggcttctttcttctcttggatgagaagtacttaacaccatgggttacgttggatatatgtgaggataagacacaagcaaaggaagcaaagcctagagccatccctcattgccctcgtt

SEQ ID NO: 34 - DNA, 1237 bp, Rattus norvegicus
  misc_feature (28)..(28): n is a, c, g, or t
ttttttttttttttttttwhwtkgkkgnaaatgtttttattttaatatgtaatrtatacacaaacaaaatattattttammawwctaatgaaattcagytaatatacctattattaaacttctttatgaaagattatgaaaaaatttaagtgtttaaaattttagygtcratatcatwcctttcaaagtacaaattcattttaatacagctgakagagtaatcacrgagaccwatataacttytgtrgttatctaaggaagccattgttwccttccttgctccagcctaattgttatgaaaatattagtcaaaagagacaggatccagcacamcacagtaaatgtrracattctaaatgacttaatatcaagctttgarattcagattttaaagtgctcatgaattctcamgtggwtttgkwacacctyavctcytgraaggktttctctgtgstmhkgcwcggwcgactratksccawctgcttgggtawaataaacgcctcgtaccatacagtgtgmacttcgattaaaacvackcgatkscaatgctttaccatgatgcatgaagaaaahtgaagagayaaatcagstyctatcghastcawtacagttgaagagatttaaaaatggaaggcaataactgattgtgtwaagycgattyctatcaaggttatcatarktgraagatcwtaaaaaatggaaggcaataactaagtacacgccgtgtttcatactttccgagtatatcatgatctggcaactgtagttcccgtgtatgcattctccttccaggtacctgcttctctgtgtactaagagacctaagtccacataaatgactgttaatccatgcaaggtgaaaatgcaaatgttattggcaattagtcttcctaagttaatacacgttcaaatggtaactggggtcaaaaggtcaggatcacatttaagcgcatgatgacaagtcttacrsyamkrsrgttawtttgagaatcattacagtaacgtgttcaaaataacttaatccacatcgagtgcattaaattcacaaatggccaaagaaaacatttaaatgatgggaacattcgttttaaatccccggagtgcctgcagcgttcctgtatttctccaaccccactgggcttctgtgttaataaagcttgttttgtggtartttgtgttcattcacggctggaagagaaaggcttttcaagmaaacgtcaggaaaaaaaaaaaaaaaa

SEQ ID NO: 35 - DNA, 593 bp, Rattus norvegicus
cacgwgktgccgcaaggggctgaagcgcgcgtttctctgctctrsrayycggacsgsmcagtraggagaaggwatcatgtcrgacaacgaagrcaatttcgatggcgatgactttgatgacgtggaggaggacgaagggcttgacgacttggaaaatgctgaggagragggtcaggaaaatgttgagattctcccathtggtgaacgaccgcargscaaccagaagsgtwtcmccmctccatacatgmccaagtacgagcgagcccragtgytgggcacccgggctytccarattrmratgtgtgccccagtaatggtgrasctggagggggmracaraccctktgctcatcgccatgaaggaactcaaggccsggaagatccccmtcatcrttmgccgttacctgccaratggaagctatraggattggggsgtggatgagctcatcatcagcgaytgagcaragctgtcaggytgtgccaggcmccatctytatgcccattttawacatgtaaataataaacttcmctyttcmcmmmmaaaaaaaaaaaaaaaaaaaaaaaaaaaaaaaaaaaaaaaaaaaaaaaaaaaaa

SEQ ID NO: 36 - DNA, 707 bp, Rattus norvegicus
ttttttttttttttttttkwkkkyycygyaamaaygtttatttttactaatgttttgamtacaggaactaaatatgtgaagagggggccksmackwkgcaraaaacaacagttagggcctgcctgcccacarccaaggggraagcccactccaragtatcttggsatggactgkccsctcctacttaatgtcagtgscactaagcargaaacaraaaaatcasggtgtgaagrccttaccagytactarctakcgtgcaaggaaaggggaccaacctrtgacctgggagccasgatgcacargcasgaggcagargctcctgattcakttaagggcadgaggctgaatgcccasgtccaggamgaacgaaaaggggattttggaggtasgcttttttatcgagttaamaaacaggcacattatccaacctctccctgcggmcccaagctgctggcacrgccsttgacactatccctctccctacaaaascaaagggaacaakgaakgaggcagaagacagtaggttctgaggatgggaaatgtttgggtagccagagagcacctgtgagcaakccagccaagcacaggaaggacaggtttaagctgcttgtccctttgtgggacagggagagccaggaggtgttgagagcactctagctcaagcacagagcctcatgtagcatggcagaggacaggggactgctttg

SEQ ID NO: 37 - DNA, 857 bp, Rattus norvegicus
tttttttttttttttctcatttwactctgtttttatttcaatgtaacatgcagtaagaaaaaaaaaacttaacaggttgattagcatttatgatgcttacagagaaaaaggtcttaaaagcaacttastccaratttaaggaaaatcgctaattaaacactcacaataaatctattccaaaatactcattttggaccaaaatttgaaagcatttggtaatatttatgyctgctgtttaggtgcatwmtcttatawmctctctgattcttggratatccagcccccgtttttctaacacagcagggaagacatatmcatgtgatcaattaaattaaaggaaaaagtggagttggragactccargsctgcaaaaatatatacaagcattyaccttttccagaactaamcatttsttccataaaaatattaaatrgccaagccctataraactagggccaggactacttcaaatataacttctgtattttaaaaatatagggcagaaagccttttggatgatatttatmcattttcacataatatttstaggtccctaamcgaatcatgaagcattatgcagmctcamcaaagcctattyccttacattatstcttaatttatcyswyrwryctctagtgagtatggtaggtamctatgctttagtacaagaattggatycaatagraagtctttgtgraaggcttaatatttatagtcatttatyaccaaagttcaggcctatgtagtgaatgggaagttgscagmcattcgctctgtaagmcaaagcaatagcatatacatttttaaccctaccaacacaaaggcagagattccctactttggaaatgaccctcgtg

SEQ ID NO: 38 - DNA, 1307 bp, Rattus norvegicus
  misc_feature (963)..(963): n is a, c, g, or t
  misc_feature (1018)..(1018): n is a, c, g, or t
  misc_feature (1072)..(1077): n is a, c, g, or t
  misc_feature (1149)..(1149): n is a, c, g, or t
  misc_feature (1157)..(1157): n is a, c, g, or t
  misc_feature (1207)..(1207): n is a, c, g, or t
  misc_feature (1252)..(1252): n is a, c, g, or t
cacttgtttcctckcagctgctgtgcctgtaggtccgtgccccgcccgtcccagccatgctgtccgctctcgcccgtcctgtcggtgccgctctccgccgcagcttcagcacttcagcccagaacaatgctaaagtagctgtcctgggagcttctgggggcattgggcaacccctttcactcctcctgaagaacagtcccctcgtgagccgsctgaccctctatgacatcgctcacacacctggtgtggcagcagatctgagtcacatcgagaccagagcaaatgtgaaaggctacctcggsccggagcagctgccggamtgcctaaaargttgtgmtgtggyggtcatcccagctggagtgmccaggaagccasgaatgacacgagatgacctsttcaacaccaatgctaccattgtggccacattgacggctgyctgtgcccagcactgtcctgaagccatgatttgcatcattyccamcccagttaactmcaccatccycatsacagccgaagttttcaagaagcatggcgtatacmaccccaacaaratattcrrwrwrmmaammmwwracatcgtcagmgcamacwcatttgtggcagagctaaagggtttggacccagctcgagtcaatgtgcctgtcattggtggccacgccgggaasacgaksatccccctgatctctcagtgtacccccaaggttgactttccccaagaccasctggccacactcaccgggaggatccaggaggctgscactgaagtcgtgaagsccaaggctggagcaggctctgccactctgtccatggcttayscysragsyygctwtsbchhmkvccwgstggmcvcmmtsamygggaaggaaggagtcatcgagtgctcttttgtycagyccaaagagacaragtscmyttatttykbhacassvhtgmtgttgggraaaaaaggmvtggagaagaasnwaggyaytrrsaaaatyastyyttttgaggagaaaatgattrcmkagvcmatycntgaghtgaaascmyscwtcaagaaaggygakgactttgtgaagaacatgaagtnnnnnnatgtcattgaactacttgagagtctaatttgcttgttsyskrwvktrttcagcatcatgtcatysaaytwcnwgagagtntaawdkgcytgttgrakrrtgwyrwkwmarcatcwgcatcyctksyddanwahrrrhwrwwrawaatgmcaataaaacwgkhtgattttbhwwwnhhrrrwmaramammarraaaaaaaaaaaaaaaaaaaaaaaaaaaaaaaaarraaa

SEQ ID NO: 39 - DNA, 808 bp, Rattus norvegicus
  misc_feature (39)..(39): n is a, c, g, or t
cgcttgcggmaywkkkttttywykwkktwtttttwwwanrkackaaattaaaactttrttggataaagaacactctyccgagcacatgaytggatgggctaggtctacattacatgctackaagccgaacacgacagcagtttaacgtkgmatgtcaaacacattagtttctcattgtacaaaaactcttttctgtagctgacgcrcaagagggaaacacatgataactsgacatttcaatcatcygtgatgagttttgtttttgktywtttttaaraaaagtcatttgraraaactggtgtctttagcatwcrgywyrarkaaattagttacatgtgcactgttgaaacctmcctcgccccttagtgtttyaaacaargtcttabtgcaracatccaagttgctcgtcaatctaaaagactgttaaactcaraatacaagttctgagttatstgtagttwagtakgamammmaaaaaaaarwmarattaccwdtkmcywcrwrgttcctttmrgctcacttgatagtccactctaggcartccccatctaartctctcacattaatgwctaaagcccgtttacagtmctaaaactytmtcattcaakcatcaatgattatatttcaaaaaaaaaraaaatcaytcatttcagtaatggcgattmctsstrcattctaararagarararararagagagagagagagagagagagagagagagagagagagagagagagaaaaattataattaacaaaaccagtatccataatggaatacctggaaaaaaaaaaaaaaaaaaaaaca

SEQ ID NO: 40 - DNA, 585 bp, Rattus norvegicus
  misc_feature (542)..(542): n is a, c, g, or t
caaactattagagcaatatgcttgtgcttcacacwyywkyttyttwtkttywwyyytawagcttgyatatttattgaacaaatacsactaaaatagctaaaatacattgggtacttatggraggaccacatgttacaaaagcctgcgttttcagcakcgtacaactgmaactytacgtaaatgccacaaatgcmcaataccgtttccttgctytatttacatagctgatatatctaccctaacaraggtgggggtasggaggatkcacaadaaactcakgccagargggaagcmmrakagaatgakrgggacagkgcwtgcgtcattggtgtytaacmstmaraagcgcaaacagttcaraacaaggsctgycctgtcaawggaagagctaaagacgttatataaaaattaargtgggctttcagtccggctaacacaacaacattccgtgaasagacggcattgtcagattttatttttgkttatccatttcattgggagcamsgacaarratgtaaaatcymtacstksckwatcmhmvnsgtykwyttkcwyytcdtkcydmaktcwysrmcaycagaatgg

SEQ ID NO: 41 - DNA, 533 bp, Rattus norvegicus
tttttttttttttkwwtgkggattggraarcttttatyacwmtkwttaayttgtagggtttctcthyagtatgtatttttctatgtatttggagamtattatgttgggaaaagrctttgtcacattggttamatttggagrgtatcyctcctstgkrtgttcttwaatgtatttgsagattactgtgttgtgaaaggctttaycacattgyttamkkttgtagggtttctytytggtakgaactctatgtgtctagagactattttgttgtgaaaagggtttaacacattcaytamrtttgacgggttttgctcctgtatgaattcttctrtgtayctgsagtctactgggttgtgaaaargykttatcacattcattacatwtgtasgctttctctccastatgaacyctwtywtgwatcwggagtctaytgkgtygwrwaawggcttyaycacaktcmytacmytygtrcsgyttgtcytcagtatgcctccgaatgttaccatggtctgaaaaactttatcacattcatt

SEQ ID NO: 42 - DNA, 1058 bp, Rattus norvegicus
aataagcttgcggccgcaaaggttttttttttttttttttttkaaatttcacttctatatttcaaaacctacttgaatacactytgaaacaagagthcaacaaawtaraatatacttmaaatgttgaatatacaaactattatagytcammtctgaacackggwactttcyyyyttaaatgtcaactaaaaaagaaaaagagaaaaaagggagaaaaggaaaaagaatgadaaaggaaacaamcaccaggtatcagasctacctggsgagttcatgcgagcctgaatgtcaaatgacakaagaactgawaccggtgtgtctgcrgacggaaggacggacggacggacggacsgacggcagggtgacttgagcggcgcarggatggtacagtcaagggccaragccaactgttaatctcttcacaagtaagaaaccgacagacttaaactaccatagaaaatgttacatggaaactctataacwwtwytktkytwkktwywwkwtttttaaaatttttcttttaataaaaaasctttrcvcmwsccatyagcytmktkmmagaawkgaaactgaaaattagyctaaggsctttgttttaaaacagcttaagctatgatatatatatatatatattcaaaatcaaaaaataaaacaaaacaaacaaacaaaagcgcactagatcttgctatcctctctctctgtgaagcttttggatcactcagttcacattctagaatacytgtattagcagagtcttcrcatagcaccagttaagtgagcactgcgasagcccagygctaatygctggtatgcatataamawrmawmaaaaaawsctattkgymmcmrtgmcrtcacccatcccaaccccgcmcctctgmmrmctmtgtrmcswcttacaggtgttagtgttccaactcttaktgtaacgggagattgtwgtgagctgcttggkccctttcagtcytttttcttattgagggktcagttgytcttactttaagaggcagttttctgtcagcatctcaatgtgtagttcactttccacttaagcatggg

SEQ ID NO: 43 - DNA, 536 bp, Rattus norvegicus
  misc_feature (456)..(456): n is a, c, g, or t
ttttttttttttttttttttttttttttttttttttttttttttttttttbkgadakcacaaargtttatttagcaaaaagtttcawatgaaaatgtacatgaccwagttcwacatcacaatcaagcacgctttggggagggatgtggacacackgstsaasackggttaracyctttccaaggcttcwaacatgatgatgckgtttccycggatgaccaccatcccgatgttgttckgttgcccackggtcgccatctccamamactcatcaatcacgaggttcawaaaggggtcaaagccccgcagtattccttgtamatgcctgccgccatttaacttcaatgawaacttcttgtccawaaactttywcakttcgssaskkysggctttgswcatggsgaytskbsavtswbswyhsshsmhcrkssamrsagtgmgmggsykmvsdvvcgmnbkckwgbcwsgmtcgwgccgactctactcactttttcagttcgggagggtgggctttgctcatggccctcgtgccgaatt

SEQ ID NO: 44 - DNA, 512 bp, Rattus norvegicus
  misc_feature (20)..(20): n is a, c, g, or t
  misc_feature (28)..(28): n is a, c, g, or t
  misc_feature (427)..(427): n is a, c, g, or t
  misc_feature (442)..(442): n is a, c, g, or t
  misc_feature (453)..(453): n is a, c, g, or t
  misc_feature (487)..(487): n is a, c, g, or t
tttttttttttttttttwwnkwdkgcancbtcahttttattaaawcttgaagtttatcaattyaaacaacrtrkacaagtttaattttatakaacagtttgsaktatcaytaaaattctaacwaktctaagaaatctgcacccctgcctaggaaatcacacascctcccttgagctcctkgaagggatttttgtcctctggaatccccttcastagagggtcttcycyagawctttcttcaatataakctcttacttsttcayaamatttggaaaccawcactctttccagggkcacttccttmktgagctggtccacctccatcttcaactwgkcmttttctgtymggtcctcgatgttgatyaccggsatchyytgtcagggaagykgcykytgggttttckttcaaattgccystsrwvhcshnskcckcamgmachhnskbbsckhrynshdykmwttccacacgccaggcttaagattttanagctacttcataatcttccctaatg

SEQ ID NO: 45 - DNA, 457 bp, Rattus norvegicus
tttttttttttttttttgagttawasaactatttawtakaaataakaaarcattgatacamatataaagacatggccaatatamawggcttacatttakaaaaaatactttaggttaacagcttttcccctgarggttgaccacacaatgttgywyccawaaatattgctttgttctgtctgagttcatcycgtaaaggggagtggcggtggccccggtcatgtgacctgscatgkaggtggmcatctcargtcggsaccgggcttgacaggatgaggaagagaacarcatcagtggggcctccgamaaatctggagaagatttctttcttccaaayatsgaagatacarwgatcaaggacctcaggytggtgatggggacacgagggacaycacatgactgkygcrgtggggtcactggttctyctsgwsycratcccaaacctcttcattctctt

SEQ ID NO: 46 - DNA, 471 bp, Rattus norvegicus
ttttttttttttttkttwayaaaagggkctttwtttataaaaagccaaaggggcccctggagcaacaggacakgaggcaggcmgyttytyasgggtcaggggcatttggacaratgcscttgarkgggggggcsccctccsagtcctytgkgtcaccctgggctgcctcarggacaggkggcactggctcaaaracagggtaagcttcaggggcctcggyttytarcaattytggaacasgctcctccttggtcarctttgggggttcatcartacctcctgcasgkgtgccccctggatytytytyttggsccarttgkgggggctgagtatyttctgtaatcacctctggaggtccarttggtgatccagggcgactgggctggggcgtccccccagggctgggctccgkgcccttttgcagkgaaccttcggaatggaaactctgattgctgttctcatcattgagat

SEQ ID NO: 47 - DNA, 1171 bp, Rattus norvegicus
ttttttttttttttttttwytywtkwcacattcaatatactttatttaaaagtttctttgtataaatttcctaaaaattttaaacattgaatcccacctccaagctccaagacaacagcattgaaaaataatccgccttagaggaccaccaaaaagattctccattatgactttccttgaattctttaakggaggcatttgtcccarcgacgtgcacaggaaaggggyctgatttcttttaattagatcatttgtcagaggacttakaagaaaattgcatcaargtctaatccaggaaactggggycatgadwwskttwracttwkrtttctccatctaagscatgcaactacagaggaatgamccaagcasaawtgtacagagtasctgtgagstyrwgcckatgttctagacacggggtttgcctggcacargcatagcatggaatyccasagggaatgtgaattcataggaatgttcacataaacamcagcagtggctarctattacacartggkccamgtatacsgtagaactgcctggagacsgaragcarggtccacagamacgtttagcaccatatcgacmsktcatgtgcaragggtttcctcccgaggttgagtstcrwkcaaagcatgaaaaggcaccgtgctggggcatctacccagagcttctataaaaaccgagtgagaaatggctgcctcctccttctcccagaggtacgtgttgcccgaaggccttgcttaggatctcgtcagactgataactcaggactacacatcttttcacattcttcctgtgagtggaatctgttctcgttgcccccgcagcctccataccagaatctcttgcaacttttgctctctaagtcatagtgccatagtaatttgaagtcctcacaagtcccagcatctttgggcagcttacagatatctgttttagtgagaaacagtggctctgtgttcaccatcaggttaatggttgaactagatgctcggtgcgctgcctgaagaactggaggctgagttttcttcgtattgaaactcccttggtagatggctctgacttgagactgcaggtaggagaccactacgacatggtacagctgtccagccagcaggcctccgatgacacggtcagtgacagtgaggttttgtctcagaaccaaggc

SEQ ID NO: 48 - DNA, 883 bp, Rattus norvegicus
gctgctgctcctcggctgcggatacctcgcccatgccctggccgaggaagccgagataccccgggagttgatcgagcgactggctcgaagtcagatccacagcatccgggacctccagcgactcttggagatagactccgtaggggctgaggatgccttggagacaaacctgagagcccatgggtcccacactgttaagcatgtgccggagaagcggcctgtgcccatccgaggaagagaagtattgaggaagccattcccgcagtttgcaagaccaggacggtcatttacgagatacctcggagccaggtggaccccacatcggccaacttcttgatctggcccccatgtgtggaggtgaagcgctgcactggctgctgtaacaccagcagcgtcaagtgccagccctcaagggtccaccaccgcagtgtcaaggtggccmaagtggagtatgtcaggaagaagccaaaattgaaagaggtccaggtgaggttagaggagcacctggagtgcgcatgcgcgacctccaacctgaacccagaccatcgggaggaggagacgggaaggcgtagggaatcaggtaaaaagcggaaaagaaaaaggttaaaacccacctaaggcggcccgaccagatgtgaggtgagatgagctggctgccctctcccgggacacggatgtacgtggcgtgtgacattcctgaacatactatgtatggtgcttcattgccaatgtgcgtgcagtctttgttctcctccgtgaaaaactgtgtccgaggacaaagagacagtgtccgtttgttcagtgtgacatcaaagcaagtactgtagcactcggagagacagtgagaaagcttccttgtcacagagagcgaaaacaaaacccc

SEQ ID NO: 49 - DNA, 856 bp, Rattus norvegicus
tttttttttttttttttwagtttwayycagtttatttaaataaggacaaggctacttaaaagactatacatacaaaaatgtacattacaaggtcaaccttttctatactgaattacaaamcttacacaagcatttamgaaaagcacacttaamamcatgtcsaccaattgyagccycycaacaatgctcaaattccacagtastaagtasagaaagttcttccgtakggggatgatttaaycyacyggcagttttacttaatgtaagtttgtaaaaggtcattgytgttgaatgartctytacatcarttttaraactgtctctcaaacttaagtcaagcaaaacacaatttcaaatggaagtttcaattttgaagaattttaataccagcaaacacrgyctatggtagtagckagccactyttccaagtgtctggcavctgcctaaattataaggctactctgsmwmactatgacagcctttgggaagcaatttartgtcctggtgctacaggactccagactgcargatccacacagtggtctatgaccccctcggatgtaggargtttggggtcaraccatcttcaccctcagtgaatggagtaaggtcatagacacaatgcaatctgcaaatctaagtctgaggctcagacctagagaagagaggaagaagagtgggaaagagaccaggatatacaaaataggaaaaaaagaacaaggtggacttgccaatggtagatgcggtgccttctgtacctcaggagcatcccaccgtctctaatgccattcatttgcccgacccaggaataatagcttgcactgggatacagaatccaaagcaacaatactaaccc

SEQ ID NO: 50 - DNA, 1654 bp, Rattus norvegicus
  misc_feature (1139)..(1157): n is a, c, g, or t
tttttttttttttttttaagatgtgtwwkywywttywkwyyttwwwtttwwhtttttwadttakttttattayttttaccattttgacagtttctttttctmaaaggtgatttgaacatgttcacctgtacactttggattcattttttaaccactgtttctctgtggttttttttccacacttgttttcctctcttaagtcaatcttttctctacagcagacaattatacaccttattcctattaaagaagwwktttggtgttmtgatgagcatttcwagtgaaaactagtttttcyavaggtgagaacactgaaacmcawkacttttgttgcaaatgcaasggayaaatttagagttacytgskrycrcaatttcarwywwwwyywwwtkwtkyywttkttsbgkgbcawwscaaawgargamctttaatwagcttttwcmccactgcaaatmcaggamcagtaacccatgacatgcammamaagtaattktgtstttctgacatatttammwsrtratcckramktcammaggtaagagagacacagtytacagamcaagtatgatttgtttcmhyktkcaggttagaaaacgtatgttcttactgcaatctcaagtagcatttagaaagctgactttcccccttctaccttctaaacgagaggatgatttttaaatgtaattgkacacaatcattttcacatggmaataatcacavksaatyarcwacwgtwgtctrattvacwgactgatttcattgccactggtarattttgaacaagggctcctgtagtattgtgggttttagacagggaasataascaggctgactgttaagagccttggtttttagagcgggggagggaacatgcagcggcacrctgggcaggtgccagacttctgaagccagatggacacgcrcggcttgtggaaatagtggtggcatggtagctctgttgccacctcccccttcacatactcgctgcagcagataggacagcacatttcctggcccastgcaccgtgatcttcggtgaccaagatctcaggcagcgcatcaatgctctccttgcttgcaggtgggttagccacttcgacatcarcrgcaagagactccaagtgggcaagggctgtctnnnnnnnnnnnnnnnnnnnctcttcgagagccttgtaggtgaggaactgaggatccacatagragatggcttccgccactcccaggccatctgcaaatccatcawacaggctccagtccacttcaaggtcttcgctcacsctggagtcgtcttccagattgttgtttccgtccagcatgaacatcccaggctgcatcagctcatgagtagactcattatcaccctcgctgctgctttcattctcattgtagcggagccaaggaatttctccttcttccagagaggcctgctcttcttcctgaagagatggctcttgtacttcttcaggatagccmctgysattactgccagcacccgcaaggctcccggctccagcggtgttcacattccctctagcttgctggggttcctgatcttcctttcctgggagaggctcccagctttctccacttgaagactggggttgatccctgcttcggtacttcctgcacaaaacagccatccactctttgtcgc

SEQ ID NO: 51 - DNA, 508 bp, Rattus norvegicus
ccggaatgctctagtttattactatcatatttacatttttattttattttatttttttttgctgmaykdbkkwttttyyttttttycaawaraatttaattcwrgagtgtgagcaggaaccakttaactacattcattgtccamcccccactggtctaaractccaaattcttggcatgtgaatcarctgttgggtagctccgcctcatccctgcsaggcggtaaraccgaccrtggtgcaraggcttcacaccgagggaggggaggctttccgctgcavgaggtattggtgaatgctgtcagcatcccgctttagccaakcagcgttcagcargatattckcacaacactgctggwtggtacsttcsgctgaaggagctgggtgactctcraagaaagccttaacttctccagccattttatcaactgcaaacccctcaactgacagctttatkagtctggatattaaaaacccyycctgktatcsattataaagcctcttcccaat

SEQ ID NO: 52 - DNA, 773 bp, Rattus norvegicus
  misc_feature (253)..(278): n is a, c, g, or t
  misc_feature (664)..(664): n is a, c, g, or t
  misc_feature (730)..(730): n is a, c, g, or t
  misc_feature (733)..(733): n is a, c, g, or t
  misc_feature (735)..(735): n is a, c, g, or t
  misc_feature (737)..(737): n is a, c, g, or t
  misc_feature (742)..(742): n is a, c, g, or t
  misc_feature (755)..(755): n is a, c, g, or t
tttttttttttttttttwyywwkwwyywwwctgataaatgacaattttattttttatgcataaaggkckatgaaaaaccattactagttctwgtaaaactgaacatttcartscarragkdtdrtaagtgtmcgtattaamtaccamtttyyaaagtacagctttaawacarytaacwtgctttttcaatttcagtacavtggrtycamgaccaagaatacagttwcakgcgacaaggctasattacaaattnnnnnnnnnnnnnnnnnnnnnnnnnncttcatcatcttcttcttcacgttttyttttgagtgcgtytgccgactcattggctgkattwtgtgacaccatwttastrgtaataagaatgttttkggacccaattaatgatggattaataagaacattctgaactgctggkgttgcakgaatggragcttttacagcaggrgactgasargmaggcatytgyactgwaaacctstgccctgtgagggacattggaktgcctactttagttgacacaracatggyttgtggagttggtgtgcctagtgkgggagtactaggtctactagaaactgaaccaacacttaaccttggaaccgttattcttcctgcaggartakgtgccttttttygtraagacttaagcctatagttnggagcagtttagcagtatctatcaggtggcaatctaggacctgaatatggcttgatcaatggcaanggngntngattnctttgccttgcantatctaataaaaaatctt

SEQ ID NO: 53 - DNA, 1291 bp, Rattus norvegicus
gttattccaggagtccattacttttaatttatataatttgaaacagcaatctcaatgtttataataaaggactcaacttgaattctaatgaagtatatagaaggcagaggtggttgctacatactgawkwwwwwywwwwyywwwwkyychagtaggaagtactttaaycatttttcytaraaaaaaaaaaaaaaaatccccakacactcaasaamagtttacaamatttcaacaaaaggtackggttgggagkggttaggttwaaatatkgggaakgtgtggmatckgyttcawtacarakggacggdtggsatatgcagtcacaaatgggagatttctagctgcttggccactatcaaaacactwkwwkkwywttttytttwmagyywgtttyccttcckgcwrycyccctawrccacagaaatgccrccatctraagccccrtggkggskggsyyagsctcatyttcccttggggaaggkcamycckgagtcyccakgctttcktcwkcytcyccykgaggbggbhcwtckgkgttcycytccycttcctcyccctccttcttctcargbggcttytcataggccttttctgaaggtgtcacaatcactccatcccaggtagatatttcagargcaagaywdctgrsrtccysctcctgsccaaggatcttcckaaagcctccrtgggagagaattcgaaccagagtctgagctgtgtagcagaccatatcctgytgttctarggtcataactgtgtgtaccctgaagttgccactctcacasgggtcagtgatgcccactgacccwggcargaacagtcctgcagccaraatctgcaagcagcgcctgtaagccacrttcagggccaaaggctgtctgktggggttgttcattacagcrtartgcccaagtaggtmaaggatccmrggtgtragaggctcaaarccaggaaaacgaatccgtaagtcctttascaatctkwtgagaactytaactgtggactgagaascrtyttcttcaaaccagcgggcatgccggatggccgctaaggcactctgcaacaccttgatgtccaaatggagttctgggtccagtttccggagattgggtggcactgttgtaatgagaattttcaccgtagcatcagaagagctaatttcaaagccagtttcattagtcagcatggtcaagacttctgagggatcctgtgcccgtcaggctttccacaactttgttcccaagggcggcaacagcttccaatgttggcagaatctttagtattaccactc

SEQ ID NO: 54 - DNA, 1209 bp, Rattus norvegicus
  misc_feature (1068)..(1087): n is a, c, g, or t
cttgcgggcgctcactttatttttattttttttttttttttttttyttwtthydyytwwdybttttttttyytttyttacaatyttatttayaacaatatctrkgttatttagttgtmaaggaattcagcavaaattattamaacgttcacgtcmccaaaatggggctgcccacttgcccttccttgghgtgccccaattcttcctgghcctcadgggaggggagactgggggasarttacsaaagaatgtgttcagccctavgakccacaragggggcactgkrrargcaaadacctktytggaarggatactgavcatggvcatyccadacdtgcccckwaaagtgggagstggggcttggggtgacttccctcaactaaaaartactcctacctcagctagagscagawattccaracmggktcakcasaraactccacctyyccakaactaacccyaggaaaggaaagctgggacactgsmgccctgtygagtgtcttgtacakgcdaraggctgtgccgccmkmktsccrrrktaagggaacgtatgtggactcstkcmtaccttkgagccacagagmsctccctgccccctcaaggcakcatggggggaggggatgccgaggagcargcagaaaggaaatgcaaagagataatactgkrcttgctcactcacatataaaaagtaawtccttcatttttacatttgtacatccggcagggccggaraagggctggctggggaragggctcattgaaagactcgtgtggcaggggctttctggsswcstscsttggggcagggccctatgctaagggatcccctatctcatyttcaggtccccggcccarcarttctcgcttatcgtccgtgctggccarggartggcggctgccatgaccccccatgtaragcgtggcatacactgggttggykaagwtggtargcttgtcagggtcaagggcaaaatyagcatycaggaggccccccacatcgtcgggctctccaccttcatacatcttgtaggtagggtttccgatttccacattcatggccccattggtnnnnnnnnnnnnnnnnnnnnccttagcccctcggactcgccgcttataccagaacaccacgcctgccaccagcagcagcaggagcagcagcagcagagggatcaggatggaggtcatatgcccaggctgttgctgactgacc

SEQ ID NO: 55 - DNA, 900 bp, Rattus norvegicus
cacgaggactatttgctttctctcccgcacaaaaataaggtgccgtggaacaggttgttcccaaacgctgactccaaagctctggatttactggataaaatgttacatttaaccctcacaagaggattgaagttgaacaggctctggcccacccgtacctggagcagtattatgacccaagtgatgagcccattgctgaagcaccatycaagtttgacatggagctggacgacttacytaaggagaagctcaaagaactcatttttgaagagactgctcgattccagccaggatacagatcttaaattggtcaggtatctagaactttaactatacagktaaccccttagcaaggragaggtggtwtaawacatctctagaaggaaaaagaattcagtttsccctcttcgaktgatagmgcaktcattstgattgcttcatggtgtgaaatgaggacgttagacttcatctttcacagattrtgamgacgtgaaatgaagtascagctctgwgacactgtgacagacatgtgtkttatgggagtgkgattytatgtaagaaaataacycwtgggaatgawcagckwtgwgacatytvttcccaaaaacthtattttacttcatatgacaywytaartactgaaaaattctatcgtgtaacttwtstgvcyttgggactgtgtggytggykttttggttggktgargtwttagggattgaayccaaggcckcytgcatttgagaaaggggaattaatgggagaaggaaagtggtaagaagataacgggtgaatmtgctcagaatacatwatacatgtatgagaatgtcagtgaaacctattattgtgtatamttamtatwtabtaataaaamcatktaaaaataaaaaaaaaaaaaaaaaa

SEQ ID NO: 56 - DNA, 929 bp, Rattus norvegicus
ttttttttttttttttttyycgatckgcttaattkaatgcacaaatctcaraggaaaggtgccactggcattcadaggggctgtgtcagggatggggccggaagggatagggtcwcatgtccatcagtgtcacatctcgtccaatccgtaatcttcctytgggaaatctcccaccgtgacagccgctggsttcacaaaggcrccgtacttggcctggcattcawagtagcgtttcccattcacackgccatcgttttttcmtaawggstcatcatatcggacaccaacccagtagcctggcttraaatctgtgagtcctacawamawgacagtgcccctscvaagggactggccgggtgcccgmacckmacawcggbtccccacararawggcactggcttgggcctcctcctcactgaramgmtgggcagcctctgcctcytgctgggcccggagttcttcattgtacgggcctaacytgctgcgcttcatgaaggatcgaastgwgttctgtskcmgkkmgtaagcttctggtgagatctcgtatttctccactttggacacgtcctcatattctccgarccggacaccactgtggtcaatgacatggattcggcagccatcatccacaggataggagcccagcagtgcatcctcctgatccaacttgctgtagaactggtcgtcagctccatacagctccagttccatgcaggaagcagggctgcccaccaccagttccagtttacacttgaactctgcgatggtgaggctacgactgtatcgcttctccgaacggaagctgttgagggagctgctgatgaaaaccgtcacggtgggcgccgatgtcmccgacacctccatctcgccgmrmcctgtagtggcccgcggtccgcttcagccgtctcacacacgatcygcaagtggga

SEQ ID NO: 57 - DNA, 766 bp, Rattus norvegicus
  misc_feature (134)..(148): n is a, c, g, or t
  misc_feature (309)..(309): n is a, c, g, or t
  misc_feature (663)..(663): n is a, c, g, or t
cggscacgmrgtcccgagtcggagccattamtgycggcavgwsscgcayagykcwgyagccargrkgtgtgacttmascgakgrcyasacckyagaattcaaggaggctttccagsyrykwgrccgaacaggcnnnnnnnnnnnnnnntacasccagtgtggggatgtgatgcgggccytgggccagaaccytaccaaygccgaggtgctcaaggtcytgrggaaccccmwgmkygatgagatgaatgtgaaggtgctsgactwtgrgcackkcytgcccatgctgcagactgtgrccaagaacaaggnycaaggaacytmcgaggaykwkkttgaaggccdtsgtgtrttygrcamagargggaatggcactgtcatgggtgbtkaaawccgtcatgkcvtwgksrywhwkggggrgamgwtgmcmrasgawgaartcgagwtgbtwgtggmggggcatgaggacagcaayggwtgcattawhkwtgaagakcttsyccggatggtghtgaatgsytgaggacawwwamgtgtytbgarcytgcwcmttgyccagtgtsrgattcytgtgtggccccakaggctccvtaatcacagcaccttgcctgkhtggkttshwhtggrtgatgkktgcsttmmsmmaataaaacwtgmysbytgwrnhhmaaaaaaaaaaaaaaamwwcggcggaaatccaagggcctttgaataactgggaacacctttaggtacaccggaattgagggaacaactggcgccagagcaa

SEQ ID NO: 58 - DNA, 576 bp, Rattus norvegicus
  misc_feature (299)..(299): n is a, c, g, or t
  misc_feature (349)..(349): n is a, c, g, or t
  misc_feature (496)..(496): n is a, c, g, or t
  misc_feature (506)..(507): n is a, c, g, or t
  misc_feature (512)..(512): n is a, c, g, or t
  misc_feature (545)..(545): n is a, c, g, or t
  misc_feature (553)..(553): n is a, c, g, or t
ttccgctgkcmyswkkywckkcavsmrrkkcgrssgakskrcrgmvscyvasrtgcaratytkygygaagrccswgrcgggmamrassatmaytsttrdgktcragcccagtgacvccatygagaatgtcrrsvcsargatccargdcamggaaggcrkymcshbkgaccrgcagagrytgatctttgctggcmrrcasbwgraggatgvccrcaccctgtscgabtacaacwtycagaaagwgtbcwscttgyamytkgwgytgsgtyttygcggwggcatvatmragcsgtccyttngycagcttgsccarawgtacaahtktgwcawgawgatbtkycgcaagtgntacgsasgchtgcamcccsgtgcwgwmaaytdycgswagadraagtkysvscacwccaacwwcbtgygccccaagaagaaggtcaaatwsaghtgrsccawacytggcctgtgaccccgggaccaaataaakdscccttccmyygmnhrdddmhvdnnmhrhndwdarmvvmmdaawwamwmwatgckkyytcttnacaaaaanccccaaggggagccccggtccca

SEQ ID NO: 59 - DNA, 504 bp, Rattus norvegicus
ttttttttttttttttttwacawttctaccactttattagatkamaaaaaaccgaagagcacaagcaaacamatgactasggaggacctgaggaaaarccatggcaaaggtcaacaaggacagagatgggaagggaggggcaragtggagccaggtcargasagggactttakgtaggggtcaggtgcctctatttgatgacaatcttctgacgcaaggctcggggcccascgccagggagtggytcggggggtgggggcccggggcccadcgctgadgcagtgggtggtavtccgtgggcartgatgtacwtcttgkacgcctcacggatgatcttgaargctctarcagtggcatagggkatgtyygtaacagggtcccggkacaaagctggacsgtgggtcactgggcasacctyccgaacasggacctttggtggwcgcccttgggggaaccattcttcaaacgtkgcatcatcactgaatgtgatgaaggtacgtgagc

SEQ ID NO: 60 - DNA, 842 bp, Rattus norvegicus
cgcggctttgtccccaggtggaaggatctgttctgcaaaggggacagcaaggtacctttaggctaaaggactcggcgtccagtattctagttgaagatctaaagagaaagccaccttgctgccactatgcctaacttttctggcaactggaagatcatccgatcggaaaactttgaagaaatgctaaaagctctgggggtgaacatgatgatgaggaagattgctgtggctgcagcctccaagccagcagtggagatcaaacaggagaatgatgacactttctacatcaaaacctccaccactgttcgaaccacggagattaacttcargmwcgrggaggaatttgargagcagactgtggatgggagaccytgtaagagtttggtgaaatgggagagtgaaaacawaatggtgtgcgaacagaggcttctgaaggkgkagggccccrrmwymkscwsgagscgagaactgaccaatgatggagagytaatcctgaccatgrcassagrcgacgttgtatgcaccaggktcwacrtccgagagtgagtgcctatgkccaagaacttmttbtggagkccacaaacctccctcccatgtccattttacaaactagctctccccttastcytgagggtcactctmtatgccagagaggggcagmctaccaaagctcagaacccttccatttgcctgstcagaagtcccagctccataccaggatccttcytggaagagactgtctctytggcctstmctctttwtccttgtagtccaagtgatttagaatayytattggtwaattttattaaaatgttktaaratgkaaaaaaaaaaaaaaaaaa

SEQ ID NO: 61 - DNA, 674 bp, Rattus norvegicus
ykkywykwkktttttktkbcawttctatkttytattaaaatacctttttttgmttacagagacaaccaatgaaaatattcacawctatmgatataagtcgtcggkcacgttaaatgaatcaacataractcttgggaatgaacawagcctttasagtctttaaaagatgctttctaagtacagccctttaaaccgcagcccattctcagctctcattctccarwtttttwyttyytttttwtmtatttkggkgcttttttawaatkgwaaatatttgtycaaatatgctaataacagcgctattttctgaaacattacaagttatactttggkgtgtgsacccattcacagmatcctgtgcaaamaaamarwacmtttcrskccaakkcttttcaccttcgcaccttaattatgasywmgtkcmgccctaattaaatgttatggggaaaaaatgttttctcataaatgttatgagaaaaacttgsccataagcccatgtcttgctataggaagcaaatacgtgtaagtttaataacaatttmtggtccacaagscagtgcttgtctctcattggtgctcarggcggaacaggggctgsaccaggacaggtgacagtcccmcctctagaccttaaagtctagtgtttttttggatctggctataagacaaacaaa

SEQ ID NO: 62 - DNA, 906 bp, Rattus norvegicus
gkctcacsgttsgtkctvwttgtrakacctgtwkytcgactctgctgatagcaagatgtcttcaggaaatgcaaawattgggcatyctgctcccagcttcaaagccacggctgwtatgccsgatggacaattcaaagatatcagcctaagtgattacaaaggaaaatatgkkgtattctttttttaccctcttgactttacttttgtgtgtcccacggagatcattgctttcagtgatagagcagaagaatttaagaaactcaactgccaagkgattggagctycwktgrattctcacttctgtcayctggcatggmttaacmcacccaagaamcaaggaggattgkgacccatkaacaykmssttggtatcagatcccaagcgcrccattghtcaggattmtggagtcttaaawgctgatkaadgtatytcyttyargggcctstttawtattgatgatwaaggkatscttcgccagatamcawtaaatgrtcttyctkdkgvccgyyctgtggrtgagatthtrrgamtagkhmaggcyytymagttyahwgvmaaamatggtgaagtgtgcccagctggbtggaaacctggcagtgataccatcaagcmtgatgtcmatargrgtaaagrgtatytytstaagcagaagtgagcaytggwmcagttttytggcakacagctttgrgcagccmgamgaaatttgtactbtacacatsacgtkgtgtgattscagawwagcctttcctacaagggctaggggtggttagcctttcttccactattggtaaggrgcagaccatyttatatcmgtcacagaaaccaacckgtwaattctctctytctyhytttttttyyyytaagtatytattaaacgtsmmtkctgtgaaaaaaaaaaaaaaaaaa

SEQ ID NO: 63 - DNA, 2881 bp, Rattus norvegicus
gttcttagtagtactatcaataaccaggtagcagtcggctagctccaagtgactaaacaaagcttcagctcgcaggctttctgattagtccaactagccatggtgagggagtaacaagaagaacacaaatggaagccggatgcatcgcaacactcgacactgcaaatggatatagacaagctgaacataaccttgcttcggatcttccgccaaggagtagctgcagccctgggactcttacctcagcaagtacacatcaaccgcctcattgaaaagaagagccagattgagttgtttgtgtctcccggaaaccggaaaccaggagagccgcaggccctgcaggctgaggaagtactgcgttcccttaatgtggatgttttgcgtcagagtttaccacagtttggaattatagacgtctcccctgagaaaaatgttttacaagggcagcatgaagcggacaagatctggagcaaagaaggcttttacgccgtcgtcatcttcctcagcatctttatcattatagtaacctgtttgatgatcatttataggttaaaagaaaggcttcagctttccttacgacaagataaagagaaaaaccaggagatccacctatcgcccattgcactccagcaagcacaatcggaggccaaggcagcccacagcatggtccagcccgaccaggcgccaaaggtgctgaatgttgttgtggaccctcaaggccaatgcactcctgagattcgaaacaccgcctccacttctgtctgcccttctcccttcaggatgaagcccataggactccaggagcgacgaggttccaatgtatctcttacactggacatgagtagcctgggcaacgtggaaccctttgtggccgtctccaccccccgggagaaggtagccatggagtacctgcagtcagccagccgagttctcacaaggccacagctgagggacgtcgtggcaagttcccacctgcttcaaagtgaattcatggaaataccaatgaactttgtggatcccaaagaaattgatattccacgtcatggaactaaaaatcgttataagaccattttgccaaatcccctcagcagggtgtgcttaagaccaaaaaatataactgacccattgagtacttacatcaatgctaattacattcggggctacagtggcaaggagaaagccttcattgccacacagggccccatgatcaacactgtgaatgacttctggcagatggtttggcaagaagacagtcctgtgattgttatgatcacgaaactcaaagagaaaaatgagaaatgtgtgctctactggccagaaaagagagggatttacggcaaggttgaggttctggtcatcggtgtcaatgaatgtgataactacaccatccgcaacctcgtcttgaagcgaggaagtcacacccaacatgtgaagcattactggtacacttcatggcccgatcacaagactccagacagtgcccagccccttctgcagctcatgctggacgtagaggaagacagactggcctctgaaggccgagggcctgtggttgtccactgcagtgcagggattgggagaaccggatgtttcatcgctacatccattggctgtcaacagttgaaagaagaaggagtcgtagatgcactaagtatcgtctgccagcttcgtgtagacaggggtggaatggtccaaaccagtgagcagtatgaatttgtgcaccacgctctgtgcctgttcgagagcagactttcgccagaaacggtccagtgactctgaagatctaccagagcgtcaatctatcacgggtgattcgtcaagttacctactgagggctccgagaaggagctccccacgatggatgaggaggctctaaagccagcctgaggcgtggattgtggaagctatggtaacttgaaagattgccacctttgtgtataggactgtgttctaggcatccccctagttactccgaaggacctgtgctgatggaggtgtgacagtcctcatgcagcctgaggaggattctgttttgtctgtgtcgactctcacacagaacctgtatgtgtaatattcagagtctgtgcttatggtgactggaggagctgcggaagatatcgttatcctgtgttagatgctttaatgttcacaaagcctgtcttgtgactggactgtcagctgttcaactgttcctgtattaagtgctattacctatctcagttaccagagtcttgctgctaaagttgcaagtgaccgacaatggatttttaaccatgacgttttttgtttttgaaaaaaaaaaawmaaargcagtaactattttatatggagatgtgtcttgattatctctaataagtgtgtatttatagtatctcctatggatcaattacagagcacaatgattgtcactggatatatatgtatatgtacattacaggtatatgtasgcatatatattctattattaagcatagaggtagctcstgttttacaactctaastactatatttctacattgtgacttgttttactttaaaaggggataaacaaatttatagtaactataaagtatcaataattttaaatactcatctctcttttactaagaagggatttttgaatatagtgtctacttggtttctctctcccagtaagaagcaggtgcctttggggatgctccaacctgtttcatccccraaagtttttctgaggacaccgtcatgcacgcatgaccttaaatttctaaaaggttttcttcctcaagagaccaatgaaggcaagataaccgcactcagcaaacatgagatgttctgytcagatgtgaattttcaatgcagcaaagttgactttcgtactcccaataaatgactcttaacagcc

SEQ ID NO: 64 - DNA, 2485 bp, Rattus norvegicus
gaattcagtcacggactttatgcctttgaaagttgtcaccattttattgtcaccctccatcttaaccactgccttgaccttttccccagtcatggtctccagttcgcactcctcccccaaggtgaactcattgtggatcacckwggacccrkarktgatggtggctgagggtggctgactgaaaaacggacttccagatttcttactcttccacaagggccctcatcacgtgcgcaggtctctaaccttactctctgaaaggatggcttgccttcttcctgctgctcgacttcctgcaggctttctcttcttagtgctctggggctcagttctaggtgacaagctgctggtggtcccccaggatggcagccactggcttagcatgaaggagatagtggagcacctcagtgaacgcggacacgacattgtggtgctagtgccagaagtcaatttgcttttgggagaatccaaatactacaggaggaaaagcttyccggtcccctacaacctagaagagttrcggacccgctatcgctcctttgggaacaaccactttgctgccagttcccccctgatggctcctctaagagagtacaggaacaacatgattgtcattgacatgtgctttttcagctgccagagcctcctgaaggactcggccaccctcagcttcctcagggagaaccagtttgatgctctgttcacagacccggccatgccctgtggtgtgatcctggctgagtatctcaagctgccttccrtctacctcttcagaggtttcccatgctctctggagcacatgcttggtcaaagcccaagccccgtatcctatgttcccagattctacaccaaattctcagaccacatgacatttccccaacggctggccaacttcattgctaacatcttggagaactacctttatcattgtctgtactcaaagtatgagatccttgcctmmgacctcctcaagagagatgtgtccctacctgccttacaccagmactctstgtggctgttmcgrkrkgaytttgtgttygamtacccsmggccmrtcatgccyaayatgrtcttcattggaggsaymaactgyrwsawsaagrrgmmcctstctcaggaatttgaagcctatgtcaacgcctccggagaacatggcatcgtggttttctctttgggatccatggtctcagagattccagagaagaaagcgatggaaatygctgaggctttgggcagaattcctcagacgstcctgtggcgctacaccggaactagaccatcgaaccttgcaaagaacactattcttgtcaaatggctaccccaaaacgatctgcttggtcatccaaaggctcgggcgttcatcacacactccggttcccatggtatttatgaaggaatatgcaatggggttccaatggtgatgatgcccttgtttggtgatcagatggacaacgccaagcgcatggaaactcggggagctggggtgaccctgaatgtcctggaaatgactgccgatgatttggaaaacgcccttaaaactgtcatcaataacaararwwwmaarraraacatcatgcgcctctccagcyttcmcaaggaccgtcctatcgagcctctggacctggctgtgttctgggtggagtacgtgatgaggcacaagggggcgccacacctgcgccccgccgcccacgacctcacctggtaccagtaccactccttggacgtgattggctttctcctggccatcgtgttgacggtggtcttcattgtctataaaagttgtgcctatggctgccggaaatgctttgggggaaagggtcgagtgaagaaatcacacaaatccaagacccactgagaagtggcaggaagtgaaggagaagtattagtcccttatccaatcagttgaaacttggaaacaagtgttaaatccatgttgcttttattagggaaataattcaccatacactatacacccagaacawttttttttctttttctttttttcggagctggggaccgaacccagaacatyttctttttttaaataaaaacaaycyaatygcyggccacacccatcagggaagatactggaatatgtgatctgtttctccagtatcttcagtctggacaatgactgccatctgttggtaacttacagaaagtttagtgttytgccytcagtgacagcaccacagtttcccttactcctgtcagctaatggcttcctcccctggattctcagaccagtgtggccttcccagtgttagtcattcctcactgtgctcatgttttgtgggtgcacggcctttgagctttgggagaaaagaagatgaggctgtgacactggtggccctgtgtttgagataataattattgcttgtctctgaatttgatgaaaactgaartacattctaaagaaagtatgtcttctattgtgttcccaaaccaagaacttgtyaataaattcatataaattgtggaattc

SEQ ID NO: 65 - DNA, 1323 bp, Rattus norvegicus
  misc_feature (1243)..(1243): n is a, c, g, or t
  misc_feature (1287)..(1287): n is a, c, g, or t
ccgaagcgtccagctgccsgggaccgatccccggtgtatggcgccgcaggaaacggctcccgggcccagataaagggccacctccgcagctcttggccgagcgtaagatmccctgctccgagaatggctaccactcgatatgaacccgtggctgaaattggtgtcggtgcctatgggacggtgtacaaagcccgagatccccacagtggccactttgtggytctcaagagtgtgagagttcctaatggaggagcagctggagggggccttcccgtcagcacagttcgtgaggtggccttgttaagaaggctggaggcctttgaacatcccaatgttgtacggctgatggatgtctgtgctamttcccgaactgatcgggacatcaaggtcrmcttagtgtttgagcatatagaccargacctacggacatacctggacaaagcacstmcgsygggcwtgcskgttgagaccattaaggatmtgatgcgccagtttctaagcggcstakatttcmttcatgcaaactgcattgttcrccgggacctgaagccagagaacattctagtgacamgtarkgggacagttaagctggccgactttggcctagccagaatctacagctaccagatggccctcacgcctgtggttgttacgctctggtaccgggctcctraagttsttctgcagtctacatatgcaacgcctgtggatatgtggagtgttggctgtatcttcgcagagaygkywcgmsrsrarsctctyttctgtgggaactctgaggctgaccagctgggcaaaatmtttgatctcattggattgcctccaraagacgactggcctcgaraggtctctmttcctcraggagccttttcccccagaggacctcgsccagtgcagtcagtggtgccggagatggaggaatctggagcgcagttgctgctggaaatsctgaccyytaatccacttaagcgaatytmtgccttccgagcchtgcagmamtbtwacytgcmcaaggrggaaagtbacccggaktkaggaragggrhtbccttttccagtttccvgamgbtgtgtggaaagawccttgbtgaagtsgcagccthtgccttcccctraggvtatggagartcctcmggtttagcswwaamtgacaattccctacctctccttatgaggtttaccccacccccacccycstgtttbthtacactaaagggcaggcwwtawmwrwmwwmwwmmmwmmnwrawttataktgggatcttttttrtacaggaaaacraaacadrnmawvraaddawrrwmwwwaaaaaaaaaaaaaaaaaa

SEQ ID NO: 66 - DNA, 384 bp, Rattus norvegicus
ggtccagmmckwggtgaaaggaaatttttatcgacatggcaaytgaaytggasaarrccttgagcaacgtyrytgargtyyassacamytawyyhrsyakrrraggkaaycmccatgccmthtacagggatgacttcaggaaaatggtcaytactgagtgccctcagtttgtgcagaataaaartacsgaaagcttgttcaaagaattggacgtcaatagtgacaacgcaattaacttcgaagagttccttgygttgrtgataagggtgggcktggcagytcataaagacagccacaaggrgtaacagagcttytggyctggggytgggcccttggatatgtytacagaataaagtcgtcatatcttaaaaaaaaaaaaaaaaa

SEQ ID NO: 67 - DNA, 1485 bp, Rattus norvegicus
atggttcactccagcatgggggctccagaaataagaatgtctaagcccctggaggccgagaagcaaagtctggactccccgtcagagcacacagacactgaaagaaatggacccgacattaaccatcagaacccccagaacaaagcgtccccattctctgtgtccccaactggccccagcaccaagatcaaggctgaagaccccagtggtgattcagccccagcagcacccccgcccccccagccggctcagcctcatctgccccaggcccaactcatgttgacgggcagccagctagctggggacatacagcaactcctccagctccaacagctggtgcttgtccccggccaccacctccagccacctgctcagttcctgctgccacaagcgcagcagagtcagccagggctgctaccaacgccaaatctattccagctacctcagcaaacccagggagctctcctgacctcccagccccgggctgggcttcctacactccatccgggtcctcgatcctgcatcccatccacctgcccaccttaccaggctatgactcgccccacgctgcccgacccgcacctctcacacccgcagccctcgaaatgcttggagccaccatcccacccggaggagcccagtgatctggaggagctggaacagttcgctcgcaccttcaagcaacgccgcatcaagctgggcttcacacagggtgatgtgggcctggccatgggcaagctctatggcaacgacttcagccaaacgaccatttcccgcttcgaggcccttaacctgagcttcaagaacatgtgtaaactcaagcccctcctggagaagtggctcaacgacgcagagactatgtctgtggattcaagcctacccagcccaaaccagctgagcagccccagcctgggtttcgacgggctgccggggcggagacgcaagaagaggaccagcatcgagacgaatgtccgcttcgccttagagaagagtttcctagcgaaccagaagcctacctcagaggagatcctgctgatygcagagcagctgcacatggaaaaggaagtgatccgcgtctggttctgcaaccggcgccagaaggagaaacgcatcaacccttgcagtgcggcccccatgctgcccagcccgggaaagccgaccagttacagcccgcacctggtcacaccccaagggggcgcaggaaccttaccattgtcccaagcttctagcagtctgagcacaacagttactaccttatcctcagctgtggggacactccaccccagccggacagcaggagggggtggcggtgggggcggagccgcgccccccctcaattccatcccctctgtcactcccccacccccggccaccaccaacagcacaaacccgagccctcaaggcagccactcggctatcggcttgacgggcctgaaccccagcgcaggccctggcctctggtggaaccctgccccttaccagcca

SEQ ID NO: 68 - DNA, 4703 bp, Rattus norvegicus
  misc_feature (2873)..(2891): n is a, c, g, or t
tttttttttttttgagaaaagggaatttcgtcccaaataaaaggaatgaagtctggctccggaggagggtccccgacctcgctgtgggggctcgtgtttctctccgccgcgctctcgctctggccgacgagtggagaaatttgtgggcccggcattgacatccgcaacgactatcagcagctgaagcgcctggaaaactgcacggtgatcgagggcttcctccacatcctgctcatctccaaggccgaggactaccgaagctaccgcttccccaagctcacagtcatcaccgagtacttgctgctgtttcgagtggccggcctcgagagcctgggagacctcttcccgaacctcacagtcatccgtggctggaaactcttctacaattacgcactggtcatcttcgagatgaccaatctcaaggatattgggctttataatctgaggaacattactcggggggccatcaggattgagaaaaacgctgacctctgttacctctccaccatagactggtctctcatcttggatgcggtgtccaataactacattgtggggaacaagcccccaaaggaatgtggggacctgtgtccagggaccttggaggagaagcccatgtgtgagaagaccaccatcaacaatgagtacaactaccgctgctggaccacaaatcgctgccagaaaatgtgcccaagtgtgtgtgggaagcgagcctgcaccgagaacaatgagtgctgccacccggagtgcctaggcagctgccacacaccggacgacaacacaacctgcgtggcctgccgacactactactacaaaggcgtgtgcgtgcctgcctgcccgcctggcacctacaggttcgagggctggcgctgtgtggaccgggatttctgcgccaacatccccaacgccgagagcagtgactcagatggcttcgtcatccacgatggcgagtgcatgcaggagtgtccatcaggcttcatccgcaacagcacccagagcatgtactgtatcccctgtgaaggcccctgccccaaggtctgcggcgatgaagaaaagaaaacgaaaaccatcgattctgtgacgtctgcccagatgctccaagggtgcaccattttgaagggcaatctgcttattaacayccggcgaggcaataacattgcctcggaattggagaacttcatggggctcatcgaggtggtgactggctacgtgaagatccgccattcccatgccttggtctccttgtccttcctgaagaaccttcgtctcatcttaggagaggagcagctagaaggaaactactccttctatgtcctggacaaccagaacttgcagcagctgtgggactggaaccaccggaacctgaccgtcaggtcagggaaaatgtacttcgctttcaatcccaagctgtgtgtctctgaaatttaccgaatggaggaggtgacaggaacaaagggacggcagagcaaaggagacataaacaccaggaacaacggagagcgagcttcctgtgaaagtgatgttctccgtttcacctccaccaccacctggaagaaccgcatcatcataacgtggcaccggtaccggccgccggactaccgggatctcatcagtttcacagtctactacaaggaggcaccctttaaaaacgtcacggaatacgacgggcaggatgcctgtggctccaacagctggaacatggtggacgtggacctgcctccgaacaaggagggggagcctggcattttgctgcatgggctgaagccctggacccagtatgcagtctatgtcaaggctgtgaccctcaccatggtggaaaacgaccacatccgtggggccaaaagtgaaatcttgtacattcgcaccaacgcttcagttccttccattcctctagatgtcctctcggcatcaaactcctcctctcagctgatcgtgaagtggaaccccccaactctgcccaatggtaacttgagttactacattgtgaggtggcagcggcagccgcaggatggctatctgttccggcacaactactgctccaaagacaaaatacccatcagaaagtacgccgatggtaccatcgatgtggaggaggtgacagaaaatcccaagacagaagtctgcggtggtgataaagggccgtgctgtgcctgtcctaaaaccgaagctgagaagcaggctgagaaggaggaggctgagtaccgtaaagtctttgagaatttccttcacaactccatctttgtgcccagacctgagaggaggcggagagatgtcctgcaggtggctaacaccaccatgtccagccgaagcaggaacaccacggtagctgacacctacaatatcacagacccggaagagttcgagacagaataccctttctttgagagcagagtggataacaaggagaggactgtcatttccaacctccggcctttcactctgtaccgtatcgatatccacagctgcaaccacgaggctgagaagctgggctgcagcgcctccaactttgtctttgcaagaaccatgccagcagaaggagcagatgacattcctggcccagtgacctgggagccaagacctgaaaactccatctttttaaagtggccagaacccgagaaccccaacggattgattctaatgtatgaaataaaatacggatcgcaagtcgaggatcagcgggaatgtgtgtccagacaggagtacaggaagtatggaggggccaaacttaaccgtctaaacccagggaactatacggcccggattcaggctacctccctctctgggaatggktcgtggacagatcctgtgttcttctatgtcccagccaaaacaacgtatgagaatttcatgcatctgatcattgctctgccggnnnnnnnnnnnnnnnnnnnggggggcctggtaatcatgctgtatgtcttccatagaaagaggaataacagcagattgggcaacggggtgctgtacgcctctgtgaaccccgagtatttcagcgcasckkatgtgtacgtgcctgatgaatgggaggtagctcgggagaagatcaccatgaaccgggagctcggacaagggtccttcggkatggtctaygaaggagtggccaagggcgtggtcaaggacgagcctgaaaccagagtggccatcaagacagtgaatgaggctgcaagtatgcgtgagagaattgagtttctcaacgaggcctcagtgatgaaggagttcaactgtcaccatgtggtccggttgctgggtgtagtatcccaaggccagcccaccctggtcatcatggaactaatgacacgtggcgatctcaaaagttatctccggtctctaaggccagaggtggagaataatctagtcctgattcctccgagcttaagcaagatgatccagatggctggagagattgcagatggcatggcctacctcaatgccaacaagttcgtccacagagacctggctgctcggaactgcatggtagctgaagatttcacagtcaaaattggagattttggtatgacacgagacatctacgagacggactactaccggaaaggcgggaagggcttgctgcctgtgcgctggatgtctcccgagtccctcaaggatggcgtcttcaccactcattccgatgtctggtcctttggggtcgtcctctgggagatcgccactctggctgagcagccgtaccagggcctgtccaacgagcaagttcttcgtttcgtcatggagggcggccttctggacaagccggataactgccccgatatgctgtttgaacttatgcgcatgtgctggcagtacaaccccaagatgcggccctccttcctggagatcatcggaagcatcaaggatgagatggagcccagtttccaggaggtctccttctactacagcgaggagaacaagcctccagagccggaggagctggagatggagctggagctggagcccgagaacatggagagcgtcccgctggacccttcggcctcctcagcctccctgcctctgcctgaaagacactcaggacaywmggcygagracggccctggcgtgctgsttctccgtgccagttttgatgagagacagccttacgctcacatgaatgggggacgcgccaacgagagggccttgcctctgccccagtcctcgacmygmkgatcctcgacccsgaagcacgtgcaracagtaacgtgtgtgtgtgtgtgcgtgcgtgcgtgtgtgctcactcggtgggcggaggggggagcagsttgtaacaatctattcacaagcctcctgtatctcrrtggatcttcakaactgcccttgctgcccacgggagtcggyttytctgcagtaaacacacttgggaccttccttttttcaatatgcaagcagctttttttatttccctacccaaacccttaactgacatggsyctctgcaaaccttaatgacagctcttaatmgcaacaggacactcsakaattgagtctcctcattmtytgccttttctmtmtthtgccttccctctctctcctctcccttcccacttccaggctytcctctcttttctccgcttcccagtggaaagcccagcggggaagcctttatttattttttttttaaatcaaaytgacttaatggctgccctggggctcctcatcacacctgcctgacmccatrggtctttmcaaaaaaraaarraaaaaaammaaaaaaaa

SEQ ID NO: 69 - DNA, 2012 bp, Rattus norvegicus
  misc_feature (473)..(514): n is a, c, g, or t
  misc_feature (1296)..(1313): n is a, c, g, or t
atctctcccaggggctgtggactgctggctttctgttgataccttagagatgcagcggcttttggctccagcaaggcgggtcctgcaagtgaagagagtcatgcaggaatcttcgctctcacccgctcacctgctccccgcagcccagcagaggttttctacaatccctcctgctcccctggccaaaactgatacatggccaaaagatgtgggcatccttgccctggaggtctactttccagcccaatatgtggaccaaactgacctggagaagttcaacaatgtggaagcagggaagtacacagtgggcttgggccagacccgtatgggcttctgttcggtccaggaggacatcaactccttgtgcctcacagtggtgcagaggctgatggaacgcacaaagctgccatgggatgccgtaggccgcctggaagtgggcacggaaaccatcattgacaagtccaaggctgtcnnnnnnnnnnnnnnnnnnnnnnnnnnnnnnnnnnnnnnnnnngacatcgagggcatagataccaccaacgcctgctatggtggcactgcctccctcttcaacgctgccaactggatggagtccagctactgggatggtcgctatgccctggtggtctgtggtgatatcgcagtctacccaagtggtaacccccgccccacaggtggtgccggggctgtggcaatgctgattgggcccaaggccccgctagtcctggaacaagggctgaggggaacccacatggagaacgcctatgacttctacaaaccaaacttggcctcagagtatccactggtggatgggaagctgtctatccagtgctacctgcgggccttggaccgatgctatgcagcttaccgcaggaaaatccagaatcagtggaagcaagctggaaacaaccagcctttcaccctcgatgacgtgcaatatatgatcttccacacacccttttgcaagatggtccagaaatccctagctcggctgatgttcaatgacttcctgtcatctagcagtgacaagcagaacaacttatacaagggtctagaggccttcaagggtctaaagctggaagaaacctacaccaacaaggatgttgacaaggctctgctgaaggcctccctggacatgttcaacaagaaaaccaaggcctccctttacctctccacaaacaatgggaacatgtacacctcgtccctctacgggtgcctggcctcacttctctcccaccrmtctgcccaagaattggccggctccaggattggagccttckcctacggctcargctnnnnnnnnnnnnnnnnnncatttcgagtgtccaaggacgcttccccaggttcccctctggagaagctggtgtctastgtgtcagatctgcccaaacgtctagactcccggagacgcatgtcccytgaggaattcacagaaataatgaatcagagagagcaattttaccacaaggtgaacttctctccccctggtgacacaagcaacctcttcccaggcmcttggtaccttgwacgagtggatkagatgcmccgcakaamakrkgcccggsgtcycgtctaakgagrccamtccatwcaaccattcyccggkgaaaraatgtgagcagagccgytacccaaacggmttccmcttaaaattccacccacagcagtgaacggtgaatagmcmcagcgaccccatargatctgctyygcggtgaargscctccctctgtggatcctgggtgaccctccctgaagcagtgagcmccmcaggttytgctgtggmccakagcccycctgwggaragsgwgaaagamagksbagycgctswccyssavsgmtacrgaccttycccmcagbytsgsadycgsccghtwkykgcagcttattrtcmgmctstsskcymtcatarttcatgctcgkttcttawagtttmccgagaatktctaaaatwttgbatctaaacttttaatatggcgattwaamsgrvmsmasgraaaaaaaaaaaaaaaaaa

SEQ ID NO: 70 - DNA, 2990 bp, Rattus norvegicus
ggcggcggcggcggcgcggcgcagggcgcggggcggcatggccaccaccgcgcagtatctgccgcggggccccggcggcggagctgggggcaccgggccgctcatgcatcccgatgccgccgcggcggcggcagcggcggcggcggccgagcggctgcacgcgggggccgcgtaccgcgaagtgcagaagctgatgcaccacgagtggctgggcgcgggcgcgggccaccccgtgggcctagcgcaccctcaatggctacccacgggaggaggcggcggcggcgactgggcgggcggcccgcacctggaacacggcaaggcaggcggtggcagtaccggccgagctgacgacggcggcggtggcggaggtttccacgcccgcttggtgcaccaaggggcggcccacgcgggcgcggcatgggcacaaggcggcacagcgcaccacttgggccccgccatgtcgccgtcgcccggggccggcgggggtcaccagccccagccgctcgggctgtacgctcaggcggcctaccccggtggcggcggcggcggcctggccgggatgttggcggcgggaggcggcggcgcgggacccggcctgcaccacgcgctgcacgaggacggccacgaggcacagctggagccgtcgccaccaccgcacctgggcgcacacggacacgcacacggacatgcacacgcgggcggcctgcacgcggcggcggcgcacctgcacccaggcgcgggcggtggtggctcgtcggtgggcgagcactcggacgaggatgctcccagctccgacgacctggagcagttcgccaagcagttcaagcaacgacgcatcaagctgggcttcacccaggccgacgtggggctagcgctgggcaccctctacggtaatgtgttctcgcagaccaccatctgccgcttcgaggccctgcagctgagcttcaagaacatgtgcaagctcaaaccgctgctcaacaagtggctggaggagaccgactcgtccagcggcagccccaccaacctggacaagatcgcggcgcagggccgcaagcgcaagaagcgcacgtccattgaggtgggtgtcaaaggcgcgctcgagagccactttctcaagtgtcccaagccgtctgcgcacgagatcaccggcctggccgacagcctgcaactggagaaggaggtggtgcgtgtctggttctgcaaccggcggcagaaggagaagcgcatgacccccgcggccggcgcgggccacccgcccatggacgacgtttatgcgcctggggagctggggcctggcggaggcggcgcgtcgccaccctctgcgcccccgccacccccgccggccgcgctacaccaccaccatcaccacacactacccggctccgtgcagtgaccctgcggactgggttccccgccggcgcagcggtgcctccggcgcgcagccagcgcgcgcggcctggactctttttgttgtttattcggttgctttggattttacaaaaagaaaaaggarraaaaaaaaaaaagcccagaaacttttaaacaaaaccaaacacccgggaccgacccctctctctggcgagcggcgaaaggcggccgagagsstgtgttgcccgagcccagggagagagcagcgaagatccagaatgcgccaactcactctgggcgccctgcactgcctgtctccctatccccatcccctcgacgacccccgcccctgcccccgggctgttcggggccggatcccggcagcggcctccccacagcgaaaggtaacgcggtgcgggattagggaytccccgggagaatggacgaaaagaggagagtccccagcagctctcccgggcgcggactccctgtagcctgcaggtcacgggtggggggctgtcactttattctttccgcgcctcttctcgcacctggacgcgccccaccccctcaccttttctccgggcttggttttttacggtttttatttattcgtggagcctctcggctcctggggtccttctaactccgcccgcgcccttaatttaaatcgctgtatactgtatttatcggggccccagaggggaggccgcgagagccgcatctgtgtataaaagcaggaaatagccaaagctttaatctagcctaatttattttccctttctcttcccctctcctccttcaagaacgcaaaacaaaaacaaaaaaaaactaacaaaaaaaaattttttgagtgttcatttttcgtttcgttttaccagagccctcggctcggttcctggcctagcagagagggtctgcgctcccacgcacacccgggtgggaaggggcatcttcacccgcaagatcgagcgcgcaccgggccactgcttccycgmcggccmtkmmytccwsgmsktaacgaacgaaacttggaaaagttggaactattttttaactagctgtagaaataaaccgttcccccaagaaccttccgcctgtttccctaccgcttccccctgctctctttccagcccccgcgggatgcaaggatgctgggggaaccctggggagaaactctccaaatttggggtgaggtgggaaccatgtaaatatgtgagatatgtacacaatggcgggggggaagaaacactttgtgcttggtttttattttttggctttctgggttgttctccctccccaccctaaagggttttgtatgcccgactaaaccgaaaaagatattttaatatggtttcmtaatttctgacccatctctatttattttctggatgtgtttggagcttccccccttcaccatttcttcatctgtttcttaaggtttgagcgtaatttttttttwaattttttgttattctcagaaaaawrwwwwrrwmmattctctttgtatctttattgcaaaaaataataataatgtagactgggaagttccctttatatttatgttatagtaaatattttattactcacataaamawrwammmmarraaaaaaaaaaaaaa

SEQ ID NO: 71 - DNA, 3518 bp, Rattus norvegicus
gtcgggcagcagcggcgccgggtcgtttccgcggggctctcgcttttaggggagccgggcctccgtcgctactgcgcaccccatctcccgccccgctgggtttttccgcaggatttccctaccgtcccctccccagcaccatgcccccacccgctggccgctgacggccctctgcgccggcccggctcgggcctgaggggggacccctagccgcccgctatggatccaggctccacggaccttggccttcccgctgagcgtaccccggattccccggcgggatccagttgatttgcttggctcctgactgaggctcgggctctggttttccttcgcttcacccctacccccctctcggagctcgcagccggagggggcttcgcggggccgcgcagccccgcgtccccgcccccggccatggggctgtgaggtggccgcccccgggccgagatgccccccggggggagcgggcagggggggtgcccgcgccgcccccccgccctggccgggcccctgccgccaccgccgccgccgccgccgctgccgcttctgctggggctgctgctgctgctgggggcagctgagggggcccgggtctcgtccagcctcagcaccacccaccacgtccaccacttccacagcaagcacggcaccgtgcccatcgccatcaaccgcatgcccttcctcacccgcagcgggcacgctgggaccacatacatctttgggaaggggggagcgctcatcacctatacatggcctcccaatgaccgacccagcacaaggatggaccgcctggccgtaggcttcagcacccaccagcggagcgctgtgctggtacgcgtggacagtgcctccggcctcggggactacctgcagctgcacattgaccagggcactgttggggtgatttttaatgtgggcacggatgacattacaattgatgagcccaacgccatcgtgagcgacggcaaatatcacgtggtgcgcttcactcgaagtggtggcaatgccactttgcaggtggacagctggccagtcaacgagcggtacccggcagggaactttgataacgagcgcctggcgattgctagacagagaatcccctaccggcttggtcgagtagtagatgaatggctgctcgacaaaggacgccagctgaccatcttcaacagccaggctgccatcaagatagggggccgggatcagggccgccccttccagggccaggtgtccggcctctactacaatgggctcaaggtactggcgctggccgccgagagcgaccccaatgtgcggaccgaaggccacctgcgcctagtaggggaagggccgtccgtgctgctcagtgcagagaccactgccaccactctgctggccgacatggccaccaccatcatggagaccaccaccaccatggccaccaccactactcgccggggccgctcccccacaatgagggacagcaccacccagaacacagatgaccttctggtggcctcggctgagtgtccaagtgatgatgaggacctggaggagtgtgagcctagtactggaggagagttaatattgcccattatcacggaggactccttagacccccctcccgtggccacccggtcccccttcgtgcccccgccccccaccttctacccctttctcacgggcgtgggtgccacccaagacaccctgcctccgcccgccgcgcgccgcccgtcctccgggggcccgtgtcaggccgagcgcgrcgacagcgastrcsagsarcccgwsgargsctcgkrcywmgsswccrgrgmsgkmwttgacwycagmctcscccccacggacgaygaggactytyayhscrccttccccttgkwcacggaccgcrccaccctcctgtcaccccgcaagccygckccccgacctaacctcaggacagatggggccacgggcgccmccggggtgytacttgcgccctccgccccagcccccaacctgcccgcgggcaaaatgaaccaccgagacccactgcagccgctgctggagaacccacccctggggcctggggtccccacggccttcgagccgcggcggccgcctcccctgcgccccggcgtgacctcagtccccggtttcccccgtctgcccacagccaaccccacgggtccgggggagcgcggcccgccgggcgcggtggaagtgatccgcgaatccagcagcaccacgggcatggtggtgggcatcgtggcggcggcggcgctctgcatccttatccttctctacgccatgtacaagtaccgcaaccgcgacgagggctcctaccaagtggaccagagccggaattacatcagtaactcggcccagagcaatggggcggtggtgaaggagaaggcccccgctgcccccaagacgcccagcaaggccaagaagrrcrwagwywwakwktrktrsgkctgrgcassmagkcsrggywyygmgsyccactgccagctgctcctcccgggaaggcccgggaggagggtgcggccctctccctgcagggggatctggggaccctctmcccggctgcctcaggcttctcccacgaagaggaaacgcaaaamgaaaaggaatataactactacgtgctcatccccttccctcccactgccctcggcgccgcactgtcagctctggggctggctgtcctccgcwcwgcgmykgtsaggcagkgcacgtgctcacagccctgggttgatttattttttaaggggcgtagttttattttggtggggctgggcgggaaggaaggctggggttttgtaaagtgtccactgcgccgttcgtttatttccctcgattttcttcttcctcccagctcctcccgccttccttcttcgcagccctcctgtcctggttcaggcttgctgtgtcttttgtccctaccctcctccaccccatcccccctttctttccttttcttttctcttcttttcctttctttcttttttaaattctgttttctctgcttcccttcctttgggtttccagagtcgctgggagaagaagggtgggcttgggtggctggggccgggcagtggggctcattcccctggtgccgcaagtcccctcgtgaggagaaactcctgcctgggtctgcccaaggattgggcttggacctggccaaggcctgttgtgtgtgtcgctgccgggcaacgtgcattgctgggaagccgctggaggagcggggtggggggcggggggagggggaaaggcaaatgcagatatatattaaaaacaaataaccgaggtaccagagctgcgtctgtggcaccagctcgctgcaggcgcagaggatggtgggagtgaggctgtgtctgcggatggctggggtcacttctccgcccatgggctccctgctcccccagttttttttctctttgttaacaaatgtgtctgagtcttggaaaacaccccaaacccggaaatgtgtgggaaaaagaaaacaaaaactttccaaawwmmaaaaaaaaaaaaaaaaaaaaaaaaaggaattc

SEQ ID NO: 72 - DNA, 2386 bp, Rattus norvegicus
  misc_feature (1833)..(1838): n is a, c, g, or t
gggagcagcgagcaagcaggtcctcagcgtccagtcaccgcyctmmgccaggcgccatgcatcccgcgcgccccgcgctctgggcggcygcgctcaccgccctcactctgctccgcggaccgccagtggcgcgggccggcgcggkcgygsygrrykcggrcsmsgtggtgcgctgcgaaccgtgcgacgcgcgtgcgctggcccagtgcgcgcctccgcccaccgcgcccgcgtgcacggagctggtgcgagaacccggctgcggctgctgcctgacttgcgcgctgcgcgaaggcgacgcgtgcggcgtctacacggagcgctgtggmaccggcctccgctgccagccgcgaccggccgagcagtatcccctgaaggcgctgctgaatggccgcgggttctgcgcmaacgccagcgccgccagcaacctgagtgcctacctcccctcccagccgtctcctggaaacaccactgagtctgaggaggaccasaatgctgggagtgtggaaagccaggttgtccccagcacacaycgcgtgactgattccaagttccatccactccattcaaagatggaggtcatcataaaaggccrggbtagggacagccagcgctacaaagttgactatgagtcccagagcacagacacccagaacttctcctccgagtctaagcgggagmcagawtatggtccctsccgcagagaaatggaggacacactgaatcatctgaagttcctcaatgtgytgagtcccaggggcgtccacatcccaaaytgtgacaagaaggggttctataagaagaaacagtgtcgcccttccaaaggcagaaarcggggcttctgytggtgcgtggacaagtacgggcagccatagccaggctawgacaccaaggggaaagwcgacgtgcattgcctcagcgtgmagagccagtagataccgctgtrccacttaacgtggagctcaaatacgccttatwttgcacaaaagactgccaacaacgtgatcagcagctggctataccttgawttatatttctctctctctctctctctctctctctctctctcwctctcttytbtkstswmytkwrtrwraacwracaaaacacmtmcaaaammaaaaamaaaaaaaaaarccaagtttagacagatttctgaaatgcctctggttgtttaaatagtgaacttggtcatctttgtatctcgcagtaswcarscaaaagcagtttgaattttcttgttgcttcctatgaaaaccacacgtgtactccargccacggatgccgtcgccccctaactcacccacccactgtgggcttcagtgctgctggccctctgccttcttgatttcagaggctctgttgctgatagagaaaaaccctctttccatcccctgtaagtaagtgcaggcactgtggagaatggggaagcctggaacccagtgacccggacgtctggaagcatcctcctgaggcctctggtccttatkgtgccatctctgaatcaagggcctggccctgtatctgcaagtggcctgacctacttgggaactgtgggagagaaaaatgtgttgtcyctcttactaaaaatgactaagaatgttctagggcgctccgagarcccataaagacaaggacaaggaccttcctttgtcaggcagcttcctgatgacttggcccagcagaaatatcaaactccatgtgcagagatgtcgcaaataacggtgcgcttagttctccggatgacttcaagaaaacagtgttttctggcccagcctctcaaaataaaatttgttgtggggtggggctgaggggaggcagctttcaaaagannnnnngttttcttcttccttgttggagaccctggtmmsmmcatggagagaatmacctgtttgttgatmttsggswcmkkcksaammyttytttwtaattcatgcgtatatgcagacaaaatatgttcttaattgttaacattgtatacaacatrgcccraatatattagaatctgtaytagmtaatcytagataaaaggttwgakatgytaggtgatgtwaccacagacaygccmgaggaaaggagcctgtgtbtgkaggvtggkccgctytcccygaggccaaggccatggtggtctggcaawacagggtgtkaggagactgtaytgcatcccacggggtggacatgcgctgtacagagctttcsttgagagcacaaaggaatcttgagacattytgcytgcctgtcagcttttctttatttttttaattaagtttttgggggaaaaaatgtatttwtgaaaagtttgtcttgcaatgwatttataaatagtaaataaagtttttwtayymkttrvraaaaaaaarawrmmawwmattaaaaaaaaaacttg

SEQ ID NO: 73 - DNA, 1690 bp, Rattus norvegicus
  misc_feature (890)..(920): n is a, c, g, or t
aacacaccagggcaccctgaacatcaggastcrgcaaacacagaggctrgyagctggctggtatcasctctgcagccaggaggacagagaagatggccttcattgcagctttggggctcttgatggcagggatctgccctgctgtcctctgtgatggcayactgggaagggacactctaycccatgaagaccamggcaaggggagacaactgcacagtctcacattggcttccakcaacactgacttcrcattgagcctctacaagaagctggctttgaggaatccagataaramtgtwgtyktctcccctcttagcatctcagctgccttgrccattttgtctctgggagcaaaagacagcaccatggaagagattctagaagkwctcaagttcaatctcacagagatcactgaggaagaaatccaccagggctttgggcacctcctacagaggctcagccagccagaggaccaggyagagatcaatacaggtagtgccctgtttattgacaaagagcagccgatactgtcagaattccmrgagaagacaagggctctgtaccaggctgaggccttcrtagctgacttcaagcagyscaatgaggccaaaaagytcatcawygactatgtgagcaatcagacccaggggaagatcgcagaactgttctcagamctggatgagaggacatccmtggtgctggtgaactatctcctmtttaaaggcaaatggaaggtmccmtttaayccyaatgacacatttgagtctgagttctacttggatgagaagaggtctgtgaaggtgcccatgatgaaaattaaggawstmaccacaccctayrtccgggatgaggarctstcctgctctgtgytggarctgaagtacacaggnnnnnnnnnnnnnnnnnnnnnnnnnnnnnnncarggcaagatgcagcaggtggaatccagcttgcaaccagagaccctsaagaagtggaaggactctytgaksccyagsattataartgabstycgcatgcmcragktctccatctccacagactacaryctrrargaggtccttccagasctgggvattargaaartcttctcccagcaagctgatctgagtaggatcacagggaccaagrayctgyatgtstctcargtggtccacaargctgtgctggatgtggmtgagacaggcacagmakswdsygstsyyacarvrgysrmdrcagychkvvdwmgyttacbryrmmctvkamcwcytctgaatttcaaccrgccaktcatgstgkttatcactgacawkratrgtcagtctrtcytctttrtkgscaaartcactaaccccadktragycydaagctccccaaratstgacarttctgcccaggmycytggraywgascytgsatgykratctctgtayatgycctgacatwcatgytctgattggctrttkcaaagttgkcttmgacagtgacatcractatctstatggcycccatgtgcaywggagcctttrgaytgtcagtgtcaggcwcttaggmcccttgggagcatctacmcatgtttctgaacytggaatctwtctttattctycttccctrgtgactcctctttctgtgttcataccccaaaccwagyyattgryaagtcmcagtmmaggyycyrakaacawmwrwwrmwwwrarmamawctgct

SEQ ID NO: 74 - DNA, 3332 bp, Rattus norvegicus
  misc_feature (102)..(127): n is a, c, g, or t
ccgccagacraaktcggcacgagctgcgamgtgactggtcggtcgtgtaggtgctgcagccaacgagcccggtggcgggcaagggacacgagcaggaccccnnnnnnnnnnnnnnnnnnnnnnnnnncgccgcgtcacgcacactctgggcgccgcgagatacacataacgatactaggttttcgccgcatcttggaattcatcgacacctaagatgccacctgcgattggcgggccagtggggtacacccccccagatggaggctggggctgggcggtggtagttggagccttcatttctattggcttctcctatgcatttcccaaatccatcactgtcttctttaaagagattgaaattatattcagtgcaacgaccagtgaagtgtcatggatatcgtccatcatgctggctgtcatgtatgccggaggtcctatcagcagtatcttggtgaataaatatggcagccgtccagtaatgattgctggtggctgcctgtctggctgtggcttgattgcagcttctttctgtaacacggtgcaggaactttacttctgcattggtgtcattggaggtcttgggcttgctttcaacttgaacccagctctgactatgattggcaagtatttctacaagaagcgaccattggccaatggcctggctatggcaggcagcccrgtgttcctctctaccctggctccacttaatcaggctttctttggtatttttggctggagaggaagcttcctaattcttgggggcctcctcctcaactgttgtgtagctggatccctgatgcgaccaatagggcctcagcaaggcaaggtggaaaaactcaagtccaaagagtctctccaggaagctgggaagtctgatgcaaatacagatctcattggaggaagtcccaaaggagaaaagctgtcagtcttccaaacagttaataaattcctggacttgtccctgtttacccatagaggctttttgctgtacctgtctggaaatgtggtcatgttctttgggctctttacccctttggtctttcttagtaattatggtaagagtaagcatttttccagtgagaagtcagccttcctcctttccattttggcttttgttgatatggtggccagaccgtccatgggtcttgcagccaacaccaggtggatcagacctcgagtccagtacttttttgctgcttctgttgttgcgaatggagtgtgccatttgctggcacctttgtctacgacctatgttgggttctgcatctacgcgggagtctttggatttgcctttggttggctcagctccgtattgtttgagacgttgatggacctcgttggaccccagaggttctccagtgctgtgggcttggtgaccattgtggaatgttgtcctgtcctcctgggaccaccacttttaggccgcctcaatgacatgtatggagactacaaatacacatactgggcttgtggcgtgatcctcatcatcgcaggcctctacctcttcattggtatgggcatcaattatcgacttgtggccaaagaacagaaagcggaggaraagaagagggacggtaaagaggacgagaccagcactgatgttgatgagaagcccaagaagacaatgaaagaaacacagtcgccagcgccactgcagaacagctctggagaccccgcggaggaggagagcccagtctgacctgtggagcatgaagagagcaggtgtgacccgagacatccgaaaccattctgctggccyctagtctaccagtggtgcyccgtgcagacagtggacawttgtgtggaaaacccaccagggtgttcattggtgggatttttttttttcactccttaccaatgcctggatttaaaatatactctgctttaggtagggagtggttgacaaagaatatggggaagaagcagtgatctgtttgtttgtttgtttgtttgtttgtttgtttgttttaatcttagcttttaacagtgtcatgaagattataatatgtgccttaagttttagtttttagaactctttagagagccttaacttttaaaaccattctgctgaawkmatyygkytmmvrvgkcattttaagaggaaaaataacaactascttgcttgaggtaactaaccttaatcttgttttgttgttgttgtaatgctttgtcaracagacattgttaccggaacatttatgaatagaaatactgcttaaaggtcacaggtttataaaatactgagctaaagtatttttctagcattatagttgcctggtacatctgctgctaggtatatatttgagaaatttgaagsataaaattctggatcttggcagttccagccacagcctgtcacctgctgggcacctcttctggaatgctcactacagtctagtgctaaggtgttgccactgaattgatacctttgctcctattcagagacactgtgtggttagaagtaattggccatttttgaaatcaaatgcaaaaagttagtattaaaatstacaaaacaattmmwwaamamrwmwrawwyarwgkaaacagtatttcaagcatcagctgaattcagcgtargttgtcccaaaaccttagttatggtgtgatactctgggtatgtgtgggtttgaggggctgtgagtgaggtcttggttcttaggattgacccagggccatgagcatgcgaagtacatgctgtacggccgagccacaacccacaggcaccctggagtcctccwagtccctgagaccttttctctgatttttgawagctcatttatwtactgatagtttaragctgtatgtgagatatccagtacagggtgaawgtatgcgctctttgtttttwacattgttwtywgtatttgcaaaaccsaragggtcagtgtttggcctcarggaagccaataaagataaaatarggtggaarwwwrmaramwwwmagtaagtacccacctcccgccwcacacasyagrbttacaggggaamttmtatcatgcttasgattatttgacgcaktyttacctccacatyttaactttcamgaccctttcacttwcctgacatgtaraaaaatgggtttaatatatggataggaggaaagatggaccagattggaattacagtgggtttttttttttttaaacctgatgttttytgaatagaggcagaaaaaataagacatatgacwctgaattgkatcgatgcatttaaaawaccattgtaattgacagggtgaatacagatttacaaccttgtgtaagaagctgactttttccaaataaaacatttattttatttttaraaaaaaaaaaaaaaamaaactcgag

SEQ ID NO: 75 - DNA, 1033 bp, Rattus norvegicus
  misc_feature (239)..(239): n is a, c, g, or t
  misc_feature (685)..(685): n is a, c, g, or t
  misc_feature (731)..(731): n is a, c, g, or t
  misc_feature (804)..(804): n is a, c, g, or t
  misc_feature (818)..(818): n is a, c, g, or t
  misc_feature (837)..(837): n is a, c, g, or t
  misc_feature (984)..(1020): n is a, c, g, or t
tttgtacagatgatgactgcgaagtgaaggcccgggcagctggccatgccckttcwcytsrwckctbckygcgctckcstsdcytcvrsmctcccmagccgccatcatgamcaccgcgtctycctcgcaagtgcgccagaactaccaccaggactcggaggctgscatcaaccgccagakyaacckggagttgtatgcytcctacgkctatctgkccatgtcktgdtattttgaycgsnaygakgtggcchtgaagaactttgscaaatactttstbcatcarkcwcrwgragagaggsrrcaysmtgmgrmhckgmygargstgcmgrmycrgsgabgwrgrcraatyttyytgcaggatwtaaagaaacytgmvsgygawkactgggagagcggkctgaatgcmatgrrgwgwgcahtgcactygvaaaagagtgtgaatmrrtcaytmctggracttcacaaahtggytwmtgacargratgatccccacttrtgtgamttcattgwgasgcmttamytgvwygrgsrgsygvaayychwtaaagaabtgggtgvycacgtgmscmacttacgsaagatgggagcccytkrawytggcatggcmgaawathtbtkkgacaagcacamcbtgdgacacsgkgwtgaraghtamgctgaygtbcycmagkccatgtgactttmntgktcmctgrggcagdgcatgcatgtbargctgbctttatctttyntataarktgcmycaaamcawbtgyttaaamgttcttymatytgtvccrtttcttymmwtamagaayytybgynsccvvrwrmavvvnhwdvwmrdvaahmavadwnwrvhrrmmdmrrrrrrrrmmrrwmmmatcggcctagaggtggtaaaaacgggggggataaagacggaggaacggggtccaaaagcgggaacctgccgggaaaaagagcaccaccaggcagggggggttaagcagactcgggcaaagnnnnnnnnnnnnnnnnnnnnnnnnnnnnnnnnnnnnngcggaaatgggaa

SEQ ID NO: 76 - DNA, 1879 bp, Rattus norvegicus
  misc_feature (1652)..(1652): n is a, c, g, or t
cggctgtagcctgtgagcagccasaysagggacagagtctcagcctcgccgccaccgctgccgccgcccagagactgccgagccgggtycstgtgccgccacccactccggacacagaatatccagttatggmtarrmaygagctggtgcagaaggccaagctggcmgagcaggcagagcgatacgatgacatggcagcctgcatgaagtctgtcactgagcaaggagccgagctgtctaacgaggagaggaaccttctctctgttgcttataaaaacgttgtaggagcccgtaggtcatcttggagggtcgtctcgagtattgagcagaagacggaaggtgctgagaaaamgcagcagatggctcgagaatwcagagagaagwtcgagayggagctgagggacatctgcaacgacgtactgtctcttttggaaaagttcttgatycccaatssttcgcagccagaaagcaaagtcttctatttkraaatgaagggtgactactaccgctacttggctgaggttgctgctggtgatgacaagaaaggaattgtggaccagtcacagcaagcataccaagaagcatttgaaatcagcaaaaaggagatgcagccgacacaccccatcagactgggtctggccctcaacttctctgtgttctactatgagatcctgaactccccagagaaagcctgctctcttgcaaaaacagcttttgatgaagccattgctgaacttgatacattaagtgaagagtcgtacaaagacagcacgctaataatgcagttactgagagacaactkgacattgtggacatcggatacccaaggagacgaagcagaagcgggagaaggaggggaaaattaaccggccttccaaccttwgtctgsctcattctaaaatttacacagtagaccatttgtcatccatgctgtcccacagatagtttttktgtttacgatttatgacaggtttatgttacttctatttgaatttctatatttcccatgtggttttatgktttaatattaggggagtararscagktwacttwagggagtwackcgktywcatcttgaggtggscaatatgggatgtggratttttasawkwgkyasasawgtttggcawarttagwacttttggyccatkgtggcttyaraarggccagtgttcaaactgcttcmatgtctaagmaargaaamytgcytacatattggkgtgdgctggcggbgaataaacaggrtaatkggtccarkcaygagksymktstswgyggskrctgtargsctkkgagcasyyrtgakgctggracacgammaccytgtggatgcacgctaagrccgkgtgtytkvgtgcacacycttgmccacagctccaraaktbgkcygwrracaaagttgkracccaattwaytytgwtaagggcaraaacggtwcacrwbscattwtttgkaaagkyamckgckgktygsytwcattwtttkkgckwywhwttwtwtttktwtttwwwwgkttwrggcamtctaagamcaawtgtaaaaktaaakatscrgymcarmcragttgyttggkgttmccgkytcyatgcggwtmaarcacaksggtaaacraaatcccakgkrttwaamtttwtttwtwaarwwwtttgbynkgktkkgkyttkgctkytgwrattyttkttctcttkttgawacwtgccwaacatgcatgtgctgtaaaaatagytaacagggaamtaacttgagatgacggctagctttgttttaatgtcttatgaaattttcatgaacaatccaagcataattgttaagaacacatgtattaaagttcatgtaagtkgaataaaagttttwtgawtgraaaaaaaaaaaaaaaaaa

SEQ ID NO: 77 - DNA, 2751 bp, Rattus norvegicus
  misc_feature (2165)..(2175): n is a, c, g, or t
cgcccttgttcccgctgcggggaggagagtctggtgcctacaagatggcggacggggagctgaacgtggacagcctcatcacccgcctgctggaggtacgaggatgtcgtccgggaaaaattgtgcagatgactgaagcagaagtccgaggactgtgtatcaagtctcgtgaaatctttcttagccagcctattcttttggaattggaagcgccactgaagatttgtggagatattcatggacagtatacagacttactgagattatttgaatatggaggttttccaccagaagccaactatcttttcttaggagattatgtggacagaggaaagcagtctttggaaaccatctgtttgctattggcttacaaaatcaaatacccagagaacttctttcttctacgaggaaaccatgagtgtgctagcatcaaccgcatttatggattctatgatgagtgcaaacgaagatttaatattaaattgtggaagacattcactgattgttttaattgtctgcctatagctgctattgttgatgwgaaaatcttctgctgtcatggaggactgtcaccagacctacagtctatggaacagattcggagaattatgagacccactgacgtacctgatacaggtttgctttgtgatttactgtggtccgacccagataaggatgtacaaggctggrgagaaaatgatcrtggtstttcttttacttttgragctgatgtagtcagtaaatttctgaatygtcatgatttrgacttgatttgtygagcccatcaggtggtagaagatggatatgaattttttgctaaacgacaattggtaactttattttctgccccaaattactgcggcgagtttgacaatgctggtggtatgatgagtgtggatgaaactttgatgtgttcattccagatattgaaaccatctgaaaagaaagctaagtaccagtatggkgggctgaattctggacgtcctgtcactccgcctcgaacagctaatccaccgaagaaaaggtgaagacaggaattccggaaagagaaaccatcagatttgttaaggacatacttcataatatataagtgtgcactgtaaaaccatccagccattcgacaccctttatgatgtcacacctttaacttaaggagacgggtaaaggatcttaaatttttttctaatagaaagatgtgctacactgtattgkaataagtatactctgttataatattcaacaaagktaaatccaaattcaaaagtatccattaaagktctatcttctcatatcacagtttttaaagktgaaagcatcccagttaaactagctgcgttagttacccagatgagagcatgaagatccatctgtgtaatgkggctttagkgktgcttggytkkttctttwwtttgggcttrktttgktttgkttgkttttgctagaataatggcatctacttttcctatttttccctaaccattttaaaaagtsamrakgggaagagctttaaagacattcaccaactattcttttccttcacttatctacttaaggaactgttggatcttactaagaaaacttacgcctcataataaaaaggaactttagasgccgataggttttaaaaatatacaaactatttgatccaatgattttaatcaaacagtttgactgggcaaactttgcagctgataatgactatttcgctttttacaaattgccactgatttggatttgtgcactctaacctttaatttattgatgctctattgtgcagtagcatttcatttaagataaggctcatatagtactatccaaaaytagttggtaatgtgattatgtggtaccttggctttaggttttaattcgcacgaaacaccttttggcatgcttaactttctggtattatcctcacctgcattggttttgttttttggggtttttgttgttgtttktttktttktttttagatccacagaacatgagaatcctttttgacaarmmwtggaaagytggckcykctttccctctctatgtgaaggatgtatttaaatgaacactggtcagtgggacattgtcagctctgagtattgggtgcttcactgtctaataattgccatgtgaatgttgtttttgactgtaaggctatgtcactaaagattttnnnnnnnnnnnttcataatcaaaggtcatgatgtgtatagacatgctttgtagtkaagtatagtagcaataatttctgcacatgatcmagagtttattgcagcatttctttccctgttctctcttttttaagggttagcattaacaaatgtcaaggaatagcaaagtcaacaargactttaggaggtggaattaagaacacacagayttgtgattctttggatgtgacacttattggatgttattctaaagtcttattgaacattgtcaaatttgtaagcttcatggggatggacataatgtttatataatgcccttcttatgtgttaccatagatgtgaaaccttatattgtctttgaaaatgttaaattgagaactctgttaacattttatggattggcacattatattactgcaagaaacatttgattttsagcmcagtgcaaaagttctttaaaatgcatatgtctttttttmtaattcaattttgtttaaagcacattttaaatgtagttttctcatttagtaaaagttgtctaattgawamraaaaaaaaaaaaaaaaaaaaaaaaaaaatggaagcggcc

SEQ ID NO: 78 - DNA, 2244 bp, Rattus norvegicus
tcgcggtcatggaggcgccgatcgtcttgctgctgctgctatggctcgccttggccccgacgcctggcagcgcctcttcggaggctccgccgctggtcaacgaggacgtgaagcgcacggtggacctgagcagccacctagccaaggtgacggctgaggtggtcctggcgcacccgggcggcggctctacagcacgagccagctctttcgttctggccctggagcccgaactggagtcgcgacttgcacacctaggcgtgcaggtaaagggagaagatgaggaagacaacaacctagaagtacgagaaaccaaaatgaaggggaaaagtgggaggtttttcaccgtcaagctcccagttgctcttgatcctgggtccaagatctcaatcgttgtggaaactgtctacacccatgtgcttcatccatacccgactcagataactcagtcagagaaacagtttgtggtgtttgagggcaaccattacttctactctccctatccaacaaagacccagaccatgcgagtgagacttgcttcccgaaatgtggagagccataccaagctggggaacccctcaaggtctgaggacatcctggactatgggccttttaaagacatccctgcctacagtcaggatactttcaaagtacattatgagaacaatagccctttcctgaccaysassagtatgacccgggtcattgaggtttctcactggggcaatattgctgtggaagagaacgtggacttgaagcatacaggtgcggtgctgaagggacctttctcccgctacgattaccagaggcagcctgacagtgggatctcctccattcgttcttttaagaccatccttcctgctgctgcccaggatgtgtattaccgggatgaaatcggtaatgtttccaccagccacctccttattttggatgactccgtggaaatggaaatccggcctcgatttsstctctttggagggtggaagacacactacatcgttggttacaacctcccaagctatgagtacctctataatctgggtgaccagtatgcactgaagatgcggtttgtagaccacgtgtttgatgagcaagtgatagattctctgacagtgaagatcatccttcctgagggagccaagaacatccaggtagacagtccctacgatattagccgggccccagatgagctgcattacacctacctagacacattcggccgcccggtgattgttgcttacaagaagaatctagttgaacagcacattcaggacattgtggtgcactacacattcaacaaggtgctcatgctgcaggagcctctgctggttgtggccgccttctacatcctgttcttcaccgtcatcatctacgtccgtctagacttttccatcaccaaggacccagcagcagaagccaggatgaaagtggcctgtatcacagagcmggtcttaaccctggtcaacaagaggttaggcctctaccgtcactttgatgagactgtcaatagatacaagcagtcccgggacatctctaccctcaatagtggcaagaasrgcckagagacagagcmcaaagctgtgaccagtgagattgctgtgctgcagtctaggytgaagacggagggctctgacmtgtgtgacagggtgascgaaatgcagaagctgracgcgcaggtcaagkagctggtactgaagtctscggtgsagscagagagsytggtggmtggcaagctcaaraaggacayatacatsgrgaatgaaaagctcagstcaggaaaacgccaggagctggtcmccaagatcgaccacatyctrgacgstctgtagctcttgtctccagagcaggcytgggtkgcmtacacttytggatggaataggtagagggaggaagttgtgattagcctaagacctcaagaaaaaagstkrggcccayccatggctgygkmavragsktgycsctyayttbtkwwtgrttstcktttttacaaaaacaaaaacctaaacaaaaatcstgyyyaaaaaacaaacttggttgtgttttgagcaaaagcattttsagtagktgawtgctgttttgttttgatacctgggwattttttctgtctgtaagccctgttwtatggscttmtgattcctaatgtytggttcttttgtgagcgtatgcatggtttwttaaaagtgtgtatgrccaaataaaaataaaggagggackgtgrmmvwwrdaaaraaaaaaaaaaaaaaaaaa

SEQ ID NO: 79 - DNA, 1499 bp, Rattus norvegicus
  misc_feature (67)..(130): n is a, c, g, or t
ggcgttgagggaggcagacgcgaggaggaacggaggagaggcggagatcaccgaacagcagaacaannnnnnnnnnnnnnnnnnnnnnnnnnnnnnnnnnnnnnnnnnnnnnnnnnnnnnnnnnnnnnnngcggagtctccgggaatgcgagctctatgtgcagaagcacaacatccaggccctgctgaaggactccatcgtgcagctgtgcactgctcggcccgagaggcccatggcattccttcgggaatactttgagaggctggagaaggaggaggcaagacagattcagagcctacagaaatccggcattcgtacagactcgagggaggatgagatctctcctccacccccaaatccggtggtgaagggccgtcggcgccgcggtgctatcagcgctgaggtttacactgagraagatgctgcgtcctacgttagaaaggttataccaaaagattataagacaatggctgctttagccaaggccatcgaaaagaacgtgttattttcacaccttgatgacaatgagagaagtgacatttttgatgcaatgtttccagtctcctttattgctggagagacagttattcagcaaggggatgaaggggataacttctatgtgattgatcaaggagaaatggatgtgtatgtcaataatgaatggsmaaccagtgttggggaaggagggagctttggwgagctggctttgatttacggaacacccagagcagccactgtcawwgcaaagacaaacgtgamactgtggggcattgaccgagacagctaccggagaatcctcatgggaagcactytgcgaaagaggaagatgtatgaagaatttcttagtaaagtgtctattttagagtctctggasaaktgggagcgtctcacagtagctgatgcactggagcctgtccagtttgaagatggacagaagattgtggtgcaaggagaaccgggggatgagttcttcattattttagakggcacgbccgctgtgctgcagcgkcsgwsrgaaaacgaagagtttkttgaagtgggacgcctgggsccttstractattttggtgaaattgccctgmtgatgaatcgtcctcgggctgccmctgtggttgcgcktggccctttgaagtgcgttaagttggaccgmcctcggtttgaacgcgtccttggcccatgytcagatwtcctcaagsgaaacatccmgcmgtacaacagctttgtgtcactgtccgtytgrgadccscctcctgtgcctytcctccccmgthtwtgcttcmctcacgcagahtgctttytcctccctctytgcagcgccaagtggccmctggsttcacagcttyttgtytytgtwtahtaaaggttgctttwttgcmccmttttccmttggrgcgttactgaatgctcmctcmcaaataaatrgrgttgtwtggmmaaaaaaaaaaaaaaaaaammwmrwrmmraaaaaaaaaaaaaaaaaaaaaaaaaaaaaaaaaaa

SEQ ID NO: 80 - DNA, 3548 bp, Rattus norvegicus
ggggagcccgggcccgcccgcgtgtcggcggacgctgcgaaaagatgaatttgcaactggttttctggattggattgatcagcttgatttgttctgtatttggccaaacagataaaaatagatgtttaaaagcaaatgccaaatcttgtggagaatgtatacaagcagggccaaattgtgggtggtgtacaaatacgacatttttacaagaaggaatgcctacttctgcacgatgtgatgatttagaagctttgaaaaagaagggttgccacccaagtgacatagagaatcccagaggctcccaaactataaagaagaataaaaacgtaaccaatcgcagcaaagggatggcagagaagctccggccagaagacattactcagatccaaccacaacagctgcttctaaagttgcgatcaggagaaccacagaagtttacattaaaattcaagagggctgaagactaccctattgatctgtactaccttatggatctctcctactctatgaaagatgatctggagaatgtgaagagtcttgggacggatctgatgaatgaaatgaggaggattacttcagacttccgcattggctttggctcatttgtggagaaaactgtgatgccatacattagtacaacaccagcaaagctaagaaatccttgtacgagtgaacaaaactgtaccagcccatttagctacaaaaacgtgcttastcttactgacagaggagagtttttcaatgaacttgttggtcagcagcgcatatctggaaacttggactctccagaaggtggctttgatgcaatcatgcaggttgcagtttgtgggtcgctgattggctggaggaatgtaacacgactgctggtgttttccacggatgctgggtttcactttgctggagatgggaaacttggtggtattgttttacccaatgatggccagtgtcacctggaaaataatgtgtatacaatgagccattactatgattatccttcaattgctcaccttgttcagaaactaagtgaaaataatattcagacgatttttgcagtcactgaagagttccagcctgtttacaaggaattgaagaatttgattcctaagtcagcagtgggcacactgtctggaaactctagtaatgtgatacagctgattatcgatgcctacaattccctttcttcagaagtcattctggaaaacagcaaattgccagatggagtaacaataaattacaagtcctactgcaagaayggmgtsmatgggacaggagaaaatggacgaaagtgctctwacatttccattggagatgaggttcaatttgaaattascataactgctaataaatgtccawrmaaggagtctgaaaaccaattaaaattaaaccctctgggcttcacagaagaagtagaggtggtccttcagttcatctgtaagtgtaattgtcaaagccatggcatcccagcaagtcccaagtgccatgagggaaatgggacatttgagtgtggagcctgcaggtgcaatgagggtcgtgttgggagacactgtgaatgtagcacagatgaagtgaacagtgaagacatggatgcttactgcagaaaagagaacagctcagagatctgcagtaacaatggagagtgtgtctgtggacagtgtgtgtgcaggaagagagagaatacaaatgaaatttactccggcaaattctgcsagtgtgataacttcaactgcgatargtccaacggcttaatctgtggaggaaatggtgtgtgcaggtgtcgtgtctgtgaatgctatcccaactacactggcagtgcatgtgactgttccttggacactgttccatgcgtagcgacaaatggwmagatctgcaatggccggggcatctgtgaatgtggtgcttgtaagtgcacagatcccaagttccaagggccaacctgtgagacctgtcagacctgccttggtgtctgtgcagagcataaagaatgtgttcagtgcagagccttcaataaaggagaaaaaaaagacacgtgtgcacaggagtgctcccatttcaacctcactaaaswsgarrgcagggagaagttgccccagcctgtgcaggtggaccctgtgacccactgcaaggagaaggacattgatgactgctggttctatttcacctactcagtgaacagcaasggtgaagctcacgtgcatgttgtggagactccagactgtcctactggtcccgacatcatcccaattgtagcaggcgtggttgccggaattgttcttattggccttgccttgctgctgatttggaaacttttaatgataattcatgacagaagggaatttgctaaatttgaaaaggagaaaatgaatgccaagtgggacacgggtgaaaatcctatttacaagagtgccgtgacaactgtggtcaatccgaagtatgagggaaaatgaatcttactcaggcggagtttgcaacaccaagctcacagcagcagcatcttagtcacagtagggtagctttggggctctgtggccaggggtttattcacatgcaggtttggaaaatgtacaatatgtataatttttaattttwtattattttgaaaataatgtyakarkccatgccagggactgacagaagacttgagaaaggacttaatccttatcagctgaggtcacagcgtgcctttttaacccttcctcccggacccktggaatcaagctcttactakattgaatgacactgctggtgctaatgccgggcacagctgagcagcatcacagcatctgarccatgactgattctcagctttacagagtggccaggactagttaaacagaatcaaagaacagtcctgctggtggctctgggctttgttcaccctctggctgcccactgggaattctcaatgatgcgtgcggaagacaagtgtgttgacagttwccaattawwataaatktgacrcagttrawwwmmaarwmmawwrraaaaatkytgaratgtggaaaggaaaacttarctttaaaacctgkgtgccattgkgagttacttgatcctgtaactcccaacscbttytytttataaatycaagcttggatwaargyackrggaacttytmkgstaaaaagtccctgacttascmctattwacataaggccataactttagtagcattgkggagcagggrcctgtymtrcywkgtttttytttaattcckgrbgmkscttwatcmccyctaatytmtaatgkgkctgkttgcaattkgggggtcmgactctattatamccttttyttttytgkggctgwacwtttgcctttttcmcaaatactgtaavccgtcctgmtgcttgcargactgtarggcctgggcagggcccctcagcagcaattygrccactgkgcacytcctgcasgtgccttycctgctgkgctcgccctgactcaagbtagtcmccmccttkktttaagkgccttttaattttgmcmgtgctkttaactgaagttatttwttaaaataaaaggcctaaamtvcmwwwaaaaaaaaaaaaaaaaaa

SEQ ID NO: 81 - DNA, 2318 bp, Rattus norvegicus
  misc_feature (1966)..(1966): n is a, c, g, or t
cgtccgctcctcgccacacacaccgagaggatgaggttcgctgtgggtgccctgctggcttgtgccgccctgggactgtgtctggctgtccctgacaaaacggtcaaatggtgcgcagtgtctgagcatgagaacaccaagtgtatcagtttccgtgaccacatgaaaaccgtccttccagctgatggcccccgcttgccctgtgtgaagaaaacctcctatcaagattgcatcaaggccatttctggaggtgaagctgatgccattaccttggatgggggttgggtgtacgatgcaggcctgactcccaacaacctgaagcctgtggcagcagagttttatggatcacttgaacatcsacagacccactacttggctgtggccgtggtgaagaagggaacagacttccagctgaaccagctccagggcaagaagtcctgccacactggcctgggcaggtctgcaggctggattatccccattggcttacttttctgtaacttgccagagccccgcaagcctcttgagaaagctgtggccagtttcttctcgggcagttgtgtcccctgtgcagatccagtggccttcccccagctgtgtcaactgtgtccaggctgtggctgctccccgactcaaccgttctttggctacgtaggcgccttcaagtgtctgagagatggaggtggagatgtggcctttgtcaagcatacaaccatatttgaggtcttgccacagaaggctgacagggatcaatatgagctgctctgccttgacaatacccgcaagccagtggatcagtatgaggactgctacctagcccggatcccttctcatgctgttgyggcymsaaatggagatggcaaagaggacttgatctgggagatcctcaaagtggctcaggaacactttggcaaaggcaaatcaaaagacttccaactgttcggctctcctcttgggaaagacctgctgtttaaggattctssctttgggctgttacgtgcccccaaggatggactacaggctgtacctcggccacagctatgtcactgccattcgaaatcagcgggaagctgtccggakgscatcgacagcgcgccagtgaaatggtgtgcactgagtcaccaagagagagccaagtgtgatgagtggagcgtcasvrgcaatgggcagatagagtgtgagtcagcagagagcactgaggactgcattgacaagattgtgaatggagaagcagatgccatgagcttggatggaggtcatgcctacatagcaggccagtgtggactagtgcccgtcatggcagagaactatgatatctcttcgtgtacaaacccacaatcagatgtctttcctaaagggtattatgccgtggctgtggtgaaggcatcagactccagcatcaactggaacaacctgaaaggcaagaagtcctgccatactggagtagacagaaccgccggctggaacatccctatgggcctgctgttcagcagsmtcrwscactgcaagttcgatgaatttttcagtcaaggctgtgctcctggctataagaagaattccacsmkstgtgacctgtgtattggcccagcaaaatgtgctccgaacaacagagagggatataatggttatacaggggctttccagtgcctcgttgagaagggagacgtagcctttgtgaagcaccagactgtcctggaaaacacgaacggaaagaacactgctgcatgggctaagratctgaagcaggaagactyccagctgctgtgccctgatggtaccargargcmygwrrcsgagttcgccacmtgccacbtggcccaagywccammscatgwtgwggwctyamgwmawkagaagscagcmckkkttrkywytgtsswgactscccagaaggakwtattttggaaasgtgacaaggactgcactggcaatttctgwytgtyccggtctwccaccaaggaccttntgkkcagagrwkwcvscamgwgtttgamtaaactwccagaaggtrccacatwtgaagagtacttrggagcagagtacttgcaagctgttggaaacwtamggaagtgttcaacctcacgactcstagamgcctgcactttccacamaagttaaaatccmagaggtgggtdccactgtggtggaggaggatgcccccgtgatccatgggcttctcmtgkccyccatgccctgagcggytggggctaactgtgwccgwmtkcactgctgtgtgttwccacakacacagagcacaaaataaaaartgwctsttsvmwwwhaaaaaaaarrmmaaaaaaaaataagtgtggctggcg

SEQ ID NO: 82 - DNA, 1582 bp, Rattus norvegicus
cttccctcccattctctatttccctccccgrcagrrygbamkwgrgtgaaggcaggatcaggttccmcgycttyccgtscaawaatyccgscaaggaagccccasagcacaagaawatccaaagtggrgagaggggaagaaagaaagcactgagtcatccatccarmasgrgggagagcgcagccgcccasrcaggagcagcagycagcgatacctggagtccgttgcagaaacctcgccctgsactttgcaacaaaggcrgyctgytwgtcagcgaggacatctgyawgccaaaaaatgtcgtsccagcaataccagcagcaacgtygaaaatwtgcmgctgccttcctggcyttgattktcatcctggcagcckkggacactgctgaksccgggraraaagagaamccwgaaaaaaargygraamaatctgactgyggrgartggcaatggagtgtgwgcgtgcccaccagcggkgactgkggtctakgcacccsggarggcactcgcactkgtgccgagygcawacaaaccatgaagactcagagatgtwagatcccttgcaactggaagaagcagkttggagctgagtgcaaataccagttccaggcttkgggagaatgtgacctcaataccgcyttgaagaccagaactggcagkctkragagagctctgcacawygccgaytgycagaarmckgtcaccatytcmmagscctgtgsmaaactyaccaagcccaagcctcaagcsgrwwmmargaararraaaarggwrvgcadgamacakgagaagatgctkgattwaaarargccaycttttgtggmcamggaaaagkacatyascamgcmggatcagtkaaytattmcwtttatacctactgtaggctttttattcaacagttatctgtagcttaagtacatgataggcaaaaacaaagagaaaagaaatgtttttgtagtagcatttttytaatgtataccatagtaccagtaggggtttataataaaggactgtaawactatttagrwagytgagttgtagtacatgatagatggtaggattgaggtaagttytttttttttktythtkytttgttttggwtwtggtttgtttygcttttcaaagttatgtgatatttcacatttaaatctttttttttacatttccaaaccttgtgsahsrrkktaaatgttacamccatgtaaactacttsccttattagatagattytcacctakwyttttttttyccaattcagaagaaaatatacactaaataaagcagcaataagatwtaatcawwmwawwrrararawatgcattgctctytsccagtggatdcwttctttgaaagttagaaaaccaggrgaagwagagaggmagagcaacggtgtagtgaaatgttgawtttttgtttttttaagaaaaggattaaaacatgaaatcctttcacttyggcagaaaaaaccattbkttttcttgacaaaattatttttacvtccgaggaaaaaaatytaggaaaataaatcaaagtgatgytgdadmaaraaaaaaaaaaammwmrwrmmraaaaaaaaaaaaaa

SEQ ID NO: 83 - DNA, 933 bp, Rattus norvegicus
  misc_feature (222)..(222): n is a, c, g, or t
  misc_feature (239)..(255): n is a, c, g, or t
  misc_feature (881)..(881): n is a, c, g, or t
gmrcgaggsagsgggcacaggagacggcwgctgagccgcggtakgwkagcatcawkaagcgtcggggagcgcagrsccagcarccatggsggtggaaggrggaatgamrksygymaagtttttgctctacgktctcctactggccttttgcgcctgcgcagtgggattgattgccattggcgtagmrrwtcargttgtcttgaagcaggccattacccacgnagactactgctggctcnnnnnnnnnnnnnnnnntattgcagtgggtgccttcctcttcctggtggcctttgtgggctgctgtggggcctgcaaagagaactactgkctcatgatwacattysscatckwbbtgtctyttatmatgctcgtggaggtggcggkggccattgstggstwtkygtttagagaccaggtgaagtcaragtttwktaagagyttycagaagcagatgcagaattacyttwcagacaacaaracggccaccattttkgmywrwytgsakaaggrrmmyrarkkykgdsgagcctytaactmcacagrytgggrgsscwtccccggtwtgsccaaggmcmggbyccccrattcttbskgcatcaacmycactktggsctgtggaaaygayttcamggaatccmccmtccwwacccagggstgcgtggaaamtatmscggcatggctrrggaagaamgtactgytggtggctggarcasccctgggcattgcttytktgraggtcctgggcatwatcttcycctgctgtytsstdmwrrgtatscrragtgsctmcvaagyaatgtagggtgkgsgsgtgtytragctcgtctgtcwtttcatggagtggmctcyccaggttttcaattaaacggrttattttttcngmcctdraaaaaaaamaaraaaaaaattaaaaaaaawrraarmrrccgcaag

SEQ ID NO: 84 - DNA, 1084 bp, Rattus norvegicus
  misc_feature (916)..(916): n is a, c, g, or t
  misc_feature (1019)..(1019): n is a, c, g, or t
gctggaacgggtccgtacggcgtwgttcttggttcccatcgtaacttaaaagggaaacttacacaatgtccggaggccttgacgtcctgcagatgaaggaggaggatgtcctcaaattccttgctgcaggaacccacttaggtgghaccaaccttgacyttcagatggagcagtamwtctmcaaaaggaaaagtgacggtatctacatcatcaacctgaagaggacttgggagaagctgttgttagccgctcgagctattgttgccattgagaaccctgctgatgtcagcgkcatctcctccaggaamactggccagcgagctgtgctgaagtttrycgctgcmrmakkmgsmaswvcaattgctggccgcttyacacctgggaccttcacyaaccagatccaagcagccttcagggagccccsgsttctagtgktgaytgatcccsgggctgaccaccarccyctyacagaggsctyttacgtcaacctksccaccattgytctttgwaacacrgattbyyccbtkcgmtatgtggmcatksmcatyccatgcamcaacargdragyymactcagtggkyctcatgtggtggatgctgsccardraagtacyccgcatgcgaggaaccatctcccgggrgcacccatggraggttakrmytsrkcwydavktmwacrgrgmcccagaggagattgrgaaggrgkagcmggykbccscwragaagbctgtgmccaaggaggwattycagggtgaatsgacggcaccagcgcctgagttcmmtkstgmtcabcctgaggwkvccgactggtctgagkgtgtgcaggtgccmtstgtgcccattcagcagttccccacaraagactggrgtgyacagccggccamtgaggamtggtcagcagctcccacagcacaggntactgagtggsktbgagccmccastgagtggtcmtgakswcctctgcaggtgcctgascgaaggraaaaaaggtkgaaggaaaataaagttccykmrhgcyrnmaaaaaaaawamrarawrraaaamamaaaaaaaaaaaaaaaaaaaaaaaaaaaaaaaaaaaaaaa

SEQ ID NO: 85 - DNA, 1663 bp, Rattus norvegicus
gcgggaggtggcgaggccagggcagggtggcagaagcccgcgcggcgaccgcagcgagagcagcggggacagagcagaccacaacgaaggcgcacaggcagcggggccgggccgggccaccgggagagcggccaccgggaagcgggcgggaggccgggctggcagctggcagccgccgagccgcgaagcgacatggtgctgctcaaggartatcgggtcatcctgcctgtgtctgtagatgagtatcaagtggggcagctgtactctgtggctgaagccagtaaaaatgaaactggtggtggggaaggtgtggaggtcctggtgaacgagccctacgagaaggatgatggcgagaaaggccagtacacacacaagatctaccacttacagagcaaagttcccacgtttgttcgaatgctggccccagaaggcgccctgaatatacatgagaaagcctggaatgcctacccttactgcagaaccgttattacamatgagtacatgaaggaagaytttctcattaaaattgamacmkkgcacaagccakaccttggcacccakgagaatgtgcatamactgkagcctgaggcatggaaacatgtggwagctatatatatagacatcgctgatcgaagccmagtacttagcaaggattacaaggcagaggaagacccagcahaatttaaatctatcaawacaggacgaggaccaytgggcccgrattkgragsamgaacttgtcaatcaraaggmmtgcccatatatgtgkgcatacaaactggttactgtcaagttcawgwggtggggcktgcaraacaaagtggaaaactttatayataakcaagagaagcgtctgtttacaaactttcacaggcagctgttctgttggcttgataaatgggttgatctgactatggatgacattcggaggatggaagaagagacgaagagacagctggatgagatgagacaaaaggacyccgtgaaaggaatgacagcagatgactrgcgctaccgccytttctgcactktytgcaagacagtggtccacakgaaggcccagcagctccaccctcctgagtggcaggccatctttggacscagcctttctgtgctcattcttcaggcaaytktcagycccttactatagctatttmtagatgcccttyaayattgtgaacaaatagaccgtctggtattwtaaarmmwrwrwrwrmrrvagcctgatcctctaarawwwawrrdrwawrctgctgtattwacagctcatcctytctccattgtgccstgacccatttytgkrtgccctccccctttatttmcaagtsacgtymtcattcwytmrmahrwrvwrmmwwwrhratgtgattattyaagytcayttatttcagccttgggwtaagctgagctattttgcytcmtgggcagatctttggcaatgytgaatattcacttggggagagaggaggagttwaaawtacagagacacmtaccctagctcctcacaataggaatgtggyttcagaaccctgacctmtgctcstagtaacctmttgttcgcgtgctmtaagcaccaagaaggcacccaaggcccagccagthtaagaaaatttagcaaatartaaataacccmtwctcgarwmawwraaaaaaaaaaaaaaaaa

SEQ ID NO: 86 - DNA, 590 bp, Rattus norvegicus
  misc_feature (33)..(33): n is a, c, g, or t
  misc_feature (37)..(37): n is a, c, g, or t
  misc_feature (453)..(453): n is a, c, g, or t
gtgtgctgtrrgyckwkmagskkmwsvadkdvnryrnrakkscragattgaaaaatgcagaccacsaaggcmctgctcatttcwccagttytrahccgctcctgtaccaggggtmtaatcaggcctgtgtmtgcctccctchtgagtagaccagaggcdcsakvtaaawagccttcvtgstgcagmtccccthtscagryggccarrcgkgaatyccagaccagtgttatttccygggacatkgmcacrgcarccaagtktaktgsyrvtgrgvchbhywsaswtggwgygsmyrratcaggggvtggcattgscacagtgwhtvrtagcttgattattgghtatgmcrggaaccygtbtbtcaagcagcagctyttytmmtrtgccatchtgggctktgccctgthtgagkccatggggctvtkhtgddtgrtgrtcvccttcmtmatcsknwtmvccatgtgaggcwccatgggrtcmcccgsccgtccstghtrmkwtgrcyccatrcyagtyytgrtghtsgagtgtghtragctytaccaytarahtmcgyytstbtwaammaaaaaammaaaaawwwmrcggcc

SEQ ID NO: 87 - DNA, 1402 bp, Rattus norvegicus
ccccagagaataaagtctcagcgatcaccgcttctgttccaggagcttccttgcctcttgcgtcctctatgaccacctgtgcttcctccagcatggatacgtggatggtgctgctgggcctgcaaatcctgctgctcccactcctggctcactgtacagccccagcttccaccctgagattcgtggctgtgggtgactggggaggggtccccaatgccccattccacacagcccgggaaatggccaatgctaaagaaatcgccagaaccgtgcagattatgggcgctgacttcatcatgtccctgggggacaacttctacttcactggagtgcatgacgccaatgacaagaggttccaggagacctttgaggatgtgttctctgaccgtgccctccgcaacatcccctggtacgtgctggctggaaaccatgatcaccttggcaatgtctcggcacaaattgcctactccaagatctccaagcgctggaacttccccagcccttattaccgtttgcgtttcaaagttccgcggtcgaacatcaccgtggccatctttatgctggacaccgtgatgctgtgtggcaattccgacgactttgtcagccagcagcctgaaatgccccgagacctgggagtggcccgcactcagctgtcctggctcaaaaamcagttggcagcagccarggaggactatgttttggtggccggtcaytaccccatctggtccatcgccgagcacggacccacccgctgcctggtcaagaacttgaggccattgkyggcygcwyacggggtcaccgcctacctgtgtgggcatgaccacaacytgcagtatcttcaggatgagaacggtgtgggctatgtgctgagtggggccggcaacttcatggacccttcygtgcggcatcaacgaaaggtccccaacggmtacmtacgctttcactatggatctgaggactctytgggtggcttcacatacgtggagrtaggctccaaagaawtgrgcmtcasgtatstggaagcctctggaaaatcactcttcaagaccagcctccccaggcgacccagaccctgaagacytacaagggtcctgcttatcccctmatgggtctgagrgagggagcctctgcaagcytgatgggtgggccctgtgaggacctcacccaccrgcagctttttctbtgccctggtactctggcagagtgggaagggggaaccacagaggctyacatataggaaagaagtacactcacaccaaytggsccccacagscaggcttaccctgtggttttggggtagacctttyttgggagtggggcttthttttaaatcaagcatctcactgtcactsctgttcaataaaaacawtagttghcaaggmwraaaaaaaaaaaaaaaaaa

SEQ ID NO: 88 - DNA, 3067 bp, Rattus norvegicus
cggcaggcagtgctatcagaggaggtgcaggacttcatttcccagcaggcttcaggcggcgggcgccgcggtgccttgtgtgggatgtaagcgcggaggtgggctcgggggaccgaagccaggactctccttgggacttgcgggaggctgctttaggttcgccttttggacaggctccagagggctaggtagagattgcagggaccgggaggagtggcctttgagggtccccaagaggtctttgggacgcagcctcatcggggctgggggtcccgggattgtagggaactagaaggcccttggttgaaaggtctcagaaaccgagccgccgcccgtgtgcgcaggacgaagcggctggcgaagcagaattgtggcggagggtagagccgtagccgagcctgggagggggctctctcgccgagcccgaccctcccttcctcggcttgcscgsaggccaccgcccgccgccatggggctgaaggccgcccagaagacgctgttccctctgcgctctatcgacgacgtggtgcgcctgttcgctgcggagctgggccgagaggagcctgacctggtgctcctctccttggttctgggcttcgtagagcatttcctggctgtcaaccgtgtcatccccaccaacgtgccggagctcaccttccagcccagcccggcacccgaccctcctggtggcctcacctacttcccagtggccgacctatccatcattgctgccctctatgcccgattcaccgctcagatccgcggtgctgtggacctctccctctatcctcgagaggggggcgtttccagtcgcgaactggtaaaaaaggtctcggatgtcatatggaacagcctcagccgctcctacttcaaggaccgggcccacatccagtctctcttcagcttcatcacaggcactaaactggacagttcgggcgtggcctttgcagtggtaggggcctgccaggctctaggtctcagagatgtccatctggccctgtccgaggatcatgcctgggtggtgttcgggtccaatggggaacagacggctgaggtgacctggcatggcaaaggcaacgaggaccgcagaggccagacagtcaacgctggtgtggctgagcggagctggctgtacctraaaggatcgtacatgcgctgtgaccgcaagatggaggtggcgttcatggtgtgtgccatcaacccttccattgatcttcacactgactctttggaactgttgcaactacagcagaagctgctctggctgctgtatgacctaggacatctggaaaggtaccccatggcgctagggaacttggcagacctggaggagctggaacccacccctggtcggccagacccgctcaccctctatcacaaggggattgcctcagctaagacctactaccaggatgaacacatctacccctacatgtacctggctggataccattgtcgcaaccgcaatgtgcgtgaagccctgcaggcctgggccgacactgccactgttatccaagactacaactactgtcgggaggatgaagagatctacaaggaattctttgaagtggccaatgacgtcatccccaacctgctgaaggaggcagccagcctgctagaagcaggcgaggagcggccaggagagcaagcccagggcacccaaggccaaggttctgccctccaggacccagagtgctttgcccacctgctgcgattctatgatggcatctgcaaatgggaggagggtagccccacaccagtactgcacgtgggctgggcaactttccttgtgcagtccctaggacgctttgagggacaggtgcggcagaaggtgcacatagttagccgggaagccgaggcagcagaggcggaagaaccatggggggacgaagcccgagaaggtcgtcggcgcggtccccgccgagagtccaagcctgaggagccaccaccacccaagaagcctgcgttggacaagggcccaggctcagggcaaagtgcagggtcgggacctcctaggaaaacgtcagggactgtctcaggtactgcccgtggcacagaagtcagcagtgctgctcaggctccagcacctgcagcatcgccacccccagagggcccagtgctcactttccagagtgagaaratgaaaggaatgaaggagctactggtggccaccaagatcaactctagtgccatcaagctgcaactcacggcacagtcccaagtgcagatgaagaaacagaaggtgtccacacccagcgactacacactctctttcctaaagcggcagcgcaagggcctctgaactcttcgggattctgtgacaaggccccyggcctksccacactcccatcargcttcactctagtcctctaactcaagyctagactctksctacagtcctaggtggsccaraactgcccarcagtgactgggagccttcatttarccccttttcgggccccagagccctkgctcggktcttagaatttaggkttcatctcccaccagmcagccaattggaacattgtwggtscatgcaamcggtctttwcaggtscaamcccgkcccccgaaawtcagwksacsakgacggrbtsyyyarkckmgmctrrvvarbccgkcwttcctcccacttgggggactagattgaccttwgcccacaagcacagttgstacctggaaacccaggaacyrrskwccawtcrgtcscyagksgtagayytycgyamtytatagytsyrtcctytsksaatccaagtcccctaccccaaagaaattaacatattgttgcctgaatytggaaatcttcctmatytccctagccccggagtccagggcatgaaggtcggactyttatctrtgaatactgagcctygcccccttcytgaccaaamtggccggagaacagagcaggacctyttccagccctytgggaacctccttgaggtcccaggrggaaatctgcacggggtgggggagggccagtcttttcctgttttgtacatagatttatttttcagttccaaggaagataaatacrttttsttwmgaaaaaaaaaaaaaaaaaa

SEQ ID NO: 89 - DNA, 1791 bp, Rattus norvegicus
ggaattcggcacgagagagagagtgcgagaccgagagagaaagacggagagcagcagacagaaactgcccgcacccgctagctttagcagccctcagcgtggaccctctsgcaacttggcaccctcaagatccctgcggttccaaccagacccgctccacggcgctggctgtgccagcccgagcctcggcsgcctggcagtcaccctgggaagcggtgggwcggggagacagccgttctctctggtagccgataacggggaatggagaccaattgtcgcaaactagtgtcggcctgtgtgcaattagagaaagataagggccagcagggaaagaatgaggatgtgggcgcagaggacccgtccaagaagaagcggcaacgccggcagaggactcactttactagtcagcagctccaggagctggaagccactttccagagaaaccgctacccagacatgtccactcgcgaagaaatcgccgtgtggaccaaccttacggaagcccgagtccgggtttggttcaagaatcgccgggccaaatggagaaagcgggagcgcaaccagcaggccgagctgtgtaagaatggcttcgggccgcagttcaatgggctcatgcagccgtacgatgacatgtaccccggctactcgtacaacaattgggctgccaagggcctcacgtcagcgtctctgtccaccaagagcttccccttcttcaactctatgaacgtcaatcccctatcctcccagagcatgttttccccgcccaactccatctcatccatgagtatgtcgtccagcatggtgccgtccgcggtgaccggcgtcccgggctccagcctcaatagcctgaataacttgaacaacctgagcagcccgtcgctgaattccgcggtgcccacgcccgcctgtccttacgcgccgccgactcctccgtacgtttatagggacacatgtaactcgagcctggccagtctgagactaaaagcaaagcaacactccagcttcggctacgccagcgtgcagaacccggcctccaacctgagcgcttgccagtatgcggtcgaccggccggtgtgaagcccagggcgcgggattccgaggactgtcggagtgggcaactctgcccgagaaagactgagaattgtgctagaaggtcgtgcgcactacggggagaaagagggggggacaaaagagatcagaggaaaagaaaccactgaattcaaagagagagagcgcctttgatttcaaaggaatgcccccaagtgtctgccatcttccgctgaaagtattcccaacagttggaggacgcgtgcaccaacaaatgtttgactggatatgacattttaacattactataagcttgttattttttaagtttagcattgttaacattaaaatgactgaaaggatgtatatatatcgaaatgtcaaattaatytyataaaagcagttgttagtactctcacgacagtgtttttaaaggctaggctttaaaataaagcatgttatccagaatcagttaggatttttcgcttgcagcaaaggaatgtatatactaaatgccacactgtatgtttctaacatattattattataaaaaatgtgtgaatataagttttagagtagtttctctggtggatgccttgtttctgaaactgctacgtacaacctatcctgtgtataacatttcgtacgatattgttttacttttcagcaaatatgaaaaaatgtgttttatttcttgggagtaaaatataccgcatamaaawwrrraaaaaaaaaamwmraraa

SEQ ID NO: 90 - DNA, 3837 bp, Rattus norvegicus
gaactagcctgacctggacttgcccggcagaagcgacagtggtcggagggcgacgagattttaggggcagcacctgaagcacaattcgagtcctgcgccagggcacgggccattgtccggatccagaaagtcggtcaccggggaagaaaaatggccagtgatacaccaggtttctacgtggacaaacttaacaaatactcccagatacacaaagtaaagattatatataaagaaatttctgttacaggacctccacacgacagaaggtttacatttcaagttataatagaagagagggaatttccagaaggtgaaggtagatcaaagcaggaggcgaaaaataatgctgccaaattagctgtcgaaatacttgataatgaaaacaaggtggatagtcacacggatgcttctgaacaaggtttaatagaggggaactacattggccttgtcaattcttttgcccagaaggaaaatctgcctgtaaattttgaactgtgtgaccccgactcccaattgcctcacagatttatttgtaaatgcaaaatcgggcagactacgtatggtactggtttcggtgctaacaaaaaggaggcaaagcagttggctgccaaaaatgcgtatcagaagctgtcagagaaaagcccatcgaaaactggctttgtcacatctttatccagtgacttttccagcagctcgtctataacaagtaactctgcttctcagtcagcatctggaagggatttcgaggacatatttatgaatggtctcagagaaaaaaggaaatcaggagtaaaagtgccatctgatgacgtgctaagaaataaatataccttggacgacaggtttagcaaagattttgaagacatagaagaaattggctcgggtggatttggccaagttttcaaagcaaaacacagaatcgatggaaagacgtatgctattaagcgcattacatataacaccaagaaggcaaagcgtgaagtasaagcactagcagaactcaatcacgccaacattgttcaataccgagtttgttgggagggagaggactatgactatgatcccgagaacagcacaaacggtgacacaagtcgatacaagacccggtgcctctttatccaaatggaattctgtgataaaggaactctgcagcagtggttggaaaagagaaatcggagtcaagaggacaaggctttggttttggagttatttgaacaaatagtgacaggagtggattatatacactcgaaaggtttaattcatagagaccttaagccaggtaatatatttttagtggatgaaaaacacattaagatcggagactttggccttgcaacagccctggaaaatgatgraaatcctcgaacaaagtatacaggaactcctcaatacatgagtccagaacaaaagtcatcgttagtggaatatggaaaggaagtggacatctttgctttgggccttattctagctgaacttcttcacatatgcaaaactgattcagagaaaatagagtttttccaacttctaagaaatggcrtcttctccgatgatattttcgacaacaaggaaaaaagycttctacagaaattactctcaagtraacccagggaacgacccaatacgtctgaaatcctgaagactttggctgagtggaagaacatctcggrgaaaaagaaaagaaacacgtgttagggcttttaactgcagtctgaagtggaatgtcagagaacaatgaacttcttctcttaacactctcccagacaggttwtggtaagggtgacccaaagacattgtatttatcggctatgaacaagtatgcccgtttcmtcaattgttaattgtcggacctgtggctggctagccaaatatggaaatgtttgtttctttctcgtctgcccgaagagaaagccaagccgcggtggagaaggtcacttaacccccaatgctaactgaaggcctaaggcttttgacatactaaagagctggcagccagagctgggagagaagaacctgcagacaggcaggcagagacacaaagacatggactagaatgaaacaggraggtagagagattgagagacagagccacatggagagacgaaatggcagagtagtaggcttaagttagatgagctaactgagagactgccccagaaaacaggccaacagccttatacacagatgtctcagtgtctatcattaaactccaagcaggatcaatgaaggccctacaataggtttttttttcttgttacttcaaaaacaatcttacaaagttattttcttgagagttccatatgtgtattgtatcctgatcacactccaaaccttctgctgttcatgccttatcatgtgaactatacctctgaacgtgggagtccaaattgtccatctgctccttaacgttacttctcataggtagtttagtcgttgtgatgagaaaagtaatgaaatggtaccagaaatggggttttgtcgcaataaacctactgtgcggtttcttggactttcaggactggtttgtgggaagaatgtggaaaagtttgaagcagcaggctagagaagtsctcagatggtatacgtcaatcttaattctggtagctcagaagtctttgccaaaaaggaacccattgggaattggactakatgccaggacatttgtgtacaagtcaaaagactggtgagggaaatttcaagacattcagactgtggcatggtggttatctccttctcatagctagaattatagagcaaattakgaaggagtgaggggtaagaagtgagagaacaaagatctgggaatgagtgccttcaaagackaggtcggtgcaaagctgttaaagcgattagtgcactgagggaagccatgyactttccattgctgycattataggaacaagactacagccacgggcggctgcacagcatggaaagtaaaagccctttaaaggtctttcgtgtcaaaagttccagcaggtgccacagmcactccagtggagtckgtgtgacakgaagctcttgtgcttcgtttctatgcagaacagaggcctgtgcctggaatggcttgtcctcctggaggtcctggcagtctccctgcaraaagatggtgaccagkgtctatgctttcagtggaattgccttctgtgttctagccttggtgatcttagcgattttaagcctgtcaacaatatctgattttaggaatatagcagggtgggcagatgatcatgtatctttagatgtctcaggcactsarakamrkaaaygtctcacaccatcatgrtcctgatraactcaatggctgcratgaattcwaytgctgyayccattagytcccagwaaataggagagaraktaattgcagttactaasaayatgactgttccagaaaarycttwmyccmsytttgrraaagttttgtttagcatgattcaraatagtaaygattyttttaraaagatcatagacaasttccaacaagttgaacaaacttawcaagagttaactatggttaywwwwgyttccttmytawtctgaggggccataaatatawwgagtttaaaytttatymhvvyraagrtaaatgatgamtrcatacytggtgcccacmartctggcrgtataactgcagttttytaaactattgtttwcagytgagaaytgtttyctagactgtatgttymgctttcctcyytrcaagggacatttggtgrggwratraataagagctagatgattgccaattatgatgtayctgttctamctgyttaartmtrtsccaaraagtaaagcttyttacamcarmamaaaaaawaaammamaaaaaaaaaaaaaaaa

SEQ ID NO: 91 - DNA, 7401 bp, Rattus norvegicus
ttcygsggccgcgctaaaccgtgccgccgtcgccgccgccgctgcgcctgcggagcccccggagccgctgtcccccgcgctggccccggccccggccccmymcggccccctcccgcagtagcgcggtcggcgggactctggcggggggtcagggggggccagggcgccgcgcggagtccccgtgcgctcctctctccgccgggaacagtcmgggccccggcgctagcaccgggatggacggccccggggccagcgccgtggtcgtgcgcgtcggcatcccggacctgcaacaaacgaagtgcctgcgtctggatccaaccgcgcccgtgtgggccgccaagcagcgtgtgctctgcgccctcaaccacagccttcaggacgcgctcaactacgggctattccagcctccctcccggggtcgcgccggcaagttcctggatgaagagcggctcttacaggactacccgcctaacctggacacgcccctgccctatctggagtttcgatacaagcggagagtttatgcccagaacctcatagatgacaagcagtttgcaaagctgcacacaaaggcaaacctgaagaagttcatggactatgtccagctacacagcacagacaaggtggcccgcctgctggacaaggggctggaccccaatttccatgaccctgactcaggagagtgccctctgagccttgcagcacagttggacaacgccactgacctcctgaaggttcttcgcaatggcggtgctcatctggacttccgaacccgagatgggctaaccgctgtccactgcgccacccgacagcggaatgcgggagcattgacgaccctgctggacctgggggcttcacctgactacaaggacagccgcggcctgacgcccctgtaccatagtgccctagggggcggggatgccctctgctgtgagctgcttctccatgatcacgcacagttggggaccactgacgagaatggctggcaggagatccatcaggcctgtcgctttgggcatgtacagcacttggagcacctgctgttctatggggccaacatgggtgcccagaacgcctcgggaaacacagccttgcacatctgtgccctctataaccaggagagctgtgcccgcgtcctgcttttccgtggtgccaacaaggacgtccgcaattacaacagccagacagccttccaggtggccattattgcagggaactttgagcttgccgaggtaatcaagacccacaaagactcggatgtcgtaccattcagggaaacccccagctatgcaaagcgacgacgtctggctggcccragtggcttggcatcccctcggcccttacagcgctcagccagtgatatcaacctgaagggtgaccagcccgcagcttctcccgggcccactctccgaagcctccctcwccaactgctgctccagaggcttcaggaggagaaagaccgggacagggatggtgagcaggagaacgacatcagcggtccctcagcaggcaggggcggccacagcaagatcagccccagcgggcccggcggatccggccccgcgcccggccccggcccggcgtctcccgcgccccccgcgccgccgccccggggcccgaagcggaaactttacagtgccgtccccggccgcaagttcatcgctgtgaaggcgcacagcccgcagggcgagggcgagatcccgctgcaccgcggcgaggccgtgaaggtgctcagcattggggagggcggtttctgggagggaaccgtgaagggccgtacaggctggttcccagctgactgtgtggaggaagtgcagatgcgacagtatgacacacggcatgaaactcgagaggaccggacgaagcgtcttttccgccactacactgtgggttcctatgacagcctcacttcacacagtgattatgtcattgatgataaggtggctatcctgcaaaaacgggaccatgagggttttggctttgttctccggggagccaaagcagagacccccattgaggagtttacacccacacctgccttccctgcgctccagtaccttgagtctgtagatgtggaaggtgtggcctggaaggctgggcttcgcactggggacttcctcattgaggtaaacggagtgaacgtcgtgaaggttggacacaagcaagtggtgggtctcatccgtcagggtggcaaccgtctggtcatgaaggttgtgtctgttaccaggaagccagaggaggatagtgctcggcgcagagccccaccacctcccaagagggcccccagcaccacgctgaccctgcggtccaagtccatgacggctgagctcgaggaactcgcttccattsggagaaggaaaggggagaagttggatgagatcctggcggttgctgcggaaccaacgctgaggccagacattgcagacgctgattccagggcagccactgtcaagcagcggcccaccagccggaggattacccctgccgagatcagctcattgtttgagcgacagggcctcccgggcccagagaagctgccgggctctctgcggaaggggattccacggaccaaatctgtaggggaggatgagaagctggcatccctactggaagggcgtttcccacgcagcacatcaatgcaagacacagtgcgtgaaggccgaggcattccgcccccaccgcagaccgccccgccacccccacccgcgccctactacttcgactccgggccaccccccaccttctcaccacsgccaccaccaccgggcsgggcctatgacactgtgcgctccagcttcaagccaggcctggaggctcgtctgggtgcaggggcagctggcctgtatgattctggcacacctctgggcccgctgccctaccctgagcgccagaagsgtgcacgctccatgatcatattgcaggactctgcgccagaagtgggcgatgtaccccggcctgcgcctgcagccacaccgcctgagcgccccaagcgccggcctcggccgtcaggccctgatagtccctatgccaacctgggcgccttcagtgccagcctctttgctccgtcgaaaccgcagcgccgcaagagtccgctggtgaagcagcttcaggtggaggacgctcaggagcgcgcggcgttggccgtgggtagcccgggaccagtgggtggaagctttgcacgagaaccctccccaacgcaccgcgggccccgaccgggcggccttgactacagctctggagaaggcctggggctcacctttggcggccctagccctggcccagtcaaggagcggcgcctggaggagcgacgccgttccactgtgttcctgtctgtgggtgccatcgagggcarccctcccagcgcggatctgccatccctacarccctcccgctccattgatgagcgcctcctggggacaggcgccaccactggccgmgatttgctgctcccctcccctgtctctgctctgaagccattggtcggtggtcccarccttgggccctcargctccaccttcatccatcctcttactggcaaacccttggatcctagctcacccctagctcttgctctggctgcccgagagcgggctctggcctcgcaaacaccttcccggtccccswcrmccgygcacrgtmctgrtrctgaccgccctggacccctctttgtggatgtgcaaacccgagactccgagagaggacccttggcctccccagccttctcccctcggagtccagcctggattccagtgcctgctcgcagagaggcagagaagcccactcgggaagagcggaagtcaccagaggacaagaaatccatgatcctcagcgtcttggacacgtccttgcaacggccagctggyctcattgttgtgcatgccaccagcaatggacaggagcccaacaggctgggggctgaagaggagcgcccgggtactccggagctggccccaacccccatgcaggcagcagctgtggcagagcccatgccaagcccacgagcccarccccctggcarcatcccagcagatcccgggccargccaaggcarctcagaggaggagccaragctggtattcgctgtgaacctgccacctgctcarctgtcctccarcgatgaggagaccagagaggagctggcccgcattgggctagtgccaccccctgaagagtttgccaatgggatcctgctggccaccccacccccaggaccgggccccytgcccaccacggtacccagcccggcctcagggaagcccagcagcgagctgccccctgcccckgagtctgcagctgactctggagtagaggaggccgacactcgaagctccagtgacccccacctggagaccacaagcaccatttccacagtgtccagcatgtccaccctgagctcggagagtggagaactcactgacacccacacctcctttgccgatggacacacttttctactcgagaagccaccagtgcctcccaagcccaaactcaagtccccgctggggaaggggccggtgaccttcagggrcccgctgctgaagcaatcctcggacagtgagctcatggcccagcagcaccatgccacctctactgggttgacttctgctgckgggcctgcccgccctcgctacctcttccagagaaggtccaagctgtggggggaccccgtggagagtcgggggctccctgggcctgaggatgacaaaccaactgtgatcagtgagctcagctcccgtctgcagcagctgaataaagacactcgctccttgggggaggaaccagttggtggcctgggyagcctgctggaccctgctaagaagtcgcccattgcagcagctcgctgcgcggtggtcccgagtgccggctggctcttcagcagcctcggtgagctgagcaccatctcagcgcagcgcagccccgggggcccgggcggaggggcctcctactcggtgcggcccagcggccggtaccccgtggcgagacgagccccgagcccagtgaaacccgcatcgctggagcgggtggaggggctgggggcgggcgtgggaggcgcggggcggcccttcggcctcacgcctcccaccatcctcaagtcgtccagcctctccatcccgcacgaacccaaggaagtgcgcttcgtggtgcgaagtgygagtgcgcgcagccgctccccctcaccatctccgctgccctcgccttctcctggctctggccccagtgccggcccgcgtcggccatttcaacagaagcccctgcagctttggagcaagttcgatgtgggcgactggctggagagcatccacttaggcgagcaccgagaccgcttcgaggaccatgagatcgaaggcgcacacctgcctgcgctcaccaaggaagacttcgtggagctgggagtcacacgcgttggccaccgcatgaacatcgagcgtgcgctcaggcagctggatggcagctgacgcccctctccctctcctgttcctgctgcgccctgccggcagggcccccacccctactccaggccgcagsstcggctcgccccctaccacggcgcccgggccaggaatgttgcatgaatcgtcctgtttgctgttgcttggagacttgccctgtacattgcttagtgccctcccctgccgctgaaccccacccagcacacagtaagggcgcggaccaggggggctgggtggaagggggttggggcagggtgctctggcctgaccacctcctccacagctcctggtggccattcttccagagggggaacctagtccagcatgcgaggtcaggacacgccttggtgactcggggggaggggggagacattggggktctcgataggggccaaggagccccctgttttacatattttaatccactctatatttggaaagagaaaaggaacaaatatctctgtccgtaacagttcccgccctcttcccctcaagtcctctcgctggtcccgccacagctacccagtcttccatctccggcccctcactgccaccccatatagggcaggggacactccagctggcctggggttagccasgrksctggcagcccaccctggggaccccggctcagcccccttccctcgctgagctatagtatgccccacccaccctttaggtgctgctcagggggacgggtggcaggcattgcctgctgggcactagcagggccaggtggcctgggagattattgccctggggctgggccccggtaacccaaccccagccatcatcttcacagggtctctcccaaaggaggggtctaacctttccccacttcttgggcaactacagcagagaagcctccctgcctcgcgccccaaagactccccaattcctgccctgtgtgtgtgcaccacatgtgtgtgtgcacgcctgcgtgcttgtgaaaattgggtgtggctgagcgcatgggtgccctgtatgtgcttgattgtggagtggtccccaggggctgttctggatgggtgggaggttgaggaagcttgcacaggggtgcatgcatgggtgtgtgcctgtgaaagggccctgtcttctccaaagaaaggctgtcctgctcttgggtcctgctgttttctcagcctgttctccctgaacctcacccagcttaagcaggggttcttggtgaatcctttcagctttgggaggcctcaagggctcccgtgcaggcagcacccctttgggcttctaagggaattgtggggaccactaaaatcaggccacaacagcccttggagagaggcaaagactcctgagggtaccctggccccccttactgtgactcctcacaaytcascaatgacctgtggggcgggggsccytgggscattbwtaacatagggtttggagtctggamkargckccatccacgtcactcacaagtttctgtttmtatttmtagctttttttaataaaatatatatatatatwtatwtaaaagmcagaaamcaggtgttttcatggcccaggggcttggcacsccggtytgtgcccamycgcycsgccccaccbtggcccaccggccccattccttagacwcagagtcacgcccwctaaccctbttacmaacagagcaggtcacacacacakcagcggtcactgtaacagactsccacatacacagtctcacatttacctgtgggtttttggttctgttcagtttgggttyttaactttacagggtcagtyccgcttcatcccccttttgtatggagttccatmtcggggctttcaaccccctgctccagtcctgaggcctcctkaccctgacgttgtgatacaccccacagagatctatgtttcttataktadtaktattaataataattattataatattatgtwataaatttwtaagaadtgraraamaaaaaraaaaaaacctttgcgg

SEQ ID NO: 92 - DNA, 847 bp, Rattus norvegicus
  misc_feature (17)..(71): n is a, c, g, or t
  misc_feature (822)..(822): n is a, c, g, or t
gcacgcagttcccgatnnnnnnnnnnnnnnnnnnnnnnnnnnnnnnnnnnnnnnnnnnnnnnnnnnnnnnngctcmgrccygrkacattgcactaccctgcaagctgtgktgcagggcccggaaggctcactgttccgaratggccgakcagtcagacaaggatgtgaagtactacactctggaggagattcagaagcacaaagacagcaagagcacctgggtgatcctacatcataaggtgtacgatctgayyawgtttctcgaakagcatcytggtggggaaraagtcctaagagagcamgckgggggtgatgctactragaactttgaggacgysrrkmaythkrcrsawgsdcsaraactgwscmrwmcwtwyayywwmgrggwkctmsatccrgatgvsagmtswmagatagccaarcchtcggawaccctwawcactwytgtmrwgtbtmwttcyagttggtggaccaactgggtgatcccagccatytcagccmtgbkggtagctctsatkwatygcctstacatggcagaagrttaacctgtctgtcygmagccmaggaagrraaakrctgycccadagagrsgwgaaaagaasccmgtgktaatcmcttycabtgacagaaaccctccccytgagaawgtaattgtaatawawctgyctccctytcctcytwtgmtmggagaacamasatkggactctttgwmctcttaaactttmaaadrwrmmwwwwwamwcaactthwtttkgacwtytyttcactacgkamtttacytatkgkaaacatgayctttytaaawwatatctggyttgkaangwhmammaaaaaaaaaaaaaaaaaa

SEQ ID NO: 93 - DNA, 2359 bp, Rattus norvegicus
  misc_feature (916)..(953): n is a, c, g, or t
  misc_feature (2333)..(2333): n is a, c, g, or t
  misc_feature (2336)..(2336): n is a, c, g, or t
cacagctcttctctccaagaagactcagccagacccactccagctccgaccctaggagaccgacctcctccagacggcagcagccccagcccagtggacaaccccaggagccaccacctggagcgtccggacaccaacctccgccccgagaccgagtccaggctccggccgcgcccctcgtcgcctctgcaccccgctgtgcgtcctcctgccgcgccccgaccatgctcgcctccgtcgcgggtcccgttagcctcgccttggtgctcctcctctgcacccggcctgccaccggccaggactgcagcgcgcagtgtcagtgcgcasstgaagcggcgccgcgctgccccgccggcgtgagcctggtgctggacggctgcggctgctgccgcgtctgcgccaagcagctgggagaactgtgcacggagcgtgatccctgcgacccacacaagggtctcttctgcgacttcggctcccccgmcaaccgcaagattggcgtgtgcmctgccaaagatggtgcaccctgtgtcttcggtgggtccgtgtaccgcagcggcgagtccttccaaagcagttgcaaataccagtgcacttgcctggatggggccgtgggctgtgtgcccctgtgcagcatggacgtgcgcctgcmcagccctgactgccccttcccgagaagggtcaagctgcccgggaaatgctgtraggmgtgggtgkstratgagcccaaggaccgcacagtggttggccctgccctagctgcctaccgactggaagacacatttggccctgacccaactatratgcgagccaactgcctggtccagaccacagagtggagcgcctgttctaagacctgtgggatgggcatctccacccgggttaccaatgacaatacyttctgcaggctggagaagcnnnnnnnnnnnnnnnnnnnnnnnnnnnnnnnnnnnnnnctagaggaaaacattaagaagggcaaaaagtgcatccggacgcctaaaattgccaagcctgtcaagtttgagctttctggctgcaccagtgtgaagacctaccgggctaagttctgtggggtgtgcacggacggccgctgctgcacascgcacagaaccaccacactgccggtggagttcaagtgccccsatggcgaratcatgaaaaagaacatgatgttcatcaagacctgtgcctgccattacaactgtcccggggacaatgacatctttgagtccttgtactacaggaagatgtatggagacatggcgtaaagccagggagtaagggacacgaactcatttagactataacttgaactgagttacatctcattttcttctgtaaaaaaamaaaaarrrwwacagtagcacattaatttaaatctgggttcctaactgctgtgggagaaaacaccccaccgaagtgagaaccgtgtgtcattgtcatgcaaatagcctgtcaatctcagacactggtttcgagacagtttagacttgacagttgttcactagcgcacagtgacagaacgcacactaaggtgagcctcctggaagagtggagatgccaggagaaagacaggtactagctgargtcattttaaaagcagcgatatgcctactttttggagtgtgacaggggagggacattatagcttgcttgcagacagacctgctctagcaagagctgggtgtgtgtcctccamtcggtgaggctgaagccagctattctttcagtaagaacagcagtttcagcgctgacattctgattccagtgacactggtcgggagtcagamccttgtctattaraytsrrsarykmggcacgcargtgaatttgccggtaacaagccagattyytatgratcktgtaaatattgtggataaatatatatatttgymcagtwatctaagttaatttaaagacgtttgtgcctaytgttctygkhwyragtgcwtttggaattttwaaactgatagcctcaaactccaaacaccatsgataggacataaagcttgtctgtgattcwaamcaaaggagataytscagtggaaactgtaacytgagtgactgtctgtcagaacatwtggtacgtagacggtaaascratgratcagaagtcagatttytagtaggaaatgtaaaatcactgttggcgaacaaatgscctttattaagaaatggcttgctcagggtaactggtcagatttccmcgaggaagtgtttgctgcttckttgactatgactggtttgggrggcagtttatttktkgwsaswstswcmaaaarwwamawgtttgcacctttctagttgaaaataaagtatatatatwttttwwnwrnrmaarawaaaaraaaaaaaaaaa

SEQ ID NO: 94 - DNA, 1027 bp, Rattus norvegicus
  misc_feature (790)..(790): n is a, c, g, or t
  misc_feature (830)..(830): n is a, c, g, or t
gggggctgcagcggcggcggcagtagcggcagcggcggcggcsgmggcggcagcgctccaactcgctccacgctccggctccgccgtcgagccgggagagagagagcctttgctgagcggccmggcackmggysgrasgrcasswgaywcmcgggmyccttggaggmwyckcgctcasccagkgcckksamagssacccamagccgaactccaagatgggargcaagctgagcaagaagaagaagggctacaatgtgaacgacgagaaggccaaggacaaagacaagaaggctgaaggcgcgggcaccgaggaggaggggacccagaaggagagcgaaccccaggcggccgccgacgccaccgaggtcaaggagagcgcggaggagaagcccaaggacgcggcggacggcgaggccaaggcggaggaaaaggaggccgacaaggcggcggccaaggaggaggcgcccaaggccgagcccgagaagagcgagggcgccgcggagsrgcmgcccgagccmscgmsgkcrmscgagcaggmggmgghsrmgcmcrrgsmcgckgybgrcgrbdakgyyyyyamkgvcgscgabgyvavhgvrkdbmrsamgrssgcggycgackgyrcgccccabgakgagggcgagrycaaaaagactgaggctccckccgccggccccgawbcgaaaagcgacgcggycccggcggcttcagactytaaacctakcadcgcggagcccgcgccctcgtccaargagaygyccgcggbctcmgadgygyccagttccgcvgncaadgmccccgcgcccgccgmgcctgccgmcgakccccangyygakgcacccgtcgccagctccgakcaaagcgtggkcgtcaaagagtaaccsksdywgcckakccagaaccgacgccactcgcawacgacctgtctcacsctmkykcygyckctcamtctgycswmtytctstctcyswatyctmywcwrmybwvktyyvmhyyggmagtgagsmtrtgtattgcccaagggatt

SEQ ID NO: 95 - DNA, 1560 bp, Rattus norvegicus
cgggatcatgtctgcagctatactaggacaggtctggacccggaagcttctgcctattccctggcgtctatgtgtgcccggaagatgtgtgtcctccaacttcaaggcggcagacctccaggttcaggtgaccagagagccacagaagaagccagcccctagccagcctctgctgtttgggaagacattcacggaccacatgctgatggtggagtggaacagcaagacaggctggggccctccaaggatccagcccttccagaacctcacactgcacccagcctgctccggcctgcactactcattgcagctctttgaaggcttgaaagcttataaaggcagagacaagcaggtacgcctcttccggccctggctcaacatggacaggatgctacgttctgcaaggcgcctctgcctgccagactttgacaagcaggaactgctggagtgcatccgccagctcattgaagtagacaaagactgggttcccgatggcaatggaacaagcctctatgtgcggccggtgcttattggaaatgagccctccctgggtgtkggaatggtcacacaagccctcctgttcgtcattctgtgccctgtgggctcctacttccccggagactccatgacacctgtctccctcctggcggacccctcattcgtcagagcctggattggtggggtcggtgactgcaagttgggggggaattacggccccactgtggctgtgcaacaagaagcccasaagaaaggctgcgagcaggtcctctggctgtacgggccggaccaccagctcaccgaggtgggaaccatgaacatctttgtctactggactcatgaagacggagaactggagctggcaacccccccactggatggcatcatcctccccggagtggttcgacaaagcctgctggatctggccaggacttggggtgagttccgggtggcagaasgcaaggtcactatgaaggaattgaarcgggcactggaggagggcysggtgcgaraagtcttcggctcaggcactgcttgtcaggtctgcccagkgcaccaaatcctatatgaaggcaagcarctccacattyctwccatggaaaatgggccsgaactcatcstgcgcttccagaaggagttgaaggctattcagtacggaaccagtgcccmcgattggatgcttcgtgtgtgacgttagggaggttgtgccctacctggttggatccgctgacgtgcagcatccagttyagcgtcctcgcctcccarrgactcaagrgaagtgcaatagggrrggtcgttccagactsctggctctytggcaccctcmcgtggaagttacactccmmmsccttaagggcggacccatgtaatttggaccccmcctcagwwcagytsstccgcgtcctggtgttcaararagaaccttggcttcttctcgatctccgttctcaggcggatccccggtgctcttcatgtctyttttttttttttttyccgtctctctctccttgctgcaattttgaaataaaaatgccaargrmcaaraaaaaaaaaaaaaaaaaa

SEQ ID NO: 96 - DNA, 3939 bp, Rattus norvegicus
  misc_feature (1645)..(1677): n is a, c, g, or t
tgaaagtttgcctcggtgctctcggtgtcgctgcggctctctgcatcccaggacagcggcgtggccctcgaccggggcgcgggctcttcagccactagcgagcaagggagcgagcgaaccagggcggccaacacgccgtgccgggacccagctgcccgtatgaccgcgcggggcgccgcggggcgctgcccttcttcgacatggctgggctcccggctgctgctggtctgtctcctcatgagcaggagtattgccaaggaggtgtcagaacactgtagccacatgattgggaatggacacctgaaggtcctgcagcagttgatcgacagtcaaatggagacttcatgccagattgcctttgaatttgtagaccaggaacagctggatgatcctgtttgctacctaaagaaggccttttttctggtacaagacataatagatgagaccatgcgctttaaagacaacacccccaatgctaacgccaccgagaggctccaggaactctccaataacctgaacagctgcttcaccaaggactatgaggagcagaacaaggcctgtgtccgaactttccatgagactcctctccagctgctggagaagatcaagaacttctttaatgaaacaaagaatctccttgaaaaggactggaacatttttaccaagaactgcaacaacagctttgctaagtgctctagccgagatgtggtgaccaagcctgattgcaactgcctgtaccctaaagccacccctagcagtgacccggcctctgcctcccctcaccagccccccgccccctccatggcccctctggctggcttggcttgggatgattctcagaggacagagggcagctccctcttgcccagtgagcttccccttcgcatagaggacccaggcagtgccaagcagcgaccacccaggagtacctgccagaccctcgagtcaacagagcaaccaaaccatggggacagactcactgaggactcacaacctcatccttctgcgggggggcccgtccctggggtggaagacattcttgaatcttcactgggcactaactgggtcctagaagaagcttctggagaggctagtgagggatttttgacccaggaagcaaagttttccccctccacgcctgtagggggcagcatccaggcagagactgacagacccagggccctctcagcatctccattccctaaatcaacagaggaccaaaagccagtggatataacagacaggccgttgacagaggtgaaccctatgagacccattggccagacacagaataatactcctgagaagactgatggtacatccacgctgcgtgaagaccaccaggagccaggctctccccatattgcgacaccgaatccccaacgagtcagcaactcagccacccccgttgctcagttactgcttcccaaaagccactcttggggcattgtgctgccccttggggagcttgagggcaagagaagtaccagggatcgaaggagccccgcagagctggaaggaggatcagcaagtgagggggcagccaggcctgtggcccgttttaattccattcctttgactgacacaggccatgtggagcagcatgagggatcctctgacccccagatccctgagtctgtcttcnnnnnnnnnnnnnnnnnnnnnnnnnnnnnnnnnctgactgttgggggcctcctgttctacaagtggaagtggaggagccatcgagaccctcagacattggattcttctgtggggcgaccagaggacagctccctgacccaggatgaggacagacaggtggaactgccagtatagaaaggattctatgctgggcacacaggactatctctttatggaaggagacatattggaacatccaccactaccctctcctaccatcttcctgggaatgtggcctaccactaccagagctcctgcctaccaagactggatgaaagaagcagctttgatggggtctttccatcctcacccttagactctcaaccaaagagaaagggctggaggatgccccccacatactgccactatttattgtgggccctggaggctccctgcattggaggaagggcagctcagcagctcaggaccctttcctttaggaactgcttcctcccctcaaaaccagaacctggcaagggactcactagcctggatggcccatgggggaccaggacagatgagaaggagcagaagagccctgtgcccagaagacccaactggtgccaagsamkmssarcrtggacaggcagggrcctgtttcccaagaagagagcctgayattcaaagggtgggacagcatctgcccracttcccgtaaaggcataaaggcacgmagcccaaaaracgggaagaggaggcctttggctgcttgtgwtgacagcttaaaggggtctacaccctcaacttgcytaagtgccctctgctgatagccaggaaggagggagaccagccctgccsswcmkgayctgacctgsctcatgatgccaagaggaagacwgagctctarcctmrtctyctcctgcccayagcccctgccagagttcttttgcccagcagaggcacccctcatgaaggaagccattgcactgtgaatactgaacctgcctgctgaacagcctgtccmatccatccctatgagygaycatccgtccgaatgttctcccacttccttsarcctctcctcrgcttcttgcactgagctggcctcacrtgttgactgagggagcccmtragcccsaacyttccccygcmtcagcmtttgattgtccagggtgaagctgtgggagaacygcmtgggmtaccagtcagagctggtctttrggctgtgttccttrcccaggtttytgcatcttgcactttgacattcccaggagggaagtgactagkggaagggagagargaaggggagrcagagacaaaggccacaggcagagctatraatgagaatgggtcttgaaawtawrwrwrmammmmwaarcttgaaattgatctctatactctagcccctcagccagcctccttcctgttgtctgaaacctggagctaagcaggttgtcctgtcacaagctctggggactgagctccatgctccaaccccaccctcttctgacctttgttctccagacctgacccaggtaggcaagggtaccctcmsagkcyyaccymccmymcystgccatctctagccaagcaagccaggtytagagarggrtcaaaaaaaawaaaaaaagggtyrtttacttccaacttgytctgatgccctctgtttccyrrgccaggctwgtcygtggtgacctgggcatgggtgacagggctctyayttgcyccttggtctctttatgctgctggmtccccctttcctgccctccctggctactgggtcrmtaatctttcaggccatgratcygggaggagagtggtctrtargctccaycagccctgtcctgagacarcaggggggraggacactggagactttcyygtggggcttacttagccttctrgttacagactatttccayrctagaaaatacrtattttwaaatmgawggaaaaacacagaawcaaracaaaacaaggcattststacccytccayyttaaacatayattaytaaagacmgaagagmaaatccaacccattgcaagargctctttgtgggtgcctggttrcwtmrgmgcaggaggagccycaaayccacytttggagcykccmctgtgtgcaytaggaacccyttctyycctcyrakaaagcycagagsgagcactgcctcacmaactgtgagactgcgtttttttatactkggaagtgstgaattattttatataaggtcatttaaatatctatttaaaaaatmggaagctgcttttatatttaataataaaagaagtgcacaagcwrmmraaaaaaaaaaaa

SEQ ID NO: 97 - DNA, 3368 bp, Rattus norvegicus
ggcaggagaagtgatctgttatctcacctggcacatgaagcccattcctggaactatgcaaagggcagagtctggtgagccatggcggcggcagtggcggcagcagcagcagtgcggtcccggatcctgcaggtttcttctaaagtaaactccacatggtatccagcatcttctttctcttcatcatcagtgccaactgtaaagctcttcattgatgggaaattcgttgaatccaaaagtgacaaatggattgacatccacaacccagccaccaatgaggttgttggtcgggttcctcagtccaccaaagctgaaatggaggcagccgtagccgcctgcaaacgcgctttccctgcgtgggcagacacatctattttaagccggcagcaggtcctgcttcgttatcagcaactcattaaagaaaacctgaaagaaatcgccaggttaatcacattggaacaagggaagactctggctgatgctgaaggagatgtgttccgaggccttcaggtggttgagcatgcctgcagtgtgacgtccctcatgctgggagagaccatgccatctattaccaaagacatggacctttattcctaccgcctgcctctgggagtgtgtgcaggcatcgcaccatttaattttcctgccatgatccccctttggatgtttcccatggctatggtctgtggaaatactttcctaatgaaaccatcagagcgagtacctggagcaaccatgcttcttgctaagttgcttcaggattctggtgccccggacggaacactgaacatcatccatggacaacatgaagctgtaaattttatttgcgatcatccagacatcaaggcaatcagctttgtgggatccaaccaggcgggagagtacatcttcgaaagagggtcaagaaatggcaagagggttcaagccaatatgggagccaagaaccatggggtagtcatgccagatgccaataaggaaaataccctcaaccagctggttggggcagcatttggagctgctgggcagcgctgcatggctctttcaacagccgtccttgtgggagaagctaagaagtggctgccagaactggtagagcgtgccaagaatctccgcgtcaatgcaggagatcagcctggagctgatcttggtcccctgatcaccccccaggccaaagagagagtctgcaatctgattgatagtggagcaaaagagggggcttccatccttctggatgggcggaaaattaaagttaagggctacgaaaacggtaactttgttggaccaaccatcatctccaatgttaagccaagtatgacttgttacaaagaggagatttttggtccagttcttgtggtcttagagacagaaaccctggatgaagccatcaagattgttaatgacaacccatatggaaacgggactgctatctttaccaccaacggagccatagctcggaaatacgctcacatggtggatgtgggacaggtgggcgtgaatgtccccattccagtgcctttgccaatgttttccttcaccggctctcgatcttccttcaggggagacaccaatttctatggcaaacagggcatccagttttacactcagttaaagactatcacatctcagtggaaggaagaagatgctactctttcctcacctgcagtggtcatgcctaccatggggcgttagaacgttcaagactccatccagcctgagtaacttcccactgtccttggcaatcttcgtctgccatctttgctcaaaacagatccatgaggatggagtatattgcaatgaaattctttctcagaactcgcaatcccttcaaagttatagggagtacaggataacaccaacgccaggccttcacttgttctccatackkcwckacggkttttgaggttaactgttgttaagcgtgaagtgtttgcctagaataagagcttagaactgtcttctaacaattcttttctgatgacttggagggacaacgtaggggcmcgrtccttggcaatctkmrwctgycatcttwgctcaawwayagyccwysassatgkmsccacactatcaaacatgtaacctagttttacttatcccagcatggtgatgactgcttttctgctcaataccactttcttcatggccactattttattctatccatttcktgcttcttaamayrmkkctcaaggtacctcaggrtgaagtgataagttagctttttgttacatgtgccattcttcatggtttgcctcaacaatcattaaaccaatactctagccattaawwmarawamaaawaaatccttagacaaaatatttcacaaatggtttttgacccagaaatcaaaggatctccaatcctgaaagtgaatagactcttgccttaagtagccttacctattatttgccaaaatatgttattctttcttttgacagcatttctctttagttgatactttttaatgaacaaaactcttcatatagaataattgattaggctactagaaacttcaaagtttcatgctttgacaatattcagtcaccttattcaacttagccagttactcagctgcctttaagcttgcttctctgataatctgaaccttaagtcagaagaggctgatgtgctgaacagaacagtttgtccatctgacytgaagccttggctttctgaactargctatgggttctgcttagtctttagtgcttagtgagrtgtggcgctggccatttatttccctctgttctgtacagccatgtgtggacmgtgytgctccagtccatgtgggctttggtragttgagataaaggtggtgaaaacyttgacatttcctactctttggatatrgattttagagcaaccggcttcgktagaattcaragcttcggtcactttaacaamccayaactctgatttyttttkttttccaccytaaagcaaagtagacatttatacttcgtgrhtgcataaaakayagttcadasttaatttaatccracaattttgggytgggttgaaaagtggttattatytaaattccraatwsaatttaatctrgactcctratattttccttagatatgaaggaagtttcttttaaaraattatgactratcagrmwygtaktgcttctaattataatcaacagatacgagcagctastagtgctcaaaagaatttcttgtttyttagatgaaatttawatttggctatattaaggttaatatcactaaaacagaaarccagcatttttccttwttgtttttawayggcctcatcaagtttttgtgagmttbtatactgatcatgawtaataaaatmcaaataaaaaagccttaggaaaaawwamarwwwwraaaaamrwr

SEQ ID NO: 98 - DNA, 1591 bp, Rattus norvegicus
tgtctgtgcgggagaaaggggagaatcgcccgaacggtcgcggaactcctgggagtgaggcccagcctgcaggaagccctgcagtgtatgtgtggtaacaacatgtctgtgcccctgctcaccgacgcagccaccgtgtccggagctgagcgggaaacggccgcggttatttttttacatggacttggagacacagggcacagctgggctgacgccctctccaccatccggcttcctcatgtcaagtacatctgtccccatgcgcccaggattcctgtgacactcaacatgaagatggtaatgccctcctggtttgacctgatggggctgagtccagatgccccagaggatgaagctggcatcaagaaggccgcagagaacatcaaggctttgattgaacacgagatgaagaacgggattcctgccaaccgaatcgtcctgggtggcttttcgcagggtggggccctgtccctctatacagcacttacctgcccccaccctctggccggcatcgtggctttgagctgctggctgcctctgcaccggaacttcccccaagcagccaatggcagtgccaaggacctggccatccttcaatgccacggcgagctggaccccatggtacctgttcggtttggggccctgacagctgagaagctccggacagttgtcacacctgccagggtccagtttaagacatacccaggtgtcatgcacagctcctgtcctcaggagatggcagctgtaaaggaatttctggagaaacttctgcctccggtctaactagctgctggctccgatcgtggtccccagctcacaggggacccagcaagcaaggatctgagccggtcgagcccctgtcccttctcttcctaccctattctcttcccacaggcctctggggcaggtcgccgaggctggcgaggccttcctgctggcctcggtcatctgagaagtcagcagcaggggtgggctgctctcttaccccacttccccagaggcgggccccagcagcagtattggaggggctgaaggcagmggsagarrggggcccagctgctkmccsgcwcasksaggrcctcacccmctagccccgctttgggccccctcctgtgmcctcagggtttggcccakkgggccctcaggggccccttcccccgtgattctgcccggataatcgtytctcmtgssycactkcagskgcyyytgtcmcsmwtgwktycatggccccggrkmmctwgctgctbtmrgctkcctgstgmtgggcargytgktcmrtgaggaggtagagtccmtcaggggcctcccytcagcccctccccacagrggggvtgggccctgcctccccatgsccctttyttgcasgcctggagcctgcmgggytggattgaggttcaagggcccccaattccctgctgtctcmccccccmttwtgtccccccttagsgccasggagstggtgsgrgaggaghtdtgtyttrkckwmtgtcttcatgtggtyktgggtgtttttmttgttttgtcctggattccgataaamttaaagaaattgcytcmamwmwmmaaaaaaaarraaaaaaaaaaaaaaaaa

SEQ ID NO: 99 - DNA, 2656 bp, Rattus norvegicus
  misc_feature (382)..(410): n is a, c, g, or t
  misc_feature (2289)..(2289): n is a, c, g, or t
cacaatcttcaatgagtagacatattcctcagttctgtggtgttctcggtcacacatttatggagtttctgaagggcagtggagactactgccaggcacagcacgacctctatgcagacaagtgaactgtagaaattcattactactccaccaagaagcccccataagagtggatagcctggacacagtcgtgttgaattgaaatctgcagagcattttccaagagctcagacctggatggggtaaacctcagtgcacttcctctgtatcgcctcagtattcctggattgaagagtcactgcttcttgtgaggaggttcatttcattgcccgtttctcccgactcatactcaaagcactgagaatttcaagtggagtatatnnnnnnnnnnnnnnnnnnnnnnnnnnnnntttggttttgttttggttttttgttttgttttgttttgttttgttttggttttcagtttttgtttggaatcatttctgtattcaattttttaattctttcataaccctattgggtgtttttttaaactaaattaacatggctcgaatgaaccgccctgctcctgtggaagtcacatacaagaacatgagatttcttattacacacaatccaaccaatgcgaccttaaacaaatttatagaggaacttaagaagtatggagttaccacaatagtaagagtatgcgaagcaacttacgacactactcttgtggagaaagaaggcattcatgttcttgactggccttttgatgatggtgcaccaccatccaaccagattgttgatgactggttaagtcttgtgaagattaagtttcgtgaagaacctggttgctgtattgctgtccattgtgtcgcaggccttggcagagctccggtgcttgttgccctagcattaattgaaggtggaatgaaatatgaagatgcagtacaattcataagacaaaagcggcgcggagcttttaacagcaagcaacttctgtacctggagaagtaccgtcctaaaatgcggctccgcttcaaggattccaacggtcatagamacarctgttgtattcaataaaactggggtgcctgatgccattgccttggaagaggwacttcagatgggacctgatttgttatttacccaatgtgtccacttacctgtggaagctcsargggaatattgwaaaagttttaccaggccacaagcttgacagaattgcaacctctataattgggctatgatcaacacgtttggacacttagcaaaagatttttgctggtcagcatttaaaatgtgcttattatttgtaccaattgacctttcctaaaataaggtattgagtaatgtcattaaatgtactcctgtgccagaatattattagtcwmkarggaatttagaaggattaggtgccaaaatacccagcacaatacttgtatatttttagcatcatacagaaccamaattccaagaactaagaactctccagaccttccatggtgtattccttcagtcatttcaaacaccgcagggcttctcttgttatctgcctgctcactctatgtttacatctcccacacttacaccagaacacatcaggtttgcttagctatcttttaagtcttgcaatgattatttaatgtctctgtcttattttgtgctgttttgggaaacctccatttgaaaatcaactttgttacagaagcacatatcttcaataatgtctccagacamrargccttatarktaatttaatgtttgcactcgggtgcaacctgacagggagggsctgaacmmgaaasgmgaggmggstmttaamtatyyttmgtmrtatgwtgcctwtgtcttgtgcagaacatgtmgagtatgctctttamtttmgtaaatatttttaagacgtmgagmtacattsttgtagctamccayttaatcaaaatttstgaamttcttgtgttttccatacctatctgaggtttyccaacttgtttgaattatggttttccccttctcttcccaatctcttgcaaaaaagtaaaagtgggatctgctagtgaactgagcagaaatattttatacgccttttgagctatgtaacttaataattggatacttgatcatttgttttatwatgtaatcgwtaaaatggtratgtgtattaatgttagttcaaccatatatttatactgtctgggaatgtgtggttatagttctgtgggagaaatagtttgtcagtgttcmccagsttgtaaaaacttagtgckagagcttcawcatctaaataaatgrtgaaacgcawwndwmamwrarrwmamtttgcttaaaattaacttaatttgtwgaaaacmgtggattcaattattatcatttcagtttwtggacaaatttgttagggttwccaagtgcgtttaaaaattgctctttaaaggtytagrtaattgtgaatcaattgaatgttgggtwccaagggaaaacggtttgtaatagttgatgmccttgatttttaattcaattccmccagtcacttgtagctttatgcagttwccaatccacttttctcrtttttaagtttattacttacctgtmymtattttgaaattaatttgaacctgvgtatttggcacatgwtggyttaataaattttaactttcaataawmwraaaaaaaa

SEQ ID NO: 100 - DNA, 2080 bp, Rattus norvegicus
  misc_feature (390)..(415): n is a, c, g, or t
  misc_feature (981)..(1025): n is a, c, g, or t
attaaggtatctgcaccatctgcatagtgacggctggtaccttgctgctgtgctcgacagcacttggagactcaaggggtgaggcagmgcagcgagcctgccggagctgrtgggtggagctrcgrccgggagcckvckrkgkckwggrgwcmswmagygkccaaggcgcggagcggtcggcggagccatggcgggctgctgctccgtgctcgggtccttcctgttcgagtacgacacgccgcgcatcgtgctcatccgcagccgtaaagtggggctcatgaaccgcgcggtgcagctgctcatcctggcttacgtcatcgggtgggtgttcgtgtgggaaaagggctaccaggaaacggactccgtggtcagctcggtgacaaccaaagnnnnnnnnnnnnnnnnnnnnnnnnnntctcagcttggattccggatctgggacgtggcggactatgtgattccagctcaggaggaaaactccctcttcatyatgaccaacatgatygtcaccgtgaaccagacacagagcacctgtccagagattcctgataagaccagcatttgtaattcagacgccgactgcactcctggctccgtggacacccacagcagtggagttgcgactggaagatgtgttcctttcaatgagtctgtgaagacctgtgaggtggctgcatggtgcccrgtggagaacgacgttggcgtgccaacgccggctttcttaaaggctgcagaaaacttcaccctcttggtaaagaacaacatctggtaccccaagtttaacttcagcaagaggaacatcctccccaacatcaccacgtcctacctcaaatcgtgcatttacaatgctcaaacggatcccttctgccccatattccgtcttggcacaatcgtggrggacgcgggacatagcttccaggagatggcagttgagggaggcatcatgggtatccagatcaagtgggactgcaacctggatannnnnnnnnnnnnnnnnnnnnnnnnnnnnnnnnnnnnnnnnnnnnacacccgggacctggaacacaatgtgtctcctggctacaatttcaggtttgccaagtactacagggacctggccgscaaagagcagcgcacactcaccaaggcgtacggcatccgctttgacatcatcgtgtttggaaaggctgggaagtttgacatcatccctaccatgatcaatgttggctctggcttggcgctcctcggggtggcgacggtgctctswgacgkcatagtcctctactgcatgaagaagaaatactactaccgggacaagaaatataagtatgtggaagactacgagcagggtctttcgggggagatgaaccagtgacgcctaaagttacatttccaccccgctcagcccgcgaagcagaaagatggggagagatggctactgcgtctgtcactctagagaaagctccagagtttcagctcagttctccactccacaaatactcarggttgcccaagcacrtcttgttgagcccggytcttgctctgctgctcagatgggcttcagayrcmrgakvvkyctgcttctgcctctaggaakgcwsgrrkcawacatgttcactgcaatgcccatttcccatgggagttttggcattttttacattttamctttcctttgtatacatctaaggctgscctcagacgcaagacgttcttccaccctatacacccttttaatctcactgtgtgtgkgaggggggtmgtttrmacaygacgcacggtggatgtytggtgtgctgktgsctgggccacytgtggcttrtacagtgtgagygyatggagktaggaagggtctragrgcagagayactkctgtggcttayggacaggcccaggctstgtccacgcacwttatttmtmmggaakkmggctctctcaggtkctgtcagcaggcytgkgacwccattcctbktccmtrtaatcagagaagttgtcsttgtagcaaaggcagggttagcttttccttttataagggctgtgttgaaatgacctaggwccamacattaaaagamwtaattytttaaaaaaaaaaaaaaaaaaaaaaa

SEQ ID NO: 101 - DNA, 757 bp, Rattus norvegicus
  misc_feature (105)..(105): n is a, c, g, or t
cacgagggaagctttgcgcttcctcdwkycavbhvssrsmgascgawgggmatctctcgggacaactggcacaagcgccgsaagayysggsryragrgaaaacsnyacsasragaagcggwwstawsagctgrgacgrccgrccgccaacmctaagattgrccctckccgcatacatacagwccgrgywcgaggaggcamtavgamgtatcgtgcwctgmgrttggatgksrsgarsttttcytgggsctcrgastrttgtactsgcaaamcaaggwtcattgmtgttgtsyrcamtgcayccaataacgagyktkwccgcacmaagmccytggwsragvmytgcawtktgcttattgacagcacaccgtmscgacagtggtacgagtcccaytatgcrctgcccbtgksssgcaagaaggggrccwagctgrctcctkaggagkaagvgattttwaacwmwmmacgrtcawagaaaattcmgaagaaatwtgatgaaargaaaaagaatgccmraatcagcagtcttytggaggagcagttcmagcagggcaagcttytcscctgtattgsctcaagaccagrccagtktggcagagcagatggctatgtgctcgaaggcaaggagctggagttytatctscggaagatcaaagcccsgaaaggcaaaywaactgtcatagctygtgtaawaaarrdrwwwrmwrwwhwrwwwawrwamaaaaammmammmmmmmacctcccacccctcttccccc

SEQ ID NO: 102 - DNA, 2194 bp, Rattus norvegicus
gctgccagctacaggcagtggggaaatccacagggcagcagctgtattgtagacggcccttgctcactgcctgcctgcagccagctctgtacaaggaacaatggccctgaggacaggaggcccagccctggtggtgcttctggctttctgggtggcactgggcccctgtcacctgcaggggacagatcccggagcgtcggcagatgccgagggcccccagtgccccgtcgcctgtacctgcagccatgatgactacacagatgagctcagcgtcttttgcagttcaaagaacctcacacatctgcctgatgacatcccagtcagcaccagagccctgtggcttgatggcaacaacctctcttctatcccctcagcggccttccagaacctgtccagcctggactttctcaacctgcagggcagctggctgaggagcctggagccacaggcactgctggggctgcagaacctctactatctgcacctggaacggaaccggctccggaacctcgccgtgggcttgttcacacacacaccgagtctggcttcactcagcctgagcagcaacctcttgggccggctggaggaagggctgttccagggcctcagtcacctttgggacctcaacctgggttggaacagtctagtggtcctgcctgacacagtgttccagggactgggcaacctccacgagctggtgctggctggcaacaaactgacttacctgcagcctgcgctcttctgtggcttgggcgagctgcgggagctggatctgagcaggaacgcactccgaagcgtcaaagctaacgtctttgtacatttgcccaggctgcagaagctgtacctggaccggaacctcattacagccgtggcccctggtgcctttctgggcatgaaggccctgcgttggctggacctgtcgcacaaccgcgtggctggcctcatggaggacaccttcccaggcctgctgggcctgcacgtcctgcgcctggcacacaatgcgatcgctagcttgcggccgcgcactttcaaagacctgcacttcctggaggaactgcagctgggccacaatcgaatcaggcagctcggggagaggacattcgagggcctggggcagctggaggtgctgacgctcaatgacaaccagatcactgaggtcagggtgggcgccttctctggccttttcaatgtggcggttatgaatctctccggcaactgtctgaggagcctcccggagcgggtgtttcagggtctggacaaactgcacagcmygmrsctagagcacagctgcctgggtcacgtccgcctgcacacttttgctggcctctcagggctgcgcaggctcttcctcagggacaacagcatctccagcatcgaagaacagagcctggcagggctttcggagctcctggaactggatcttactaccaaccgcctcacacatctgccccgccagctcttccagggcctcggscacctggagtacctgcttctctcctacaaccaactgacgactttatccgcggaggtcctgggccctctgcagcgggccttctggttggatatctcacacaaccacctggagacgctggccgaaggccttttctcatctctggggcgssttcgctacctcagcctcaggaataactccttgcagaccttttcaccacagcccggcctggagcgcctgtggcttgatgccaacccytgggaytgcagctgtcccctcaaggcgcttsgagactttgccctgcagaaccctggtgttgtcccccgctttgttcagactgtctgtgagggggacgactgccagccggtgtacacctacaacaatatcacttgcgctggccccgccaacgtytcgggcctcgacctaagagacgttagtgaaacacattttgtgcactgctgacactggctacttactggcccggtytggccgaacaytgyctcatggccaggacggkgtctcattgttaacagaataagctggctctcaaattcctacccatctytaggggacaggtcctggctgctcacttcctggaagcaggctgtactggaagctatgtggcctagaaagggtgggctcaggccaagtgtccaagggcccaaaggagggaggtgctcrswgrmtytmmgcatrytagycarcrgakkaaarsaaactaayyargrtwmmmwmarwaaaaaa

SEQ ID NO: 103 - DNA, 3063 bp, Rattus norvegicus
cattagcatgtttccatggccacccgccacccaggagctttgaccatgggacactggttgataagcagggaattccattagaaggctgttgcagtgtcacgaagcactgagcgacagtagctttgactagaggagaaagggaagcagagaccaacagactaggggcttaacccatggcaggagtggagtctctcctccggctgactgagcagggcgagctctgccttggtcagcccattgacatttttttgaaaggtgtctgggtacattttctatgtgtgtgtaaatattttcttacagggaatgaaaaagactcgagcagatgcaaaaaaaattggccccctcaagctggcagccctcaatggactctccctgtcccggctgcccctgcctgacgaaggcaaagaagtgtccaccagagcgacaaatgacgagaggtgtaaagttctggagcagcggttagagcaaggaacggtcttcaccgagtatgagaggattctgaaaaagcggctggttgatggcgagtgctcaacagctcggctccctgaaaatgcagagagaaaccgattccaagatgtgctcccctacgatgatgccagagtggagttggtgccaaccaaggagaacaacactggctatatcaatgcgtcacacattaaggtctctgtcagcggaattgaatgggattatattgccacacagggaccattacaaaatacctgccaggacttttggcagatggtgtgggaacagggagtcgcaattatagcaatggtgacagcggaagaggagggaggtcgggagaagagctttaggtattggccacggcttggctccaggcacaacactgtcacctatggaaggtttaagatcacaactcgcttccgcacggactcgggctgctacgccaccacaggtttgaagatgaagcaccttctcacagggcaggagaggacagtttggcatctccagtacacagactggcctgaacatggctgtcccgaagacctcaagggatttttatcataccttgaagagatccagtcagttcgacgtcatacaaacagtacaagtgaacccagaagtcccaaccccccgctgctggtgcactgcagtgctggcgtgggaagaactggggttgtcattctgtcagagatcatggtggcctgtctggaacacaatgaggtgctggacatccccagagtgctggagctgctgaggcagcagaggatgatgctggtgcagacacttagccagtacacgttcgtgtaccgggtgctcattcagttcctgaagagctctaggctcatctaagctccaccacctttctatggggacccaatcatgtgatgtgtttacagctttaaaaagaaaaaggaaagaaaagagtgcagctcccactttgttcccaggagtccatgtggagacctcaacaggaagtgtgtaagagctgaagaagctaagcatggggctgaggagtctggggacctgggagaggccgaggaggcaggtgctgccctggccacatctgtctggtttgctgcacttgcacaagttttggagattgtattttctagacagttctctgtcgtactgaagctgcctgggcagtcccagccagcacttaaggcacacagacttctatcttaaactcatatttgataatgcaattttatgactaaatagggctttttcttttttagctagaagctgaacttttctgtgggacatccacagaccgtgtggttcttgagtacctgtatttaaaaccattattagcttttgtttaagaacaaaaaccatgggggaactaagtgttttattcatgaaatccaaaactaaagaaaatctaaaagtgttattttgaaacatagaaagcatttttatattcagaatgtttttttaaaagttatatatttgtaccttctatattttccaaataagaactccattgttatgacactgagtcaatgtaaagttggggataaaggcacattatttaaaaatctaagaatcagattcactattttttcagtattattagtaagcgtaaaatgagtttgatttttttgaacatgaaagagcaattgcataggatggttttaagcacttttttgttaaaaatgagtttaatatatgtggctttatatttaagcaacagtggacactatttcaaagagaagggctctgagtacgttcgatgactaggggaagaggaagtgctctcggggctcacccggaaggtgtggtcattacacaaatgcagtattacctatgctcacwcgagcgagagcgagagctgagatggcgtggaactcaaggcctgctaccgtgatgacgggctttgctgcctggggttcttcctgtctttcttccccccacagacaagtccaggcttacattaccattagagacccccgaagaggctttgtttcctttaggttgaaaggaggaaatagttaacgaggttcctttccctgaaccacagcccaaacttgtggggccaccagaaattgctgtggtgttcagggggtacttgaatttagcaccgtaatcctgtcctcccccagggtcagttctaggtacttggtctccctttccatcccatttgggcacattctctattgatcagaacccaggcttgaagtggaaagtgctgttcttggaggacaagctggcacccttagctgaggtgtgtcatgttgtccagtgccctgcatcgtaggctgccgattcagtgtggacctagaatgttcgacctaggactagcttccaatactgtcctgccatcactctgatttgactttgtggtgagcgtcaccacatgacaggggtgtgccagcccatcgaagcaggacagacacaggtggattgtgccccagggtgggatttgtgtgctctatgctccatgtcaagccatgtgaaggtcaggacccttctgaagcttttcttccaatggtacgttgtttgaagatgctttcctgtcacacctaaacatttggaaatatcccactgacaagaacacattgtaaaacaaaactttaattaaagagtaatatatgg

SEQ ID NO: 104 - DNA, 729 bp, Rattus norvegicus
atgtaccaggattatcccgggaactttgacacctcgtcccggggcagcagtggctctcctgcgcacgccgagtcctactccagcggtggcggcggccagcagctgtctcccgaagaggaggagaagcgtcgaatccggagggagagaaacaagctggccgctgccaagtgtcggaaccgtcgacgtgagctgacggagaagctgcaggcggagacagaggagctggaggaggagaagtccggtctgcagaaagaaatcgctgagctgcagaaggagaaggagaagctggagttcatgctggtggctcacggccctgtgtgcaaaatcagtcctgaggaacgccgatctccccccacctccgggctacagtccttacgcggtacgggcagtgctgtcggccctgtggtggtgaaacaggagcctcctgaagaggacagcccctcttcctcagcagggatggacaagacccagcgctctgtcatcaagcccattagcattgctgggggtggtttctacggggaagagcctctgcacacccccatcgtggtgacctccacacctgccatcactccgggcacttcaaaccttgtcttcacctaccccagtgtcctggagcaggagtcgcctgcgtcgccctccgagtcctgttccaaggctcaccgcagaagcagtagcagtggggaccagtcatcagactccttgaactcccccacactgctggctctgtaa

SEQ ID NO: 105 - DNA, 863 bp, Rattus norvegicus
  misc_feature (430)..(430): n is a, c, g, or t
  misc_feature (691)..(691): n is a, c, g, or t
cacgaggcccgagtcggscttttycgcscgytcccycytcscccssmgcrccgctccgsstgyaccgyrctcgytyygyrctgtswgrsdmsmgscactgtccccwkhcgtsaccatgatcwtctaccgggacctcatcagccatgacgagctgttytccgacwtctacawrawccggragakcgcggacsggctgtgcctggaggtggagggcawrawggtyagtabamcagagggygccatcgatgatycactcattggdgraaatgctyccgbtraaggtcvgraggssraaggtaccgraagcmcagtartcmccgktgttgacattgtcatgamcmatcayttwcawkwaaccagbttcaymmraragryytmshrmmrsthkwkcrarkrskdcaygrratcactmaagggcaaacttgaagrncasravbmrgaaagrgtaragccttttatgmctggrgctkcagagcarattargcacwyccttgctaakttcaataaytvccaktktttthttggtgaaaacmtgaatycagatggyatkgttgctbthctggacymccgtgaaratggkgtgacyccattcatgattttytttaaggdtggcttrvagwtggarraatkttamcaaattgkwtctwtcvscygkcvccataatkgkstgytgyttwccmtccmwwcmacnscaggacttwsgrcaaatgrgmytrawvtcatcytgmgcytttattytgmccgtsatttatttsgvstggwggcattgtttttttktybtttttwarsaaaawwmaacatgtcatrtgggttgtytaaaaataaagkgcatttaamtycmmwmraaaammwmrwrmmraaaa

SEQ ID NO: 106 - DNA, 1844 bp, Rattus norvegicus
ggaatatcagccatgcttgtcacagcgggttccctactaggggccatttggaccgtgctccatctccggattttgctgctggctgctgtcacctttctgttcctggctgatttcctcaaacaccggcgccccaagaactacccgccagggccttggcgcctgcccttagtgggttgcttgttccatttggatcctaaacagccacacctatcccttcagcagtttgtgaagaaatatgggaatgttttaagcctggattttgctaacattccttcagtggttgtaactggcatgcccttaatcaaagaaatctttactcaaatggagcacaattttttgaatcgccctgtcactcttctccgaaaacatctctttaacaaaaatggattgatcttctccagtggccagacatggaaggagcaaaggaggtttgccctgatgactctgaggaactttggactaggaaagaagagcttagagcagcgaatacaagaggaagcctaccaccttgtggaggccataaaagatgagggaggactgccttttgaccctcacttcaatatcaacaaagcagtctctaatatcatttgctctgtcacctttggggagcgctttgagtaccatgacagtcagtttcaggagatgctgaggctactggatgaggccatgtgtttggagtcatcaatgatgtgccagctctacaatatctttccaaggatacttcagtatcttcctggatcacaccaaacacttttcagcaactggagaaaactgaagttgtttatttctgatattattaagaatcaccggagagactgggatccagatgagccaagggacttcattgatgctttcctcaaggaaatggcaaagtacccagacaagactactacaagtttcaatgaagaaaacctcatctgcagtactttggatcttttctttgctggtacagagacaacatccactacactgcgctgggctctgctctgcatggccctgtacccagaagtccaagaaaaaatgcaggctgagattgacagagtgattggccaaggaagacagccaaacctggcagaccgagactccatgccctacaccaacgccgtcattcacgaggtgcagagaataggcaacatcatcccctttaatgttcccagggaagtggcagttgacacctatttggctggatttaacttgccaaagggtactatgattctaaccaacttaactgcactgcacagggaccctaaagagtgggccaccccggacaccttcaacccagagcactttttggagaatggacagtttaagaagagagaatcctttctgcctttctcaatgggaaagcgagcatgtcttggagaacaactggccaggtccgagctgttcatttttatcacttctcttatccaaaaatttaccttcaagcccccggtcaacgagaagsttagtctgcaattcagaatgtccgtcaccatttccccagtcagtcaccgcctttgcgcaattcctaggctgtgatgtcgaagaggaaagtatgaagaaatggcatctgcatggaggacactggtgtctgctcacattgaggggatagaattaaagatgactgagggagtgtgtgcaatgagactaaggaaattgaatcaagttatgggttcattaagtagaaagccacttgtgagctcaatggtacagcttcacgactgacatcttgcagagaaaaatgattcttccagaaaagaaaatgattacgggaycatggagaatggawkmmgtraytmygtaaatcataaaaacgatcataaaatttatacctttactttgaaaaaaaaaaaaaaaaaaaa

SEQ ID NO: 107 - DNA, 3118 bp, Rattus norvegicus
  misc_feature (1144)..(1192): n is a, c, g, or t
gttggccaccatggggatgtaccaagtgagactgtagggaaagaaggtggtgactcgcgtgcctggctactggctgctgctcacctcgatgctacaagattcctagcaagatcaaaactgaccattaacctacctctacatccccctggcgccgttccagggccaacgccacattccctgctgggcacgcaatggccgcaccccctcccgctacagaaggctcttttggtacacgcagtccgaggtcgccatggatcggatgaagaagatcaaacggcagctgtcaatgacactccgagggggccgaggcatagacaagaccaatggtgtccctgagcagataggcctagatgagagtggtggtggtggtggcatgacccttggagaagctcccacccgtgttgcccctggggaacttcgctctattcggggcccactcagctctgcaccaggtctacctgggtttcccagtctgctctaggggccatgtacacaaatggatacgatgaagaaatatattatattgggggaaagagagtgttcttgactccaaaggcctggcctttccctcactctgcaccagagattgtgcatgaagacatgaagatgggatctgatggggagagtgaccaggcttcagccacatcctcagatgaggtgcagtctccagtgagagtgcgcatgcgcaaccaccccccacgcaagatctccactgaggatatcaacaaatgcctgtcactaccagctgacatacggctgcctgagggctaccttgagaagctgaccctcaatagccccatcggtgataagcctcttagccggcgcctccggccagtcagcttgtctgagattggctttggaaaactggagacctacatcaaactagacaagctgggtgagggtacctatgccactgtctacaaaggcaaaagcaagctcacagacaaccttgtagcacttaaggagatcagactggaacacgaagaaggggcaccytgcactgctatccgggaagtrtcyctgctyaaggacctcaagcatgcsrrsrtcgtcacactacatgacattatccacacagagaagtccctcacccttgtctttgaatacttggacaaggacctgaagcagtacctggatgactgtnnnnnnnnnnnnnnnnnnnnnnnnnnnnnnnnnnnnnnnnnnnnnnnnntccgtggcctggcctactgccacaggcagaaggtgctacaycgagacctcaagccccagaacctactcatcaacgagaggggagagctcaaactggcagactttggcctggctyrygccaagtcaattcctactaaaacatactccaacgaagtggtgacactgtggtaccggcccccygacatcttacttgggtccacagactactcyrsccaaattgacatgtggggtgttggctgcatcttttatgagatggccacaggccggcccctcttcccaggctccacagtggaagaacagctgcacttcatcttccgcattttgggaaccccaactgaggacacatggccaggtatcctgtccaatgaagagtttagaacatacaactaccccaagtaccgagcygaggcccttctgagscatgcaccccgacttgawwgcgatggagctgaccycctcaccaagctgctgcagtytgagggtcgcaatcggatctctgctgaggatgccatgamacrhssrtwcywtctywgmttgkkggagcggmyccacaaactycctgacactactyccatatttgcactaaaggaggtacagctacaaaaggagsccaacattcggyccacttctatgcctgactcargcagsccagctttccgtgtggtggayaccgagttctaagccaagttttaagccacagaccaagsccccascaggcagcggytggagggatgccacacccctcacaggacagcccccatmtgcaatcctccctgcttgttgcctgcttacctgcctgagccacactcccctsccaacttgtcccctgccacctgyccaaacaccgaamtactggcctggcctgtyaacccamccactgscctgtctgctgggwgctaacaaagctcycmccmctwmwwwdmwwrawrwrwmwrwmwmwgtcttggtagatgctggtggaccgaatggccgtgccagctttccacactaaggctaggccttcccctcttcatcacactctctcccaggaccactaccccatggccagccaggggtttggagctagcccaggccaggctcttaatcgactttgactagaaggtagtgagtgatgccttgggtctgagcatcatttgcctgcttcccacctgtcccacttgcctctgttgtatkkkyttttttttagtttcttttattgtttttttattattttaaatgaggttctcactttttaatgcaatatctctgtatacagactggttgggcactactccctgagtgtggcmctcccacagtattttgtgcratgaagtcccactcccaccctttgagaggtagggacccasaccctattcagatcctsaccatcactagaccctkgrattggctatgggaaagcatgcctcagccactcaccttcctcccctacctagcgttcccagctatarggggaccyagaaytaccagagaktgggagatggacatggtggggcmtactttttccytccttcagtcccgtagccagggcctcsttccttmtcagggtcttcccagcccagctmtgchtagccctcctgccctgtcmtactcggtgctgtwgagtaggggctyygscwsgartcgagcagcttagtgaggagccatatawaatatgtatatgtgcmcaagcasgaggacatgtgggagcttgtgcccaattgttacaccccaatccctaggagggtcaggcaggccaaggrcagtctcctggatgrawggwttgstccccttmctccaccttaagccttgkgamccttaagcagggtgggagggcaagggagggtgccctcctagyggggtttggggggggattgggttcctgaatgcmccataatcgctgtatgaaatattaaaaaaaaagtctaaagtgammwmrwraaaaaaaaaa

SEQ ID NO: 108 - DNA, 1643 bp, Rattus norvegicus
cgggtgctccggtagctaccagggctggagagcgagcattgccatggaaatatacacttcggataactactccgaagaagtagggtctggagactatgactccaacaaggaaccctgcttccgggatgaaaacgaaaacttcaacaggatcttcctgcccaccatctattttatcatcttcttgactggcatagtgggcaatgggttggtaatcctggtcatgggttaccagaagaagctgaggagcatgacagacaagtaccggctgcacctgtccgtggctgacctcctctttgtcatcacactccccttcagtgacgccatggctgactggtactttgggaaatttttatgtaaggctgtgcatatcatctacaccgtcaacctttacagcagtgttctcatcctggccttcatcagcctggaccgctaccttgccattgtccacgccaccaacagccagagcgcgaggaagctgctggctgaaaaggccgacatcatcttcgccgatgtcagccagggggacggcaggtacatctgtgaccgcctttaccccgacagcctgtggatggtggtgttccagttccagcacatcatggtgggtctcatcctgccgggcatcgtcatcctgtcctgttactgcatcatcatctccaagctgtcacactccaagggccaccagaagcgcaaggccctcaagactacggtcatccttatcctggctttctttgcctgctggctaccgtattacgtggggatcagcatcgattccttcatccttttggaggtcatcaagcaaggatgtgagttcgagagcgtcgtgcacaagtggatctccatcacggaggccctcgccttcttccactgktgcctgaaccccatcctctacgccttcctcggggccaaattcaagasstccgcgcagcatgcactcaattccatgagcagaggctccagcctcaagatcctttccaaagggaaacggggtggacactcttccgtctccacagagtcagaatcctcaagttttcactccagctaacacttwcgcaaagrcatatatmatatatatatatatatatatatatgmcaaagaactttttttatgttacacatttcccagatataaaagactgaccaatcttgtacagttttttttattgactgttggagttwatgtttctctagttwttgtgtgtgtgtgtgtgtgtraggtttgayttaatttatataaatattggkttttttcygktgkttgtctgtttcacgtgaatgagtgtctaggcaggacctgtggccaagttyttagtcgctgtgtgtctgtgtgtaggactgtaragctgtaraggaaggaactgaacgctccrgaatgtgtggtaaatcggataaagctagaagtgaccctcagctgtcgctgcataatctyttygccccgcccaccccgttcctgaattgtttggttgtgctgtgtggtttctctgtaraagatggcacttaaaaccaaagcctgaaatggtatagaaatgctgggttttttytttcagttttcaagggtggattgatttcagtacctacaaatgtacagtcttgtattatgttgttaataaaagtcaatggtaaacttrmaaaaaaaaaaaaaaaaa

SEQ ID NO: 109 - DNA, 725 bp, Rattus norvegicus
ggcacgaggcsrckwsggkagcgrccggctgtcywbkgmtgcttgavcggcgycmgcacyttccywaggagctmgcakcagccgghygkccybygbwccryggtaaccrwgkgcgaccgsmasrmggtgatcaaaaatgcagmcatgtmggwagagatgcaacaggactcgrtggagtgcgytayycaggcgttgvakaagtmcaacatmgagaaggatatygcggcccatatcaaraaggagtttkacaavaagtacaacccyacytrgmahtgcatygwggkccggaayttcggtagytaygtgacacaygarrccaamcacttcatytacttctaystgggtcaggtggscattstyctgttcaaatctggtwaawagcatgkhytgtgccaaacacycagtgatcymtccaaaaacaakgdctgcatsctaaattccaaataccakagaytgaatcttcwkcbttgmtaagggracacstcgtttgmatctkktgtgttttgwayaksgcaccatkstytgwacaygyytgtrrkwataaamwtaktaaamcmgcwwammwwwrdawwwawwwwvwarwmmatacttctgtmcccccatttttttctccsttaggtcattcckktaaamtaaatctgttgragrtgtwwwmmaaaarmwaawwwaaagcaaaaatgggaaaggaaaagactcacataaacatcgtcggaattggacacgtg

SEQ ID NO: 110 - DNA, 982 bp, Rattus norvegicus
cgaatgttcccccagctgtttcctgtctacagtgtctgtgttttgtagataaatgtgaggattttctctaaatccctcttctgcttgctaaatctcactgtcgctgctaaattcagaccagatagagcctgcgcaatcgaaataaagtcctcaaaattgaaatgtgactttgctctaacatctcsmatstyycyssakctktttcctswytaywstgycyryswwttgyakwtmmakactttgtacttcagaagcgatggggaaaatcagcagtcttccaactcaattatttaagatctgcctctgtgacttcttgaagataaagatacacatcatgtcgtcttcacatctcttctacctggcactctgcttgctcacctttaccagctcggccacagccggaccagagaccctttgcggggctgagctggtggacgctcttcarttcgtgtgtggaccaaggggcttttacttcaacaagcccacaggctatggctccagcattcgragggcaccacagacgggcattgtggatgagtgtwgctyccggagctgtgatctgaggaggytggagatgtactgtgctccgctgaagcctacaaagtcagctcgttccatccgggcccagcgccacaytgacatgcccaagactcagaagtcccagcccctatcgacacacaagaaaaggaagctgcaaaggagaaggaaaggaagtacacttgaagaacacaagtagaggaagtgcaggaaacaagacytacagaatgtaggaggagcctcccgaggaacagaaaatgccacgtcaccgcaagatcctttgctgcttgagcaacctgcaaaacatcggaacacctgccaaatatcaataatgagttcaataccatttcagagatgggcatttccctcaatgaaatacacaagtaaacattccgacattgtctttaggagtgtttgttaaaaaaaaaaaaaaaaaaacaaaaac

SEQ ID NO: 111 - DNA, 1611 bp, Rattus norvegicus
ccaacaccatgcgcgagatcgtgcacatccaggcgggccaatgcggcaaccagatcggccctaagttttgggaggtgataagcgatgagcatggcatcgacccgacgggcagctaccatggcgacagtgacttgcagctggagagaatcaatgtgtactacaatgaagctgctggcaacaaatatgtacctcgggccatcctagtggacctggagccaggcaccatggactcagtgaggtcgggaccattcggccagatcttcaggccagacaactttgtgttcggtcagagtggtgcaggaaataactgggcaaagggccactacacagagggtgccgagctggtggactctgtcctggatgtggtcaggaaggagtcagaaagctgtgactgtctccagggctttcagctgacccactcattggggggaggcactggctcaggcatggggaccctgctcatcagcaagatcagagaagagtacccagaccgcatcatgaacaccttcagcgtcatgccctcacccaaggtstcbgasrcygwggyggagccctataatgccaccctytccgtgcaccagctggtagagaacacagaygaaacctaytscatygacaaygaggctctgtatgacatctgcttcccgcacctgaagctgaccacrcccacctatggcgatctcaaccacctggtgtcagccaccatgagtggagtgaccacctgcctgcgcttccctggccagctgaacgcagacctgcgcaagctggctgtgaacatggtgcyyttcccrcgcctgcacttcttcatgccaggcttcgcacctctgaccagcaggggcagccagcagtaccgagccctgacagtgcccgagctcacccagcagatgttcgactccaagaacatgatggctgcctgcgacccacgccatggccgctacctgaccgtagccgccattttccggggccgcatgtccatgaaggaggtggatgagcagatgctcaacgtgcagaaymrgmacagsagctacttcgtggartggatccccaacaatgtgaagacgsccgtgtgtgacatccytyctcgtggcctcaagatgtcmgccacmttcattggsmacagcaccgscayccwrragctgttcaagcgcatytcggagcagttcactgccatgttcmggcgcaaggsyytcstgyrstggtacacsrrcrmgggywkrgacragatggagttyaccgaggcggagagcaacatgaatgasytggtgtytgagtaccagcagtaccaggaybccacggytgatgagcagggcgakttcgaggaggaggaggsygaggwtgagscttgagttccccaggccaagcaggttagggaaasytgaggygawaggagggggtggggggtcttaatctgtgaaaataccttgscagttggaagaaggagaatggtcttaggtttgtgmtgggtctctggtgctmwtcactgktgcctstcactyttttctcttyttgtaatatcgatracrtcratgtrayrcttgagatctttytgaacycctgttgtratggctraaatcrcmtramcctttgtgtcctaaaaaaaraaaaaaaaaa

SEQ ID NO: 112 - DNA, 545 bp, Rattus norvegicus
tttttttttttyyttttgcsrmvmkvgskggattgmasycgvcamrakgaagttcrrbmhsddsgtgacttctgaccgaagcaagamccgcaaacggsatttcaatgcaccatctcacattcggaggaagatcatgtcttmkccgctttccaaagaaytgagacagaagtataatgttcggtytmkgccsakkcgaaaggmcgasgaagttcaggttkttcgaggacaykvcarwggycwgcagattsgcwamgtggyccamgtdtwcwgkmwsmamtacgtcaybtacattgagcrastccagcgrgagaaggcyaacgscacaactktccatgtgggyaycyrccccagcaaggtsgktatcaycaggmtaaagytkgacaaggmccgcaagaagatyytggagaggaaavcyaagtcycggcawgtaggaaaggdgamrgbcaaatacaakgamgaaactatckwgaagatgcasgagtagaaawrtmatgcccasktttcawtaaakamwgcttargtwrwvvaaaaaaaaaaaaaaaaaa

SEQ ID NO: 113 - DNA, 619 bp, Rattus norvegicus
  misc_feature (257)..(257): n is a, c, g, or t
cgggcagtgagcggtcctcttttcmwsmwtymsmrvwbsgkyaccgdvrysakswtgratgrcwcggbvhssakscggmccagraagttcatgasrmacbrkstgcttcagaggmaacmkawggtsmywgatgtccttmakcctgggmaggccwyrsyacsaaagacagaaattcgggaaargcygrssaagatgtacaaaaccacvscagakgtcatctttgtatttggakycagaayycrbywygrtggaggmanrmsrmctgsctttggcatgatstatgattctytmgrttatgcaaagaagawtgmgcctaaacacmgacttgcgrgacwtggcctttdtgrgaagaaaamgmcctycsgcarmcwgcgaaaagaacgaaagmacmgamtkargwwkgtcmgggggactgcaaagkccaatgttgstsctkscmawwagtgagtggmgactggatacabmmraagrdgwarktytacrgtgaskkgatgtwctsctgwkryakssaaakkwstgrgkstamrrtarmctwrawrwbstdhwrhrrdwhdvraawwwmwrarrrwaaaawaaactaaaaaagcttctgcgagtctggaaaaaaaaaaaaaaaaaa

SEQ ID NO: 114 - DNA, 1282 bp, Rattus norvegicus
  misc_feature (89)..(103): n is a, c, g, or t
  misc_feature (1230)..(1230): n is a, c, g, or t
tttttttttttttttttwwtgcttataaattatatttattagtatggtcaggtcaggataagaaaggagtttgggctttgattataaannnnnnnnnnnnnnnctgattctcttggctaaacttttcctcttyttttttyywtttttttcyttgctgtcttccatctttctggctcgtatttccctcattaaatcaaaaaataccttgtcaacgttggcgcgcgttttagcagacgtctccacatagttaacgttccactggtcagctctgttttttgcctcttctacagaaacctgccttttatcttctaaatctgatttgttaccaaccaggagaaatgggacattcycatcttcttttactcttaaaatctgttccctgaagtccgctgtagctgcaaaggactccatctctgtsrtrsmgaakwcacagaggaatccttccccacttcggaagtagttgtctctaattgcagcgtagtcttcctgccctgctgtatctaagatgtcgatctgcacttcctccccatccagcactaccttcttcctgtagcystctgcyttggtaggttcatagtcttctacaaactcatcatacatgaactgcagagtcagagcagacttgcccacaccaccactgcccaccatgatgactttgtgtaaggccaaagaattctgacccttgggcttgtttgcagccatcctgtgtgyrgycytcagaggmctgaaragawtckgcamsgccatgccatcsagactgaggmmrasvsggaaavwbsggsrcsasgtradccacgsccacggwcgcatcggtaakcmccgcaagcacccaggagsccscgggaatgctggaggcatgcatcmccmcargwtcaactttracaaatrkcatysaggttacttcggcaaagttkgcatkagkcattmccmcytkaarmggmacsavrgctthtgcccaactgwcaacctggmyvaatyatggmcgttgstcagcgagcaracacggktcaatgcagcaaaaamcaagawtggagttgctyccmtcattgrcgytgttcgatcaggstamtacaaagttykggggaaggggaagcyycmtargcaaccwgtcatcgtraaggccmagwttttcagcaraaragctgaarrgarrwtaaagggtgtgggaggkgcctgtktcctggtggcttaarkccmcttcrrwggvtaattaaatgcaaacmtttwmmnwrhvrhmwawamamaaawmwmrmrrmmaaaaaaaaaaaaaaaaaaaaaaaaa

SEQ ID NO: 115 - DNA, 709 bp, Rattus norvegicus
  misc_feature (19)..(70): n is a, c, g, or t
  misc_feature (125)..(125): n is a, c, g, or t
  misc_feature (151)..(151): n is a, c, g, or t
  misc_feature (236)..(236): n is a, c, g, or t
gggggaaaagaagttattnnnnnnnnnnnnnnnnnnnnnnnnnnnnnnnnnnnnnnnnnnnnnnnnnnnntgtctctataargcacgarggcgggcgccgcactsggctgcwmgykccgkyrsgnrsmdrggakccatttccatcggvbdnkgccraaactvgtgtgghtccctyhcsgcmmcmrscamrakggtgargcygakcgagagcaakgargsywyycagsagscybwgnyysyyrcrrraramawgsbtrtggtwgwkgacttbtmtgccacgtggtgtkgamytkgcamrrkgwtsadgcmyktcttkcaktmccysygksrcragdmkkccrakgygkhrhkmsktraagtrgamgtggatgactgccaggatgkwghtgcagactgtgaagtcaaatgcatscygwchtkccagytbtatmaaaagggtcraaaggktsvggagttmthtggtgctaacmmgbmmmmsmyysaagccrctatymsggagtttgcctaatcatgctstgaaaagtgtgaccagctscagcaggytaaaacctgtaccttttttaatttgcavaaataacmtatgaagtgtggagagtytatacccwamtgccatctgattataaatgmcaawwaaatawtamwtctmmmmwwwwwwmammmmaaawmaaaaaamwmrtacattgcgtccgcgagcttattgctattagtg

SEQ ID NO: 116 - DNA, 677 bp, Rattus norvegicus
  misc_feature (3)..(7): n is a, c, g, or t
cannnnnmtckkymbrdssmkrsrmksssyrmgsvmrwwgscatghbbrgywsragssccarrattgtraagcccaatggcragaascsrkacgagytcsagthwgscrwmkctcakgydcwgctcgagctgkagatgaactcsgawytgaagdcgcagctgygggaactcaacatcaccgcggcaaaggaaatcgaagtcggwggtggtcgaaaasccatcataatytttgtmccagttcstcagctgaaatctttccagraaatccaagtccggywagttcgygaattggagaaaaagttcagtgggawacacgtagtcttcattgctcagaggaggattytgcccaasccaacccgaaaaasccgtwcrvaaawtwagcwaaagcgccccagaasccgcaccctgasagcagtscacrackccatccttgagrattygswckksscamgwgraattgtgggcaagrggatccgtgtgaaahtggwwggcasccggstcataaaagttcatttrgacwaagcacagcagaacaacgtggagcayaaggtcgaaactttdtytsgcgtgyacaagaagctcmcmsgcamggatsttaactytgrmttcccagartttcmgttgtaargaaaatgactgawtamwhtgkmattcwwwdwwawmwwawrmrrmmrmaa

SEQ ID NO: 117 - DNA, 430 bp, Rattus norvegicus
  misc_feature (6)..(6): n is a, c, g, or t
  misc_feature (15)..(15): n is a, c, g, or t
  misc_feature (63)..(63): n is a, c, g, or t
  misc_feature (66)..(67): n is a, c, g, or t
atggcnccgcgccgntttggagtaattttgagagtttttgaatttgcgccgcgttgacacggntgnngagaagagrcasraggckkymmgwsdccgscaysakgrrcmcgagkcrmghgsagcccatcaagctgghtagrgtarhtaaagtgctgggcaggaccggwtmgcagrgacagtscaygcagrtgcgaktggaatttakgsaygasvccagccgctytatcatccgaaacgtcaaaggccytgytmgaraggrtgatgtgctcaccstgttggagtcagaaaragaagytcggaggttgcgctgaccttgctgmtgggtthtggatayccrctcsttagcccatggaatgacctgcaactgttaaataaagcatttsymkycawwmwwrwmwaraaawaawaaawaaaaaaacaattgcgtccg

SEQ ID NO: 118 - DNA, 1804 bp, Rattus norvegicus
  misc_feature (8)..(29): n is a, c, g, or t
  misc_feature (180)..(180): n is a, c, g, or t
  misc_feature (1770)..(1770): n is a, c, g, or t
tgccttcnnnnnnnnnnnnnnnnnnnnnntttttttttttttttykywwydbdddkgcckwsarwwhkcakgtgttgwgaaarccaccghtaattsrawscmaaaatgggaaagsaarasactcacatcaacatmgtcgtaattggacacgtrsattccggmaaswcsassayawccggnvacckgakctacaaatgtggtggratcgmcaaaagaaccattgaraagtttgrgaaggmggctkcggmgatgggmaaaggstccttcmvgtmtrsctgggtcctggdcaaactgaaagctgagcgtgagykbrgtatcamtattgacatctccctgtggamgtttkagmccagmaagtmctatgtgmcyaysaktrmtgccccaggvcacagmgacttmatcavgracmtrmttacgggsacatctyaggytkmctksgstkbcctgattgttsctgctggtgtyggggaawttgaagchsgkakctyvmmgaahkggcarmscsgtrmsmakgcycttckggytwacamyttkkgtgtgaaacrrywmrwkgttggtgtmaacawaatggattccaccgagccaccatwcagtcagaakrgatacgaggraatcgttamggaagtcagcacctacattaagraaatkggytacaaccctgacacagtagcatttgtsccmattyctggttggaatggtsacarcatgctggagccawgtsctaatatsccgtggttcamgggakggaragkcaycmscmwmgatggcagtgccagtggsamcacgctgctggaagcttkgsmctgcattctssygbcarctsgtccaaytracaagcctctgcractgcccctccaggatgtctataaaattggcggmayksgcactgtccsygksgrysgwrtggaamctkgkgttytcaaacctggtatggtggttacctttgctccagtcaatgtaacaactgaagtcaagtctgtggaaatgcaccatgaagctttgagtgaagctctscctggggacaatgtaggcttcaacgtaaagaacgtgtctktcaaagacgttagacgyrssvakgttgctggggacagcaaaaatgacccaccaatggaagcagctggcttcactgytcaggtgrttatcytkraycatcmmggccagatcagtgytgsytatgcccctktthtgraykrbyabmbggcccacatagcatgcaagtktgccgagcttaaagaraagatcgatcgtcrtthtggyamgargbkggrmrakgsscccmmwytyttgaagtvtggtgwtgcysccaktgttgamatggtccytgsmaagccmatgtgtkwtraaagyttstctgahtacccyccahttggtcgwtwtrmtgttcgtracatgaggcagacagttgctgtgggtgtcatcaaavccgtggacaagaaggmtgcagrrghtggcmawgtcmccaagtytgmccagaaagytcagaargbtwaatgaatattatycytaacaybtgscamcccagtyttmatcagtggtggaagaacggtytcagaactgttkgtytcahtkggscatttaagttyaatagtmaaagaytggttamtgataamaawrmwwmrwmramccttcagaaggamagaatgttttgtsgaccwtwttykktgtgtgtggcagtkttaagtyaykastttksmhmvkcmrkactttttaatggaaacaacttgrccaaaaatctgtcmcagaattttgrgrccattaaaacaagtttmnygdraaaraaawaaaaaaaaaaaaaaaaaaaaaa

SEQ ID NO: 119 - DNA, 807 bp, Rattus norvegicus
  misc_feature (33)..(33): n is a, c, g, or t
  misc_feature (185)..(185): n is a, c, g, or t
ttttttttttttttttttwwtttttttttkdknykgkcctarkttgtttawtggrtatgawtttyacaratattacgtcaattagcggtaacggkggrgctgaarartgttgckccttctccaggctgsacggsgagacccaccaatggkgtggkggaacttgkggsccttycmaagrscrcggntcttrcggscakcagatgtcagcccacgcatctccctgtgcttgtggactggkttggtaayccattgggkgtcsrgatttcttstgatrgctttatggvatggrtcaatgaggatarcctcawarrrwttatatgtggratcttcaccaacccagtakgamttcaggrstckcaragctccamaatggsgsycagctctctcctcagcarcagactgaakgsttcgggcaaacttcagytggktaacaccgtggtggacaggcttgcygtargttgsacccttagraacygggcgcttgcgamcwvcgcgksggrswcggawyctgtamayswcrtrmccttgcttagscttgtatmccagscttcgmgccttatyagrccgggtggggcggsvwgcsctgtgcagcgcaragagctggsggtactgscarcagcggacccttagaaggragcgcatcacgtcggactgcttcttcctccrcagctcctggatgtatttgtatgcacccayctyggctcacctgatgsykscstvgwgcgawwctggmwsragscwwttccyayawksycktwtratsgmtccwsymymwstyccggtgaatgtaccgcacatcaacaaaca

SEQ ID NO: 120 - DNA, 3020 bp, Rattus norvegicus
  misc_feature (166)..(192): n is a, c, g, or t
  misc_feature (195)..(220): n is a, c, g, or t
  misc_feature (1886)..(1926): n is a, c, g, or t
atgtcacagtggttcgagcttcagcagctggactccaagttcctggagcaggtgcaccagctgtacgatgacagtttccccatggaaatcagacagtacctggcccagtggctagaaaagcaagactgggagcatgctgcctacgacgtctcgttcgccaccatcnnnnnnnnnnnnnnnnnnnnnnnnnnngannnnnnnnnnnnnnnnnnnnnnnnnnagaataatttcttgttgcagcacaacataaggaaaagcaagcgtaatctccaggataacttccaagaagatcccgtacagatgtccatgattatccacaactgtctgaaggaggagaggaagattttggaaaacgcccagcgatttaatcaggcccaggagggaaatattcagaacaccgtgatgttagataaacagaaggagctggacagtaaagtcagaaatgtgaaggaccaagtcatgtgcatagagcatgaaatcaagaccctagaagacttacaagatgaatatgactttaaatgcaaaacctctcagaacagagaaagcgaagccaatggtgtggcgaagagcgaccagaaacaggaacagctgctgctgcataagatgttcttaatgcttgacaacargagaarggagataattcacaaaatcagagagctgctgaactccatcgagctcactcagaacactctgattaatgatgagcttgtggagtggaagcgaagacagcagagtgcctgcattgggggaccgcccaatgcctgcctggatcagctgcaaagctggttcaccattgttgcagagmgcctgcagcaggtccgtcagcagcttaaaaagctggaggagttggaacagaaattcacctatgagcaggaccctattacaaaaaacaagcaggtgttatccgatcgcaccttcgtcctcttccagcagctcattcagagctcctttgtggtggaacgacagccgtgcatgccaactcaccctcagaggcccctggtcttgaagactggggtacagttcactgtgaagctgagactgttggtgaaattgcaagaactgaactataacttgaaagtgaaagtctcatttgacaaagatgtgaacgagaaaaacacagtgaaaggattccggaagttcaacatcttgggtactcacacaaaagtgatgaacatggaagaatccaccaacggaagtttggcagctgagttccgacacctgcaactgaaggaacagaaaaatgctgggaacagaaccaatgagggtcctctcattgtcaccgaagaacttcactctcttagctttgaaacccagttgtgccagccaggcttggtgattgaccttgagaccacctctcttcccgtcgtggtgatctccaatgtcagccagctccccagtggctgggcttctatcctgtggtacaacatgctggtgacagagcccaggaatctctccttcttcctgaaccccccgtgtgcgtggtggtcccagctctcagaggtgctgagttggcagttttcgtcagtcaccaagagaggtctcaacgctgaccagctgagcatgctgggggagaagcttctgggccctaatgctggccctgatggtcttattccatggacaaggttctgtaaggaaaatattaacgataagaatttctccttctggccttggattgacaccatcctagaactcattaagaagcacctgctttgcctctggaatgatgggtgcatcatgggctttatcagcaaggagcgagaacgtgctctgctcaaggaccagcagcccgggacgttcctgcttaggttcagtgagagctcccgggaaggggccatcacattcacatgggtggaacggtcccaaaatggaggtgaacccgacttccnnnnnnnnnnnnnnnnnnnnnnnnnnnnnnnnnnnnnnnnnactttcccagatattattcgcaattacaaagtcatggctgctgagaatataccagagaatcccctgaagtatctgtatcccaatattgacaaagaccatgccttcgggaagtactactccaggccaaaggaagcaccagaaccgatggagctcgatgaccctaagagaactggatacrtcaagactgagttgatttctgtgtctgaagtccacccttctagacttcagagcacagaaaacctgcttcccatgtctccagaggagtttgacgagatgtccaagatagtgggctctgaatttgacagyaygakgagcgcagtataaacacgaatttctctcttctctggcgacatttttcttcccatctgtgattccttcctgctactgttccttcatatgctgtatttctagggaaatcaagaaagaacagcccatttgttgaaccctgttgatagcaagtggatatttctctaattagaaacctgttactctgaaggacttcatgcagctcactgaargtgaaatggaaagttacttatgcaaagtggattttgtraacaaaaaacaagagagccacycacgcctcadgaccsgagtgtgagtgttraggragggtragragtactctagtaatactctgtagwcagtgcmtacgtgctgcactgraagatacttacgtggrgagggasywtcatratgtggggatacttctgtsctggagatacatgtsccctmtyctctatggctgcaagwvttccactgtcttacgtwtggcatggttcaaagkcaactytagatacaatgatatatyagactggrgtgggcatccttmatcagagtggraaggaaacagwcgtgttccttwatgcarcttctgcattggccgkgtwaawcttaargcttggktgctctyttyargattagmtttgktggkggmtatggstgracaaaactaaacaccagtwgaagtrggracayyttyatgagkactythttcagwctgkmmtccaccaarmtaaacggktttkgctgybtttttggtcawtggtkgamwaaaatkstctttgcacatctawwaarrrrmrwaamwwttg

SEQ ID NO: 121 - DNA, 121 bp, Rattus norvegicus
gccaagggtggctgagctgcaccacccactctctatagcttcaagtctgccttctacggatgctttgagagaaaaccaaggctttattttcccttcttgtagtaaccgctctagttgtggg

SEQ ID NO: 122 - DNA, 2062 bp, Rattus norvegicus
  misc_feature (1504)..(1531): n is a, c, g, or t
atggagcaggtgaatgagctaaaggagaagggcaataaggccctgagtgctgggaacattgatgatgccttacagtgctactctgaggcaattaaactagatcctcagaaccatgtgctctatagcaatcgctctgcagcctatgccaagaaaggagactaccagaaggcgtatgaggacggttgcaagactgttgacctgaagcctgactggggcaagggttattcaagaaaagcagcagcccttgagttcctaaaccggtttgaagaagccaaacgaacctatgaagaaggtttaaaacatgaagccaataatctacagcttaaggaaggcttgcagaacatggaggccaggttggcagagaggaaatttatgaatcctttcaacttgcctaatctgtaccagaagttagagaatgatcccaggacaaggacactgctcagtgaccccacctacagggaactcatagagcaactacagaacaagccttcagacctgggcacgaaactccaagatccccgggtcatgactactctcagtgtcctccttggagttgatctgggcagtatggatgaagaggaagaggcagcaacacccccacctccaccccctcctaaaaaggaggccaagccagaaccaatggaagaagatcttccagagaataagaaacaggctctgaaagaaaaggagctgggaaatgatgcctacaagaagaaagattttgacaaggccctgaagcattatgacaaggccaaggagctggaccctaccaatatgacttacataactaatcaagcagctgtgcactttgagaagggcgactacaacaaatgccgggagctctgtgagaaggccattgaagtaggcagagagaaccgagaggactaccgtcagatcgccaaagcttatgctcgaattggcaattcctatttcaaagaagaaaggtacaagsaygmkrtccatttctacaacaagtctctggcagagcaccgaaccccagatgtgctcaagaagtgccagcaggcagagaaaattctgaaggaacaagagcgactggcttatatcaaccctgatttggctttggaggaaaagaataagggcaatgagtgcttccagaaaggggactacccccaggccatgaagcactatacagaagccattaaaaggaacccaagagatgccaaactatacagcwaccgagccgcctgctacaccaagctcctggagtttcagctggcactcaaggactgtgaagagtgcatccagctagagccaaccttcatcaagggttatacacggaaagcagctgccctggaagccatgaaggactatacaaaagccatggatgtgtaccagaaggcattagacctggactccagctgtaaggaagcagcagatggttaccaacgctgtatgatggcacagtacaacagacatgatagccctgaggatgtgaaacggcgggccatggstgaccctgaggtacagcagataatgagtgacnnnnnnnnnnnnnnnnnnnnnnnnnnnntgcaaaaggacccccaagctytgagcgaacacttaaagaatcctgtaatagcacagaagatccagaagctgatggatgtgggtctsatcgcaattcggtgataacttgcttttcccctctccccttcscmgatgaggaaaggcgagytgggacggtggcaagcagtactgggcagaggggggagaagaaargcttatctktatattkatacrtgccyacaaggaagacagactcatccagtsccacckcgsrcsmksccagcacasgcatggtcttttcaytgytgcccccaattccgaatatccttccctgcccattcccagcytccccgtcactgtytcagctgcttccctatagttggttatwtttyatttggggcagtgggtgcatacggggaggggagggtattyttcccaacctaaggtccsaactgtcytacktgttmwtacccatgtcccccctcaataaaacaarccwgtcaggcgtggttawawrwwdamamaaaaaaaaaaamaaaaaaaaaaaaaacat

SEQ ID NO: 123 - DNA, 1775 bp, Rattus norvegicus
gtagtgccggwwybdkbwkdktttcaacctagtgacagtcacagagcagcaccaccccctcctcctttccacacctgcaaactctcttgcttgggctgcattacttagtgttaattacatcgmagctttgagggctccggtggcawwtacccggattaaaaggtggtgawwwcgyatgagacaaccatgaaggcaactctcgtcttattccttctggcrcaagtytcytgggctggaccatttgagcagagaggattatttgacttcatgctagaagatgaggcctctggcataatcccttaygaccctgacaatcccctgatatctatgtgcccctaccgatgccaatgccatctccgagtggtgcagtgttctgatctgggtctggacaaagtaccctgggartttccacctgacacaacattgctagacctgcraaacaacaaaataacagagaksramgagggggcctttaagaacctgaaggacttgcataccttgatccttgkcaacaacaagatcagcargatcagcccagaggcatttaaacckctagtgaagttggaaaggctttatctgtctaagaaccamckaaargagstgcccgrwwwatygyycaaaacactccaggagstyygrctycacgacaakgagadcaccaaactgaagaaawctgkgttcaatggactgamccgtatgrwtgtcatagaaytgggcggcaacccactgaaaaactctkggattgwaaatggagccytkcaggsaatsamrrskytcggatacatccgcatmkvaracaccaacataactgctwttcctcaakgtmtgcccacttctatcagtgaactgcatctggayggcaacawraymgccaaagttgatgcagccagcctkaaaggaatgycyaatytgtctaagctgggtttgagcttcaatagcatcaccgytrkrgawaawggcakkcyggctaatgttcctcatctgagggagctscacytggacaacawcaaactcckcwkagwgsctgctgggctggcwcagcataaatatgtscaggwcgyctaccttcataacaacaacatmtscgaagwtgggcagcatgacttctrsctmcmytcataccagaytagrragacttcmtacactgscrygarkstttatwgcwaccctgtccggkattggsrwattcayccacacaccttmakatgtgksytcrggcgctmtaccattcaactkgggamctmmaaskaackcycmaacagsctcatwtttataatcgggaacamraaaaccaathygtcaatattattgctaaaamraaaaaaawawwwtgaaaaagaaagaatgctagattctggaaattcaagtatagcgcggatgcctttcccgtatgacttatcatgcatcaasccaaatatacagattgaataattacytacaatmmmmmyattttatytswarwahwmaraawmmmwwwtaaaatttyctgtagatgtgaactgaggtatcgaagtmtgrtgtaatcmtagatgtcaacatttaataaagctaaaaggamcmgaawamaaarwmwwmwrwaattcatagagctaaattgactcttttgacataaagtcaaatgtagaactcyagcaatgtattaatctcctttattattggwaaagtcytatytgaatatctaagttcaacatgggctatgtaaaattttcactgtcatactgaaaaacaataaaatttawwaawtgcawwmaaaawrraaaaaaaaaaaaaaaaaa

SEQ ID NO: 124 - DNA, 2924 bp, Rattus norvegicus
atacgattctgaaggttccagaatcgatagtgaattcgtggaaagccgctcagtaattctcgtattatttaaagaaccactacactacaggatggcatctaccctggccccgattactagtactctagctgctgttactgcttctgctccaccgaagtatgacaatctgtggatgctcatcctgggcttcatcattgcatttgtcttggcattctccgtgggagccaatgatgtagcaaattcatttggtacagctgtaggctcaggtgtagtgaccctgaagcaagcctgcatcctagctagcatcttcgaaactgtgggctccgccttgctgggggccaaagtgagtgaaaccatccggaagggcttgatagatgtggagaagtacaacgcaactcaagatctgctcatggctggctctgtcagtgctatgtttggttctgctgtgtggcaactagtggcttcgtttttgaagcttcctatttctgggacccattgtattgtcggtgcaaccattggtttctcccttgtggcaaagggacaagagggtatcaaatggtccgaactgataaaaattgtgatgtcttggttcgtctctccactgctttctggtattatgtctggaattttattcttccttgttcgtgcattcatcctccgtaaggcagatccagttcctaatggcttacgagctttacccattttttatgcctgcacaattggaatcaacctcttttccattatgtatactggagcaccattgctgggctttgacaaacttcctctgtggggtaccatcctcatctcggtgggatgtgcagttttctgtgcccttatcgtctggttcttcgtatgtcccaggatgaagaggaaaattgaacgagaagtaaagtctagtccctctgaaagtcccttaatggaaaagaagaacaacttaaaagaccatgaagaaacaaagatggctcctggcgatgttgagaataggaatcctgtgtctgaggtagtatgtgccactggcccactacgggctgtggtggaggagagaacggtgtcatttaaactcggtgacctggaggaagctccggagcgagagcggcttcccatggacctgaaggaggagaccaacatagatggtactatcaatggtgcagtgcagttgcctaatgggaaccttgttcagttcagtcaaaccgtcagcaaccagatcaactccagtggccactatcagtatcacaccgtgcacaaggattctggcttgtacaaagagctgctccataagctacatctggccaaggtgggagactgcatgggagactctggggacaagcccttgagacgcaacaacagctacacatcctacaccatggcaatatgtggcatgcccctggattccttccgtgccaaagaaggggaacaaaagggagacgaaatggaaacgctgacttggcctaatgcagataccaagaagcggattcggatggacagttacaccagttactgcaatgctgtgtctgaccttcactcagagtctgagatggacatgagtgttaaggcagagatgggtctgggtgacagaaaaggaagcagtggctctcttgaagaatggtatgatcaggataagcctgaagtgtcccttctcttccagtttctgcagatccttacagcctgctttgggtcctttgcccatggtggcaatgacgtcagcaatgccatcggccctctggttgctttgtatcttgtttatgaaacgagagatgtcactacaaaagaggcaacacccatatggcttctgctttatggtggtgttggcatttgcatggggctatgggtttggggaagaagagttatccagactatggggaaggacctgacaccaatcacaccctccagtggtttcagtattgaactggcatctgccttcactgtggtcgtcgcatcaaacattggccttcccatcagcacaacacattgtaaggtgggctctgtggtgtctgttggctggctccgatccaagaaggctgttgactggcgactgtttcgaaacatttttatggcctggtttgtcaccgtccctatttctggggttatcagtgctgctatcatggcagtgttcaagcacatcattctgccggtgtgaagctgarctcagaattgtgtcagtgtctgggaccatcgcacacacccctkttyytwwwkwwtkstmakwrwwrytgwwkatwgvmcrrggwtytvdrrygbbggagctgtgggaaggaagtgtaatttatactataattgcttttgtgctwaatatgacytatctcaaaattagctgkgtaaawwasccasgtttccatkgattcattctarggtcccttttctcytkggctatgacttcctgtacatawttctcwamytttgkatmargcatmaattcmatwwtgytytaatgkcgkstgkgagatamcttaatgtggattcyttttaaacrgycwmgcasagmcmyttgrtggsrtatacygstttgttggsctmamcarcttcttccccagcgtgcacagggatttaacaacatgtaactgaagcttcccttgtagtctctcatagaaatagtcacggcactctgctccctgtcactagtggcaggttctgttgacatgtgacaacttcttagagggccgagaatctttggcacagtgaaaawttaagkttgtagtaamttctttgcaaacarttcgtggacgtgttkctaagaagtaggaagacaaagcctggtggktgtggktattcttttgagawttctggcagtgtgggatgggtgaatgaagtggaatgggaactttgggcaaattcaatgggacagccttccatgttcawctgtstacctcttaactgaataaaaagcctacagtttttdraaaaaaawaammwmrwrwtcgcggccg

SEQ ID NO: 125 - DNA, 2918 bp, Rattus norvegicus
  misc_feature (46)..(46): n is a, c, g, or t
  misc_feature (261)..(261): n is a, c, g, or t
  misc_feature (470)..(470): n is a, c, g, or t
cgttgtctcgctctgtcgtcttcttggttgttcgtgtgctgccgcntctgtatgtaggttgatgtccgttacgtccgattaacagcgagttgtcctccctgaggcctgtttgtggcacgcgtttccatgacggcctttcttgtgtcttttgccctctgtggctttcgtccgtgttctacacgccctaccgggtgagggtttgagctgcccggactgttcgcagctaacgcggtagacacctcgggctcctcatcttgtganccttggacccgctgcttcatcggttaatttgamggctgttawtaatcttagtgtakgaykaskgsyytkttcaktkatctataatttacctaagattacaaatcagaagtcatcttgctmccagtatttagaasccamccatgattatkaatgatgyccagcckktytgaccarscagggtccttytgacackgcwckarsgccctctntgcactccacytgacaycaggcgmtcattcaaagratttcktaacttcctgcttctttytagaaagagawacagttggtaacttttgtgaattrggctgtaactwctttawaactaacatgtcctgcctatkttctgtcascwgbkarkwwytyyrrykartcabwaytwmagagytttactmmwwaamarawwmmawwggcagagctctggggtgggcacccagtgtttggaaacttgatcagccagaaaggcccaagtccacgcagctgtggcagagttacagwtctgtggtstcatgttagttaccttatagttactgtgtaattagtgccacttaatgtatgytmccaaaaataaatatatctaccccmrrmwarawrwarwawwwwwwrwawaawtggawttcctaattctgawatttgtcattcccacagaaagtgtattkyttttttttttttaagaaarkatttggaaataaagtcagatggaaaawtcawwwwwaaaawwmmmawwktgtcactttctytgataaaawatggccatatctcccmtatttagccctatatatcattccagtgccccttyccagactggactsaggaaataggaattggtdkcrtgcctkrggctrktagmctktggaggtggcatagcctttckcasctggmmtgcagggcytggcthtaagtcrcagtgytcckktcwccacamwgwtakmcaagtsgccwsmsagaggagmmamyagwkhkwawgrgkgrmrrtggrwggrhrgrtvrggggtctcctctctccagctgactaaacttttttctgtaccagttaatttttccaactaatagaataaaggcagttttctaaamwwmmwrwawmmwrrtgtgtgttttgttttcagcagggctaggggctgggagacatgaagactcggcctctctttctaacctctccctggaagggttccttcttgaatggtaccagctcttcccactcccccactcaactggactaacccatctcctcctaagaacacggaagtgattatcctgtgacacactcgaatctaaaaagtggagtggaatgcccctgtagtgagatgaaggggctggattttctgaattaagaccaagcttcactgggacagaataggaccactagaaacactgatgttagtgtgctttggtgcagagttctaagaggggctagcttggggtctggggctgggagccctccaccgctgtccacccttacaaaaacagccaagagaaaatgccctctgcagtgctgttttcagtgctactaaaaacagagttggacatgactttagtgcctttacccccagcattcaggttgaaggcagagagaaaggcagatctcgagttctaggccagcctggtcttcatacagaaaccctgtttgagacagacattccccctcccccaagcaaaaaacactgcacttggaggaggcgagttccaggtgagccagggctctgcagcgaacttgtctcagaaacaaagcagtgcccacctgatgtgatgtcatccctgcctgagttcagtttccaaattatcacccagcattaggagagaaccaactctgacctcaacgcgcatgctcctacgatttaattaaacaataagcgtaattaaactttttaaagaccctataaccttatgactaggaacgtgtgagttaagtttcacaatataagggagctagctgtgcgtgagctgccttaggctttgttgttgccagcggccagcttcctaggcgggactctagactaattaagaaaccgttgagtaagccagagctggaggatcccagctttggcgagagcctaagcaagcagcttccagtccagtgctactgtgcctgggctagctagaccagaccggccccaggcacctcctggcgctttagcctggccgcaccctcttgctagtccctagatgggggagggtagaagccggataaggcgggaccctgagatttagagctggcggtgaggccggaaagttgaagccacgtgatctcagccccatccagttaaaaggaggtgctgggctctgactgcgctacagcggatttttgagtccaatatcttctacagtatgtctgctgctcggctctccgcggtggcacagtccaccgtgtatgccttctccgcgcgcccgctggcgggcggagagcccgtgagcctgggctccctgcggggcaaggtgctgctcattgagaatgtcgcgtccctctgaggcaccacgacccgggactacaccgaaatgaatgatctgcagaagcgtctgggccctcgtggcctggtggtgctcggtttcccgtgcaatcagttcggacatcaggtatgtgagacgggatgggtagccttgggctccaggcttccaggggcgggacaccgcttactttccctctggtactacagctggaattc

SEQ ID NO: 126 - DNA, 2765 bp, Rattus norvegicus
cggccgcggagggcgggagccggctcgccaccaccgggacacgcacagagtccgcggcggcgccggagaggggcagcgcgccgggcaagctgagcaaaggacccaccttggacccctgctgatcatgaacaagatgaagaacttcaaacgaaggctttccctgtcagtgccccgcccagagaccattgaggagtcattgaccgagttcaccgagcagttcaaccagctccacactcagaggaatgaggacggcagggacgaacctgggcagctgtctccgggcgtgcagtatcagcaacggcagaaccagcgccgattctccatggaggacctcaacaagaggctctctctgcccatggatatccgcctgccccaggaattcctgcagaagctacagctggagaacccagggctgcccaaaccactcacccgaatgtcccgccgtgcctccctgtcagatatcggcttcgggaaactkgaaacatacgtgaaactggacaaactgggggagggcacctatgccaccgtcttcaagggacgcagcaagttgacagagaacctcgtggccctgaaggagatccggttggaacatgaggaaggggcaccctgcactgctattcgagaggtgtctctgctgaaggacctgaaacatgccaatattgtgaccctgcatgacctcattcacacagatcggtccctcaccctggtgtttgagtacctggacagtgacctgaaacagtacctagaccactgcgggaacctcatgaacatgcacaacgtcaagatttttatgttccagctgctccggggtctggcctattgccaccgccgcaagatcctacaccgggacctgaagccccagaacctgctcatcaatgagaggggggaactgaaactggctgactttggcctggcccgggccaaatcagtgcctacaaagacctwctsmaatgakstggtgaccywctrrtamargscmyywgacktkcwrmwrrratccwcggagtactccacccccatcgacatgtggggcgtgggctgcatcctctatgagatggccaccggcaagcccctcttcccaggctccactgtcaaggaggagttgcacctcatcttccgtctcctggggacacctacagaagagtcgtggccaggtgtgacatccatctccgagtttcgagcctacaacttcccccggtacctaccgcaaccgctgctcagccacgctcccaggttggatactgaaggcatcaacctcytgaccagcctcctcctgtatgaatccaagagtcgcatgtcagcagaggcggccytaagtcacccctacttccagtctctcggggaacgagtacaccagctcgatgacactgcctccatcttctccctgaaggagatccagctccaaaaggacccaggctatcgtggccttgccttccagcacccagggcgagggaagagccggcgacagagcatcttctgagctacccacccggctgcacgttgagggacgagagsccactcggaacatgaattcaggaagtgtggggcctgtgtggcatcagagggctgaacaatgaatgcctgtggcagtytggaggaccactcagcarmmmwrwwrrwarmawwtgcttccttcccttgcttgccacacagctctgcggtggcctctgcctggacaccaatcccttgtcacccactgtgggatggggcatgagctgcttccctgggaggaagtgagggtcaaggagggacccgggaccctttcccagtggacgtgcaggagaaggtgggggccctggcctgctggctcatcagcttgacaaacccccttcttattgcttggacccttacttcatcttcttccccccatggaggaggaggaatatggcaccttacctgggaaccctggaatcgcacccatgtgtgtgctgaccccacccaaaggcagatgtccccgaagcatcagaaaatgtagtgcctccccttgtctccacccccaccatgctgttgtcccctccttgccagaagccctgtgccctctggcttgcaccaaggctaaaaagcacaagcttgcttcccgtgtccaactgcatccggaagtgtcccgtgctcctagatgtactcctgccacctcagccagccccgtgcccatcccccagtctggaaagggttgccttaaactggcaggtggtcgagtgcgctgtgtccttggaactctgacctatgtccctcttccctaagccattcccgtgggtgttatcatccctgagggctgataagtcaaccctgtctcagggtcctgaggctggcacccagataggcaaggtcaccttgacactggtaccagagtaaccttggctctttagggctggtgcagcctytcccccatgctccacctccttcccagccctgtccamctgaccctggcaccgacctccacagagaggktggggagggcgtcggcaccacagcctaagctggagagaagtgaggttgcagcaggtttgatcctgacagcctcatcctacatccccagggaaggcacccttcctctgtactcccctcctgttytagggtctccccaacatttggctgaacttgaagggcaaaggtcaaagggaggtcaagctccatgccatcctaaccccttggagcstgggttctccctaaccccctttcccactgactgtgaatgtcgtgactcagagcaaagacagagaatatatttaattcatgttgtacaaaaaraaaaaaaaaaaaaaaaa

SEQ ID NO: 127 - DNA, 2824 bp, Rattus norvegicus
cgggcagatcgcgggkcgcmcwcgskyscgcgctgagctaggggtgcaccgacgcaccgcgggcggctggagctcggctttgctctcgctgcagcagccgcgccgcccgccccactccgctcagattccgacaccagccccctctggatcgccctcctggactctagcccgggctcttgctccgaccccgcggaccatgctccgggcgccccccggaaaaccgggctgggcgaagagccggcaaagattaggctcacgagcgggggccccacccggccacccagctctccgcccgtgccctgcccggtgtccccgagccgtgtgagcctgctgggccatggagcgcgcgccgcccgacgggctgatgaacgcgtcgggcactctggccggagaggcggcggctgcaggcggggcgcgcggcttctcggctgcctggaccgctgtcctggctgcgctcatggcgctgctcatcgtggccacagtactgggcaacgcgctggtcatgctcgccttcgtggcggattcgagccwcsrsrccsrgmacrwcytmkktcykcwcaasctyrssakctcsgacwksstcgtgggtgccttctgcatcccattgtacgtaccctatgtgctgaccggccgttggaccttcggccggggcctctgcaagctgtggctggtggtagactacctactgtgtgcctcctcggtcttcaacatcgtactcatcagctatgaccgattcctgtcagtcactcgagctgtctcctacagggcccagcagggggacacgagacgggccgttcggaagatggcactggtgtgggtgctggccttcctgctgtatgggcctgccatcctgagttgggagtacctgtctggtggcagttccatccccgagggccactgctatgctgagttcttctacaactggtactttctcatcacggcctccaccctcgagttcttcacgcccttcctcagcgttaccttcttcaacctcagcatctacctgaacatccagaggcgcacccgccttcggcttgatgggggccgtgaggctggcccagaacccccaccagatgcccagccctcgccacctccagctccccccagctgctggggctgctggccaaaagggcatggcgaggccatgccgttgcacaggtatggggtgggtgaggcaggccctggtgttgaggctggggaggctgccctcgggggtggcagtggtggaggtgctgctgcctcgcccacctccagctctggcagctcctcaaggggcactgagaggccacgctcactcaaaaggggctccaagccatcagcatcttcagcatccctggagaagcgcatgaagatggtgtcccagagcatcacccagcgcttccggctgtcgcgggacaagaaggtggccaagtcgctggccatcatcgtgagcatctttgggctctgctgggcgccgtacacgctcctaatgatcatccgagctgcttgccatggccgctgcatccccgattactggtacgagacgtccttctggcttctgtgggccaactcggccgtcaaccccgtcctctacccactgtgccactacagcttccgcagagccttcaccaagctcctctgcccccagaagctcaaggtccagccccacggctccctggagcagtgctggaagtgagcagctgccccacccttytgaggccaggcccttgtacttgtttgagtgggcasccggagcgtgggcggggccytggtccatgcwccgctccaaatgccatggcggcctcttagatcatcaaccccgcagtggggtagcatggcaggtgggccaagagccctagttggtggagctagagtgtgctggttagctctgccgccacattctccttcaccacacagaagagacaatccaggagtcccaggcatgccttccacctacacacacacamwymcacamacwcacayamaywccayaktkmarwrmmarwrawrwmmccttttgcatatttagtggttggtgtcctccctaatgcaaacctcggtgtgtgctcccggctccggccctggcaatgcgtgcgtgcgccctgcatgtgctcacacccgccacacacccgcccgccacacacttgcaacacctcctctctcccagaagagctggggacgatgccctttgctgccactgtctcttgcttaatcccagagcctggctccttatcccccactctcccttcaactctgccccacrrmrygwsgagcgcctcgggaaacttgaagcttctctgctccttccactctggatgttttcaggaagayggasgagragaaaacacgtctgtgaacttgatgttccttggatgtttaatcaagagagacaaaattgccgaggagctcggggctggattggcaggtgtgggctcccacgccctcctccstcagtgctgcagcttccggctgagccgcgccagctgcttctgcmtgccccgcccccaggcttgggacgatggccctgccctgcttgccccgtctgtacaatcagaatttgggggtgggtggttatggggtagagcggctcttcactgtgccctaaaggtcctgaggctcacaggacagtcagcaggagagcaggcaggcccgcgacacctgggaggaatgctttgcctcgtcctgtgtactcacctcaggcttctgcatgctctgctgcccttgtgccctggtgtgctgcctctgccaatgtgaaaacacaataaagtgtatttttttamrraaaaaaaaaaaaaaaaaaaaaaaaaaaaaaaaagggcggccgcatacatatgtagtctggtct

SEQ ID NO: 128 - DNA, 1953 bp, Rattus norvegicus
  misc_feature (1895)..(1895): n is a, c, g, or t
accctgtcaagtgtccatgatgctgggccctgagggaggtgaaggctatgtggtcaaactccgtggcctaccctggtcctgctcaattgaggacgtacaaaacttcctctccgactgcacaattcatgatggggtcgcaggtgttcatttcatttatactagagaaggcaggcagagtggtgaggcttttgttgaacttgagtcagaagatgatgtaaaattggctctgaaaaaagacagggaaagcatgggacaccggtatattgaggtgttcaagtcacacagaaccgagatggattgggtgttgaagcacagtggtccaaacagcgccgacagtgccaatgatggctttgtgaggcttcggggactcccgtttggatgcacaaaggaagaaatcgttcagttcttctcagggttggaaattgtgccaaacgggatcacactacctgtggacccggaaggcaagattacaggggaggccttcgttcagtttgcctcacaagagttagccgagaaagctttagggaagcacaaggagagaatagggcacaggtatattgaagtgttcaagagcagtcaggaggaagttaggtcatactcagatccacctctgaagtttatgtctgtgcagaggcctgggccttatgacaggcctggcacagcccggaggtacattggcattgtgaaacaggcaggcctggataggatgaggtctggtgcctatagtgcaggctatgggggctatgaagaatacagtggcctcagtgatggctatggcttcaccactgacctgywygrgrgagacctcagctattgtctctcaggaatgtatgatcmcagatmcggagacagcgagttcacagtgcagagcaccaccggccaytgcgtccacatgagagggctgccctacaaagcaacggagaacgacatttacaacttcttctctccactcaaccctgtgagagttcatattgagattggtcctgawkkmrgmrygassggagaagctgatgttgagtttgctactyatgaagaagcagtggcagctatgtccaaggacagggccaacatgcagcacagatacatagaactcttcctgaattcaacaacaggagstagcaatggggcttatagcagccaggtgatgcagggcatgggtgtgtcagctgcccaggcaacttacagtggcctggagagccagtcagtgagtggctgttacggggccggctacagcggtcagaacagcatgggtggatatgattrgtwttgtaggaacatttgggttatttcamtcagaaaatttcacaggsagccaataaacagkcaagrgcagtttataactytagaggaagctgggggacccactttgcaccatgagtttgtgaaatctggattaaaaaattacmwyttcarwrwwwmwmawrmaaamwwwwmwtctrgcatgtratattgagtwaastwaawabkattttsttccgcttttctcrattaacrtttttggtagtatasttaagagtgwtgthatctgagttaagtagtttaagtatkttgagtggatctttcagcacwccacagtgaacacactgrgggcatgtacttwtmtggagaactcaaggtgctagatccctgatgcaaagagaagcatttytcatgttchttvtagkttawattttcatttaaaatctttaggttaagtttaagcttkttaaaagttagktttsaraattgrgachcaatwctaatactgtaggaattggtgagsccttgacwtaaagctttcyttskactgtgatttccttttgggtgtahtttgbtaagtgaaacytgttaaattttttgttaactaaatttttttcttaaawtaaagactttttcvcvdhmrvvwrdhmmwrmhnmhmdrvdsakccamwggtagcaacctgggtggaagagaaagacttgtaacgtcatctt

SEQ ID NO: 129 - DNA, 2346 bp, Rattus norvegicus
ccttgcactggtgggctcccagcaaacatccagctggacattgatggggaccgtgaaacagagcgcatctactctctctttaacctgtacatgggcaagttggaaaagatgcaggaggcctgcggcagcaagtccgtatacgatggccctgagcaggaggaatactcaacattcatcatcgatgacccccaggagacgtacaagacgctgaagcaggtcatcgctggggtggggacccttgagcaggagcacgcgcagtacaggaggaacaagttcaagaagacgagatacgggagccaggagcaccctattggagacaagagcttccagaactacatcaggcagcagtctgagatctcaacccattccatttaaggtcacagcacttcccagaacggtgctgttgagccacaccaggaaaaagcagacgaaagaagacagaatacatacatggagaggaaccatgttcacccgttcactcgggccccaccacgctggcggggccaccgagagccaagcatgctccttccccagcaggaactgttgcctgggctgtgcacgcccctccgctgccagcacaggtggtctgagccatcctggaatgtatgagcatcgtctttttactcctttaatcgtacagggatccagggatctgttaaatagtagggaactgtggactctgtctaaatctgttccccccgtggtccagcccctctttgcagcggcacatggttcgtccatgttagcgtgcaccttctgtagtgtgcactgtctcttgttccttgcctgctggtctctattacatgtagccgtctggccctcgccctagacgtacatgtaatcctgcccttctacctaatccctgctcgggatgttagaagcagtattttcctgtcagccagcaggcgcagcctttgccctcagcttatgytggtttgttcctggctaaagagttttgtggctgggatgggacaggatggtacagaaaccccttgatctttgaggacatggggtccttttctttcttagagtccctggagagggagggctgtgagcccagtcttctctgggtgaccatcacccctcagtttgaacacaggtctggatgccgggtaaggttttaaactagattccacatgcttgctgccttggtgaaagtttgggaaaggtttttaaaaatgtcgttttccaakckgwcwkkcttaatgttcttaaaggatcgtttcttaaatagcattttgatttgaggaagtatggaacatcaatagctatatgcattaaagggggttgacccasgggaatccaaaggggacagtatttgatttctcacaaagccaaagggtcctcagggacggagctctggratagaggctgcactgtccagcaataaaggccaaacgtggcattgcacacgcctatgtctctgtgagcccaacargcyacacgtgscactatctggagccacttttgattggggtgggagggtcctgaaacagacaagacagtcygtgccagcttcgccccacagtgctgctggagtcacatcccaagckgcatykwsrvarkytkaraggggcggytctgggtaratgttgctaagggacaytaccasgcatytggkaccattttctctttyttcawatcttggraggttcactytgcatytggaaacataawagcattggatggcatarcaacggaagatkaaaaaaagtcggtaacttgtgcmctgaacatgtwtttaacttgggtttgtaacagkgttyctgtttataaratactaacgaccctratgtattttactgrcccattaaagcaratgttttattywtwmwrwrrarwrrwwwrrattctgggaggggagcagtgcataggaagttccctccagggagggtggcatccgtgtcagaccaggcaggtgtggctctcatgaccggtggcatgtctgacaggatgtcatggaaacccatcactaggctgaggggcagcactgagcacccaattccctctcctctcttctccctttggttttcactcttcaccgttagattttaattccactgggagtttaatgggagtcagacccattagaagaaaagtttggctttgagagcactgatttttttttcctctggggactttctggggccaagaactcaggccagaaggccacccaggacagggtgaagctggccgtgggtcgctggtcagtctccactggccacaaaggaaaatggagtggaacaaagaagatagggccctgctccttggctcttgtctgccagggacctcccgggaatggaatgtagggtgtctgctgccacaggcatctgttagtctagtcag

SEQ ID NO: 130 - DNA, 2827 bp, Rattus norvegicus
gcggccgcgggggcggcttcagctcgcgtcgtgcagagcggtagcatcgctgacgctagtcagggacaagaagacctagtgaaygatttcagaaaaagtgcctgtttgcttakgatgtcagtgcaccaagcaaatctgaagcactcctttcgctgaggagcgtcctgtctgcaataacttcacagacctgccccagaggctttcctcgaattcccttgcgccttacctactgctccagactggaagctgcttgrgactttttcacgtggatctaaggggaatgctttactatggctgctgttgtccaacagaacgacctagtgtttgactttgcaagcaacgtcatggaggatgaacagcagcttggcgaccctgccatatttcctgctgtcattgtggaacatgttcctggtgctgatattctcaatggttatgccgggctagcctgtgtggaagaacccaatgacatgattactgaragctctctggatgttgctgaagaagaaatcatagaggatgacgatgacgacatcacccttacagtcgaggcctcttgtcacaatggagatgagaccattgagaccattggggctgctgaggcgctcctcaatatggactctcctggccctgtactggatgaaaagcgaatcaataataatatatttagctcttctgaagatgacatcgttgccccaatcacccacgtgtctgtcacactggatgggattcctgaggtgatggaaacccagcaagtgcaagagtccaatgcagactcccctggagcctcctccccagatcagcccaagagaaagaagggaagaaaaacaaaaccaccacgaccagattccccggccactacaccaaatatatctgtgaaaaagaaaagtaaagacggraagggaaacacaatttacctttgggagtttttrctggctctgcttcaggacaaagctacctgtcctaagtacatcaaatggacacagcgagaaaaaggcatttttaagttggtcgactctaaagctgtgtccagattatgggggaagcacaaaaacaaacctgacatgaactatgagaccatggggcgagcactcaggtactattaccaaagaggtattcttgcaaaagtggaaggtcagcgcttggtgtatcagtttaaagaaatgccaaaagaccttatctacatagacgatgagggtccaagttccagcacagagtcttcagatcagtccttatcttcaacgaccacttctagtcggaatcaagcaaaccgaacaagaatgtcttcaagtccaggaataaaaggaggggccactacaattctaaaaccagggaatcctaaagttgcaaaacccaaagacaccgtggaagttgggcagccttcagaagttttgaggacagtgcagccctcacaggctccctatcctacccagctcttccggactgtccatgtggtacagccagtacaagccatccccgaagaagcaaccataaccagcaccatgcaggaggaagctgcaggttcttcagttcagggcattaggacgatacaggcttcaacccaggttccagtagtcgtgtctcctggcaaccaacagctacatacagtaacactccagacagtgccactcacaacggttatagccagcacagacccgtcatcaggtgcagggccgcagaaatttattttacaagccattccatcatcacagcccatgacagtactgaaagaaaacgtcctgctacagtcacagaagccgggctctcctccttcaatcgtcttcagccctaccccagtacagcaggtccttacgggcagcgttcagtcccttggcaatggagctgtcagtatggcttcacctccaaacttcagtgctaccgcacctgtggtgactttctctcggagctcacagctggctgcacacccaccaggcaccgtgatcacgtctgttatcaaagctcaggaaacaaaaactcctaaagcagaggtggagaaaaaggctgaaggtcatttgaatggagaccctgaggaaattgaacagcagccccagccttatgtgatggtggtgtccagttcaaatgggttttcctctcaggtagccatcacacagaatgaactgctagagcccagctctttttaattactacaccaaaggaattatgggtggttattttttttaattgaactcatttttggttgtctgaccataacatgatttttttctaagataaatccacagaagatcttaattttgtaattgttaaaaacagtgacctttgcctttgctagataaggaggaaaacccatgtatgtctcctctctaaatgtttcagaactgagttgtgaaggagcaggaattttatacgatgaagaaattcttgaaatttttttcagttgctatatcataagtatttttaaagtttcttttctagcttgacactgtattagcttcctgaattgttcgaaaatactacttaaatatacgtcaagaggaaatttatataggaaacattttcattccacttgtataatttaagtcttgactcttttcagatgcaagaaactgacagcgctgtacgtgctcttcgctctgctgctgcttggagcctgcagcctggcatttctgacctacaaatactgccggcgctccaagcaagggaacgcgcagccaagccagcaccagctgagtccaatttcctccttctgaaagttgtacagagtgcttcatacccattgtactagaaatagtgcctctaaaatatttcgaaaactgatcagcttctataatttaaactaaaaaaaaagaaaaaaaaaaaaaaaaaaaaaaaa

SEQ ID NO: 131 - DNA, 2197 bp, Rattus norvegicus
tcagcagacacagccagcctggattgcatggcagagactgaggggccagccggccaagtccaggctgccccagatccagagcswsrgttgygrgmagaccctgttgacatgtcgcccgaggacccccaggaaacacagccgctgttgcggtcgccgggcgccagggctcccggcggccgccgggtcwtccttgscaccttcgycgycrccctgkgcccgmtcagcttckgcttcscscttggctacagmtcccccgccatccccagmctgckgcgmascgcaccccctgscctasgcstckkrkacactgcgrcctcctggttcggggccgtcgtgaccctgggcgctgcggcccagggggccgtgctgggcggctggctcctggaccgtgcagggcgcaagctgagcctcctgctctgcaccgtgcccttcgtgaccggttttgctgtcatcaccgcggcccgggatgtgtggatgctgctcggaggccgcctcctcaccggcctagcctgcggagtcgcctcrtymgtggcaccggtctatatctcggraatcgcctacccagccgttcgaggactgctcggctcctgtgtgcagctgatggktgtcactggcatcctcttggcctacgtggcaggstssstcctmgaatgssgctggttggctgtgctgggctgtgtgccccccaccctcatgctgctgctcatgtgctacatgcccgagaccccacgcttcctcctgacgcaacaccagtaccaggaggccatggctgccctgcgcttcctgtggggctctgaggagggctgggaagagccccctgttggggctgagcaccagggcttccagctggctatgctgaggcgccctggtgtccacaagcccctcatcatcggcatttgcctcatggtcttccagcagctgtcaggggtcaacgccatcatgttctatgccaacaccatctttgaggaggccaagttcaaggacagcagcctggcctcggtcactgtgggcatcatccaggttctgttcactgctgtggcggccctcatcatggacagagcagggcgaaaactgcttctggccttgtcgggtgtgatcatggttttcagcatgagcgcctttggtacctacttcaaactgacccagagtggccccagcaactcctcccatgtaggcctcctggtgcccatctccgcagagcctgctgatgttcacctggggctggcctggctggctgtaggcagcatgtgcctcttcatcgctggttttgcagtaggctkgggacccatyccctggctyctyatktcaragawcttycctytgcacawyaagggkgkggstaccggsgtctgkgtcctcaccaactggttcatggsctttytggkgaccaaagagtttaacagcatcatggagawyctyaraccctacggcgccttytggctcamcgstgycttytgtatyctyagcgkccttttcacgctcacctttgtccctkrgactaaaggcaggactytggaacaaatcacagsccatttygagggacggtgacggaccctttctgtgactggcarccctgagctgagctggcttcgggtttcaaaaggagtggagtggcctyagtgaccacagkttgagcccaggggccccctgactyctcagatctccgggccagctttgtycagatctcaacccaratccacacccatgagcttcaccagattytgaggstctgsagmctgsttgsacacacarcacatctgsggagscatgcagkctcgccctracccacsggtctycttccctaagaactaaagcaacctggacgagaactgcgggctcctggctctagtgctctggctgggcatcttkggggtgcttggwcctaagcaactkgcccataacctcacttgactgggggatgagaaagggacttagccacataagatttgggctcagaaacaaggtcaggtgagtccaggaagaaaagagaatgttcttgtcttgtcaaccaagtccttytcagagtgcccagagacctccggattcaccttggggttagccagcttacccatcacttacaggttctctccarctcttccctggtctcagtgtcctggatcattagtcaccaggtcttgttgagtttcagaaaataaaaggcctctttccgttcaamwwwaaaaaaaaaaaaaaaaaa

SEQ ID NO: 132 - DNA, 1197 bp, Rattus norvegicus
gaggggctgcgagctgagcagttgccatggtcctgggatctgctgcactattcgtcttgagcctgtgtgtcactgagctgaccctccatgctgctgacacctgcccagaggtgaaggtcctggatctggagggctccaacaaactcaccatccttcaaggctgccctggcttgcctggagccctggggcccaagggagaggctggtgccaaaggagatagaggagagagtggccttcctggacaccctggaaaggcggggccaactggacccaaaggagaccgaggagagaagggagtgcgtggagaaaaaggagacaccgggccctcccagtcatgtgctacaggacctcggacctgcaaggagttgctcacccggggctactttctcactggctggtataccatctacctgccagactgcaggcccctgaccgtgctgtgtgatatggacacagatggtggaggctggaccgtctttcagagaaggatcgacggcacggtggacttctttcgggactggacctcatacaagcaaggcttcggcagccagctgggggrgttctggctggggaacgataacatccatgctttaaccacccagggaaccaatgagctgcgggtggatcttgcagacttcgacrssarscatgactttgccaagtacagctccttccagatccagggagaggccgagaaatacaagctsattctggggaacttcctcggtggtgstgctggtgactccctgacttmccaaaacaacatgcttttctccaccaaagaccaagacaacgaccagggatcctmcaactgtgccgtgcgttaccatggagcctggtggtactctgattgtcayacttccaacytgaatggcctmtaccttaggggtctccataagagytatgcawacggtgtcaattggaagtcatggaaagggtacaactacagctacaaggtttctgaaatgaaggtgcgcctcatctagctccccacaaagagagtgcccctcccaaactctagcataccagcaacaggagtcttctatctwtcttcagccaaggaaggagtgtgccaccccgcccggctctgmtcattgcccacattccacacagcccatgacctctgacctggctctmttcacatacctatattctcaccacaaagaaaaaattgaatttacaaaaaaaaaaaaaaaa

SEQ ID NO: 133 - DNA, 120 bp, Rattus norvegicus
agtttctttgtcccgcggccagtcccttcaacgccacgccctcctccccaaaactggctgcaacgcagggcagagattctggagatccttcggaagcgaacctgggcaggccggaaataa

SEQ ID NO: 134 - DNA, 2273 bp, Rattus norvegicus
tcggtgcttagcccctacttcggcacgaagacacgctacgaagatgtcaacccctggctgctgggcgacccggtggcgccgcgacgggacccggagctgctggcggggacttgcaccccggtgcagctggtcgccctcatccgtcacggcacccgctaccctacgaccaagcagatccgcaagctgaggcagctgcaggggctgctgcagacccgcgagtccgtggatggcgggagccgagtggccgccgctctggaccaatggccgctgtggtacgatgactggatggacgggcagctggtggaaaaggggcggcaggacatgcgacagctggccctgcgtctggccgccctcttccctgacctcttctgccgggagaactacggccgcctgcggctgatcaccagctccaagcaccgctgtgtggacagcagcgccgccttcctccaagggttgtggcaacattaccacccaggattgccacctcccgacgtctcagacatggagtgtgaccctccgagagttaatgataagctaatgaggttcttcgatcactgtgagaagtttttaaccgaagtcgaaagaaacgccacggctctttatcatgtggaagccttcaaaaccgggccagaaatgcagacagttttaaagaaagttgcagccactttgcaagtgccagtgaacaatttaaatgcagacttaattcaggtagcctttttcacctgttcgtttgacctggcaattcaaggtgtccattctccctggtgcgatgtgtttgacgtagatgatgcgaaggttctggaatacttaaatgatctgaaacagtactggaaacgaagttatggctatgccattaacagccggtccagctgcaacctgtttcaggacatttttctacacctggacaaagcagttgagcagaagcaaaggtctcagccggtctcttctycagtcatcctccagtttggtcatgcggagaccctcctacccctgctctcgctcatgggctacttcaaggacaaggagcccctgacagcatacaattttgaggagcaggtgcatcgsgagttccgaagtggtcacatcgtaccatatgcttcaaacctaatatttgtgctttaccattgtgaagacgcacagacccctcaagaaaaattccagatacaaatgctgctgaatgaaaaggtgttacccttagctcactcgcagaaaactgttgccttgtatgaggatctgaagaaccactaccaggacattcttcagagctgtcaaactagtaaagaatgtaacctacccaaggtgaacatcacgtccgacgagctctgaggactcatcagtgctctgctgagggcgcttgttgccaataggtagccactctaaaggcagcaacaggaggatctctgtgagctcaargccaacctgttctacatagtgagttccaggccagccaaggctgcgtagagaaataaagtttggtccttttgtcttttcacagaaaawrawarwwwmwwwtagaatctggacatacgggtaagacatgactctccctggagcagctctcttcagaaaaamkaattcrgcamrasagctgtccctcccagtgtttgcagagctgaaattttcctaatgacctaagaaaatgctgatgtagaatggtattagaaaataacacttcaaaagtgttggataccaaagcacagtggcagctgggtgagccgcagtgagtgactgagatggggacttgagtratcatgttgggttctttccttctccttcacgaaggacacaaagaaggaagtctaataamktmkscatcsagrcaggaaatcaactsgatattaagamccaggctgaagtaaaactgaaagtgtgggctatttkwswygakgttatttmcaaaaagatttaaacactgtcagtaatygcctttaacctccamgtaggtcttgcagaaccacctccatccctcggacctgtttgaggcgcgcagttataatggggcccagcctggtacagakccgacttccttgactgttgcctggttatctttcgttccatcatggctcccctttttatatcttgatattacataaagtttatcttttggtggyttggwtttttttttaaataaagacttatctgcytaawwwaawwrwararawtcgaacctgattcaaagaaattttgagttctttcaaataccataaaartgtttgctacaataaataaataaaattcttgtggctttmmhmmmaaaaaaaaaaaaaaaatgg

SEQ ID NO: 135 - DNA, 1604 bp, Rattus norvegicus
cacgagggcgtctcagggctttggtgttagtcacggagacttagacagagacctggggtgggaactgttcctacatcctgccwyccwcwggagycttggmagctcmycmgsgaakcaacttgstkgttcswsccagctctcagctcaatgtggtcaacagtgtcagcagctccgaggacatcaagcccttaccaggtctgcctgggatcggwaatatgaactacccatccaccagccccgggtctctggtgaaamacatctgtgccatctgtggggacagatcctcaggaaagcactacggggtgtatagctgtgaaggctgcaaaggcttcttcaagagaaccataaggaaagacctcatctacacgtgtcgggataacaaagactgtctcatcgacaagcgccagcgcaaccgttgccagtactgtcgttaccagaagtgcctggtcatgggcatgaagagggaagctgtgcaagaagaaaggcagaggagccgrgagcgagcagagagtgaggcagaatgtgccagtactggccatgaagacatgccggtggagaggattctagaagctgagcttgctgtggaaccaaagaccgaatcctacggcgacatgagtgtggagagctcgacaaatgaccctgtcaccaatatatgccacgctgcggataagcagctyttcacccttgttgagtgggccaaacgcatcccccacttctcagacctcaccttggaggaccaggtcattctgcwccgggcagggtggaatgaaytgctsaytgcctccttctcccaccgctcggtttcygtccaggatggcatcctgctggccacgggcctccacgtccacaggagcagcgctcacagcgcgggcgtcggctccatctttgacagagtcctcacagagctggtgtccaagatgaaggacatgcggatggataagtcggagctcgggtgcctgcgcgccattgtgctgttcaatccagatgccaagggtttgtccaacccctcggaggtggagwctcttcgagagaaggtttatgccaccctcgagccctataccaagcagaagtatccggaacagcctggcaggtttgccaagcttctgctgcgcctcccagctctgcgctccattggattgaaatgcctggaacacctcttcttcttcaagctcattggggatacccccattgacaccttcctcatggagatgttggagacccctctgcagatcacctgaaactcctcggcwgtagcttcctcacccagagtgacccctgggctggtgtgtgtgtcgccytacccctgcacactgtcctctcccactctgacttcccttcctgtccccaaaatgtgatgcttgtcccgaataactacaacctttctacacatgagacttttctaggtggagttttgtatggttgttaaaggtgacccttctttgctacttaaggggctgagtctggcagttcttggaagagtagccaagcctctgtacatataattatcttggtttaaattattttttcacttgccatggaaagcaaacaaatggaaaagaaaataataaatacgatactggcmmwrmwaaaaaaaaaaaaaaaaa

SEQ ID NO: 136 - DNA, 785 bp, Rattus norvegicus
gcttaagctgcagaaactgagaccacccctccaaggatctccagtctgagcgtctccagtgaccttctctgcattaactgtcagtgctacagatatttttagctccaagtcctggcagggtggggcacttatctgaggcagggtttggtgccccctccccactgaccctacatctcaggctgcggctgctgctgctgctgtcacttcaggatgaaargggagacccccgttaacagcactatgagtattggccaagcacgcaagatggtggaacagcttaagattgaggccagcttgtgccggataaaggtgtccaaggcagcagcagacctgatgacttactgtgatgcccacgcttgtgaggatcccctcatcactcctgtgcccacttcggagaaccccttccgggagaagaagttcttctgtgcgctcctctgaagagcgctgtacctcctctgaactcatctccccytcccagacccgcccttagattggaaatcatagcagtccatttctacccgcacttatcctgagattatytgaagcacaaggccctccttacccacstytaccccatctcctcaccctttcaggccaactccaagcactctatctataaagggaccccgctaaactgccaaaatcctgcctgtttccctcggtgatccatccgttcaggcaatggagagggggatgcccgggtgstcacctggagctacgaaaaggtaaaggcatttgaagaataaagtcattcagagcstcmvarramaaaaaaaaaaaaaaaa

SEQ ID NO: 137 - DNA, 88 bp, Rattus norvegicus
ggtctctcaggcagctgcagagcttcagcagtactgcatacagaatgcatgcaaggacgccctgctgcttggtgttccggctggaagc

SEQ ID NO: 138 - DNA, 828 bp, Rattus norvegicus
ccaagcccatcaggtgaggcacactggagagaaaccctacaaatgtgaggagtgtggcaagggcttcactcgggcctccactcttctggaccatcagagaggccacactggaaacaagccctatcagtgtggcgcttgctggaagagtttctgtcacagctcggagtttaacaatcacatacgagtccacacgggagagaaaccctatgtatgtgaggagtgtgggaaaggcttcagccaggcctcccatcttctggcccatcagagaggccacacgggagagaaaccctacaaatgtagcacgtgtgggaagggattcagccggagttcagatcttaacgttcattgtagaatccacacaggagagaaaccctataaatgtgagaggtgtggtaaagccttcagtcgagtctcaattctccaagtgcatcagagggtccacagtgaagacaaaccgtatcagtgctcagagtgtgggaagggcttcagtgtagagtctcaccttcaagcccaccagaggtcccacgctggagagagaccctatcagtgtgaggagtgtgggagaggcttctgtcgggcgtccaactttctagctcatcgtggagttcacacaggagagaaaccgtatcaatgtgacgtgtgtgggaaacgcttccggcagaggtcctacctccacgaccaccacaggatccacacgggagagaaaccgtacagatgcgaggagtgtgggaaagtcttcagttggagctcatacctcaaagcccaccagagagtccacacgggagagaaaccgtacaagtgtgaggagtgtgggaaaggcttcagctg

SEQ ID NO: 139 - DNA, 840 bp, Rattus norvegicus
cgacggcccgggctggtgaatatatgaaatatcacccagtctagttgcagtcttagggtaaaatatttcctactgtttcgtgaactatattggaaagttacacgaatcagcaatgtgacaactatgaagctacaggtgtcacgtcacaggaagtgatgaagaagcatgagaagtyttcattcttttcctgtttctaagcccccctgactataaggctcctttgctacaaagccatttatcacctaggagcaggtgagttctgaggacaaaacgacaatccctaatcttgagattgccaatccatctctgtgtatttttccttgtcaaggccccttcttgtctgtattcacatcttttgtttttcttctcttctagtaacctgttgaaatcaaaactcaataagcttatcatttatcagatttatctcagtaaatttacactccacaaaacgtctatacaataaactcagagccaattgatattgatataaactgcctacctagataagacaaattgtcctataaaaattcatcccttaagaaatatccataactaactgtggccatttaaggctgcatggatctgcccccatcttgattcttctcctactcttctctcctcccttcaactctatgccccccttaattttttcactgcccaatcacgggctttgtcttaacttgtgccagtcctcaccttaatataaacaacaatctacagacatgcagttgttttttggtatcaacaaaataataacaatgagtttacatttttgattaactttctgaattgagaagttcttcagcaaatagacatgaccaaaaagtgattctctgctga

SEQ ID NO: 140 - DNA, 2969 bp, Rattus norvegicus
gatccggatccggtctagctgtccstcmkrccrrgaawwsrkcwcgrkgggtttcctctctgagcatcggaccctctgccattccagcctctcatgccgaggccagtcctgtcagtcactgctttttgtmatcggcttggcaaacgggagagcaaacgaagcttcatgggaaacagcagcaacagttggtcccatgcatcattccccaagctggagctgggcctgggacagcgtccctccccaccccgggagtcgcctacctgctccatctgtctggaaaggcttcgagagcctatctcactggactgtggccacgacttctgcatccgatgcttcagcacacatcgcatcccaggctgtgagctgccatgctgtcctgaatgccggaaaatctgtaagcaaaagaagggccttcgcagtctaggggagaggatgaagctcctacctcagcggccgcwrscyymtkcmctkyabgagasctgtgctgtgakagcggmgcgtctgctgttggtacgcatcaatgcctctggaggsctcatcctcasgatgggagccataaaccgctgcctgaagcacccyctggccagggacacacctgtctgcttgcttgctgtccygggagagcagcactcasgaaagtccttcctcttggaccacttgctcasaggcttaccasgcctggaatccggagacagcactaggyccagagcagaggggtctctgcctggaatcagatggggtgctaatggkctcacgakgggcatctggatgtggagtcaccccttcctgctggkaaaagaagggaagaaggtggctgtgttcttagtggacacaggagatgtcatgagcccagaactgagcagggagacaagggtcaagctctgtgccctcaccatgatgctcagttcgtaccagatcctcaacacctcccaagagctgaaggacacagatctgggctatctagagatgttcgttcatgtggctgaggtgatgggcaaacattatgggatggtacccatccagcatctggatctcttagtccgtgactcttcccatcacaataagtcagggcaggggcacgtgggtgatatactccagaagctgtccggcaaataccccaaggtccaagagctgctcctagggaaacgggcccgctgttacctccttcctgctcctgagagacagtgggtgaacaaaggccaagcaagcccaggaggcaacacagaagatgacttctcccaccatttccgggcctacatctcggatgtgctgagcacagcccctcagcatgctaagagccgctgccaagggtactggagtgagggtcgcgccatggccaggggggacagacgcctactcacagggcagcagctggcacaggagatcaagaacctctccggctggatggggaagagtgggcccagtttcagctctccagatgagatggctgctcaacttcatgacctgaggaaagtggaagccgccaagaaggagtttgaagagtatgtgagacagcaggacatagccaccaagcgcatcttctctgcactacgagtactgcccgacactatgaggaacctcctctctacccagaaggatgctatcttggcccgccatggtgtggccctgttgtgcaaggagagagagcagaccttggaggccctggaagccgagctgcaggcagaagccaaggccttcatggactcctacacaatgcgcttctgtggccacctggccgcggtagggggcgctgtaggtgctggactcatgggcctggcagggggtgtggtgggcgccggtatggcggcagcagcgttggctgcagaagctgggatggtggcagccggggcagcggtgggtgccactggggctgctgtagttgggggtggtgtgggtgctgggctggccgcgacggtgggctgcatggagaaagaggaagatgagagagttcaaggaggagaccgagagcccctactccaggaagaataacagctaggagatgtcgaagcgggaaatatgtggaaggcaggaggaagggtgtggacatgccagggactcagacaagaccacgtatatactgsrcgartgccccatgccaaacattggctgagctggggttttaaggtcggtcccgaaccctgaggaggcctctggccatgaggctgtgcttggagtgcascrgatagggtgtaaggcctgtttctgactatggctaattgctattcactggaacctaggatctcccaccacataaggctccacctcccctacccggctccagtttatttgccctggtgggtctcagcctggaagtttggccctggatcccgaaccccatccgttttacagttgggataggtcccagcataactcgctttggagctgggggcccctaacagggaagacaaagggatgggaatgatagagctataactctagagtggccacttgttcccaaaactgttccggaaggccagacttggctggcctccmtgctyttcagttgggtgtccagatgtgtgtcctgaaccgccctgtrmcccagcctcytgcagtcctcmtaagcctgtgccctgtsccaagcccatttggatggatcaacacagattacatgccaaagaaccacacctctgattgcattctgtgctaaagcaggccctgccaggctctgccaaagtgtggtaaagggaagtgcaggacatgggctccgtcttaaatacatccttccccttgagctgcggggcctctgtgccacactgtaagaccccttggatgcagccctctgaaygacaaacccccagagagcttgcgaacagggagcctctttcggggaatggagatttctaaagagacttctgggctattaaactataaaggatgttgggcatatgaccctttattttatataaaaataaaatgtgtgtgtgtgaatggcaaaaaaaaaaaaaaaaaaaaaaaaaaaaaaaaaa

SEQ ID NO: 141 - DNA, 2971 bp, Rattus norvegicus
tactcactatagggctcgagcggccgcccgggcaggttctgactccaacaaggacctgacaaagccagaggcggtgggccggaggagtacggacaaagccaggcgtccgaaggagatggctacacccgagcctgcagagagcgatgcggaatgggagcagctggaacctgggcagagaaacttgtacaaggatacaaagctagagacctgcagcaatccagcctcgatgggaaatcaagatcccaaacaaggcctagtctctaagttggatggagaagaagagcggtggtcttcagtgagggcaaataagaacagctcaagtagtctgcacagactcaagaaaacaggaaccagtgcaaaggtccaacaagatggtgcacagacggaggggaagcagaaattccaaaggaaactcacttcagaagtgacattcaggaagaaaagttcaaacagtaagaaaagcagtgagtgtacattgttggagaagaaaaatgtccattcaaaacatgatccttctgaaaaaagattgcataaatccaatttgtatgggaagaacttgaatcagaatttagacttacccagtcagattaaaatctctgcgaaaaagaaacccgatacagctaatgaatataggaaatcactcagccattctgcatccgatgtgaacagagatgaaatttcaactagaaagaaatgtgacaagtcacccaacaataaattgtttggtaaaggtgacaaaaaccaaacaggcaagaaatgtgagaaagtatgccgtcataccgcatcccataccaaggaagacaaaattcataccggggaaaaacggaaatcaccctgccgtagtccatctaaatctgacaaggctccaggctctgggaaaccttatgaatgtaatcaatgtgggaaggtcctcagccataaacaggggctccttgaccatcaaagaactcatgccggggaagaaccatatgaatgttacgaatgcgggatagctttcagccaaaagtcccaccttgtcgtacatcagaaaactcccactggggaaaaggcgccatacgagtgtgtccagtgtggcaaagcccacggtcacaaacatgccctcactgaccacctgagaatatcccataccggagaaaagccctacaaatgtaatgaatgtggcaaaacctttaggcacagctcaaaccttatgcaacacataagatctcacacgggcgagaagccgtacgagtgtaaggagtgtggcaaatccttcagatataattcatctttcaccgaacatgtgagaacacacacaggcgaaataccctatgaatgtaatgaatgtggcaaagcttttaagtatggctcatccctgactaaacacatgcgaattcatacaggcgagaagccatttgaatgtactgagtgtgggaagacttttagcaaaaagtcacacctagttatacatcagagaactcacacgaaggagaaaccttataaatgtaaggagtgtggcaaagcctttggacatagctcatctcttacttatcacatgagaactcacaccggggattgcccttttgaatgtaataaatgtggcaaggctttcaagcaaatcgagggccttactcaacaccagagagttcatacaggagagaaaccctatgagtgtgttgaatgtggaaaagccttcagtcagaagtcacacctcatcgtacatcagagaactcatacaggggagaagccctttgaatgttatgagtgcggaaaggccttcaatgcaaaatcacaacttgttattcatcagagatcccacactggagagaaaccctataaaccctatgagtgtgttgaatgtggcaaggccttcaaacaaaatgcttctcttaccagacatatgaagactcactcggaagaacaatctcaggaggaagattaatgtgggaactctgacaggtgactggtttgaaatgtttaaccctcaagatgtatttagtttgatgatgttagagtctttttttaagagtatgaatctttacatgagatcattagatggtaataaagtttaaacttcatcctaaactttctttccaggaaatagtgtgttttactgtacaatggccatattgataatgattggccaggtagtctcagggattctcttagcctcactttcccagttatgaggttgcaagatgcacagcagcaaaatcaaaatcccacccctaggaaccacatcaaaatctaaatacgacgaagcgctcacggaacatcataactacgaaactccagattaaagaataaagaagaccacatgaccaaaatatggtttaatttacaagccaaagggcaaaacaaaaacttccaaaaaaagggaacaggactcaacaaaaagggaactcgtgttacacacacacacacacacacacacacacacacacacaaatttgtgaaaatgttaattagagcaacaaacagtaaaatacagtaattcatgtactttttacgcgtgtgcttagccaccacaattagtatttattttgcatttatgtttactgaaatactagggcctgtgtaaaatacaggcgagggtatcctctggtatcgcctagcttcctttgttaatgtcttcgttaggttctgaagtaataaaaaattttagggaggtcttttgttttgttttgtttgaacagaatcttaccatattagtgctggctaaccaagaacttgttatgttaaaccatgctgaccttgaagtttttatgttaaacaggctggccttgaactccccaaaaatgtgcctgtctctgcctccccaagttgcctagaattaaaaacttccaaagaaaaacttggaaggaatttttcctaaaattttggtttaaataaaaaattcaaattaaaaatgttggaaaaacaactgggcaatgttttttgttaatgaaatggtactggtttatatcggtttaaacttccaaaaatcccaata

SEQ ID NO: 142 - DNA, 1110 bp, Rattus norvegicus
atgctcctgcttccactgctcgtccttctctgtgtagtgagcgtgtcctcatcagggtcacaaacctgtgaggaaaccctgaagacttgctctgtgatagcctgcggcagagacgggagagatgggcccaaaggggagaagggagaaccaggtcaagggctcaggggcttgcagggccctccagggaaactggggcctccaggaagtgtaggagcccctggaagtcaaggaccaaaaggccaaaaaggggatcgtggagacagcagagccattgaggtgaagctggcaaatatggaggcagagataaacaccctgaagtcaaaactggagctaaccaacaagttgcatgccttctccatgggtaaaaagtctgggaagaagttctttgtgaccaaccatgaaaggatgcccttttccaaagtcaaggccctgtgctcagagctccgaggcactgtggctatccccargaatgctgaggagaacaaggccatccaagaagtggctaaaacctctgccttcctaggcatcacggacgaggtgactgaaggccaattcatgtatgtgacaggggggaggctcacctacagcaactggaaaaaggatgagcccaatgaccatggctctggggaagactgtgtcactatagtagacaacggtctgtggaatgacatctcctgccaagcttcccacacggctgtctgcgagttcccagcctgaggaaaccagtgcctccatcgtctccttggctctcagtcgcttccaaagaaaattcagttactggtttctcaagtttagtgttaagtgattcttttgatgggagagaatgtatttgcttgtggcatgaggacacgaatagaagctgaccgggaggcaccaggatctggttgagcacggagcaaaggtcacatccattttgctaggaacacagcaagaagtcaactatggaaaacctacaataaatatcccctgcccttttcaccagaggaccaaaggtggtccttatctgtgccagagtggcagctgatctcagccataaaagcacccaattccctttctccatgaattgtcactaagtggtgtcaaacgtgcctgtttgaagtcatcctcagt

SEQ ID NO: 143 - DNA, 5383 bp, Rattus norvegicus
ccattcaccgcccgggccgcagccaccttccctcctcgcttctggctccgcgtcccagcccagctctgaggcaggcaggaggagcagccggatagtgactccagagttcccggctgtcgccaggcctccgggagcggcgccgactctcccgcggtccggacgccggaccctgcgccagagccgcagccacctgctccgagtccccgggcaagcacaaccatgcgccccactctggcgctctccgcgctgctgttgctgcagctgctgttactgtcgactccatctctctcccaggataatggaaataagactgacacatctgatataactagcattgaccagaaccaagacaaaccagcgacaaaccagccaagcaatgctacacctaaaagctcagtccaacctccaacaccgacatctatttcaacctcctccccagaccccaaggccactcaaagcagtaacagttcagttacaactaccagtgactccaccactgacaggacaagctcttccactagcactgtccccactactagcaayagtgggcagacagtctcctctggaggcaagagcagtgacaaaattaccacagccctaccaaccwctttgggaccagtcaacgcctcttctcaacctactgacctgaatacctcgacaaagcttccttctacccccacaacaaatagcacagcaagccctcaccagcctgtgagccactctgagggacagcacaccactgttcagagcagctctgcttctgtgtccagctctgacaacactacgctgttgtggatacttactacatccaaaccracaggcacctctgaaggcactcagcccatcgctatctcgacgccaggcatcaccacaccggtctccacaccactacagcctacggggtctccagggggaactgagtcggtgcctacgaccgaagaattcacacactccacttctagttggactccagtggtctctcaaggcccgagcacaccctcttccacctggacgtctgggagttacaagctaaaatgtgatcctgccataaagccccacgaggaactcctcattctgaacctcacaagagacagcttttgtaaggggagccctccaaatgaaagattcttggaactgctgtgtcactcagccaaagcctccttcaagccagctgaggattcgtgtgctctggagctggcccccattctagacaaccaggcggtggcagtgaagagaatcgttattgagacgaagctttctcctaaggctgtgtttgaactgctgaaggacaaatgggacgacctgacagaggctggagtcatcgacattcatctggggaaggaaggacctccagragtcaacgaggaccgcttcagccttcctctcatcatcaccatcgtctgcatggcatccttcctgctcctcgttgctgccctctacggctgctgtcaccagcggatctcccagaggaaggaccaacaacgactcacagaggagctgcagacagtagagaatggttaccatgacaacccaaccttggaagtgatggagactccttctgagatgcaggagaagaaggtggtcarcctcaacggggagctgggagacagttggatcgtccctctggacaacttgaccaaggaggacctagatgaggaggaagatacacacctctgatcagtccgccagccactccgaccgcaccgcagagctcwctgaccaccymaagtgccatttggacgggggcggggaggggaggggacttcccacctgaagacagaaagattggggagggagaatggacaccgagggttgtctccctcctccccatccccacaaggccttaattttccctttcaagttcaacgaagtcacattctgtccagtttcctcatgtaaaaaaacctacttgtgcctgagcccagagccgctggaaggcaggaaggtggagaacaccatgcgagaggctctggcgctcctccaggaatggcacccacccatctcataagtaagatgaccaaggccttaagaggtcaggtaacctgcacagggccacacggccatttggtgacaagggtggtttccctcggtctggtgcttcgttgcatcaagacacactactgtgttcatttgtgtccatcccccaaggcacaagacacacgaaagcgggcaggctagaaagaaaaccaatcctctatggtctcaaggacaggccccaaatttccatctcctctaacatggcctctgccagcttgttgaatcccgcttcctatgagtcagtctttagtcccactctttcccagggcagggctttgaacctcttgggaagatttccttgcctttgcttagcaggattgggacctaacacacaggcctcactatctaatggagtctgcctaaagggtgggtgggcaggcagaggaaaaggaagctcaggctgggacgccttcctcatggcagctgattctgtactgacactggcctatcattcaaggcactccctagaagacactcccccaaatgtcctctggccttctgctccctctaggaacaaatctgcagtagctactgaaagcaagatgttcctcttttccttgttcactgctcagctgagggggtgactcctcaaatccgagtgtcacagagcagctgtctagggacaaacatgtcctggggttctgaccggtccttaattggttcctgattggcaaatgtgtctcagtagacaatcgatctaacctacctggcattattccacaggaagctcaggggcttttcaagttaccgagaacttgggtggttgtgttatggtgtgtgttgtgtgtgtgtgcgtgtgttgtgtgcatgtgtgtttgtttaattcagctcctaactgccaaaggccaaagctcagatcctggagactgttagctcatttcattggtttgcaccctcctttgccatggagaaaggcccagaacatgcagttttaagattcttttacccattctcctagcacggagccaggtttttgtttccggtgttctttgtagcaccccagttgtaccatttctggtggcctctcagggaaacaaaaccatgcctaggacccagcacaggagttttacaggctcagcagagtcaagcagccatgtacaagactgtcgagggcccggcatagcgatgtttcatctggttttctgagaaaggggtgggggaccctgtgtggagctttgaattaggcctatggtctggattgttcttgggcataaatccccatgactgactgtctggtttgaagcagcttatttagaaggggagctaggggacagacaggtgttctctgcctaatcccattgttatagctgtcacactgagataggctaaggagaaaggctgccagaagtcaagaaaggctctcagtgagtttcacaggagttgaaaaaaaaaacgctaacaagaactcacaaaccccttggcctgcatctctcagatttgcaggggagggtggggagcagtgccaatttggggggaaattaggtttatttgctcccggcattaggttctgtcctgagaggcagccagcattccttctcctttgctacaatcaatgggtaaggccatgacagacagcacatgcgctctctgcaaactggtcagattataaccctacagcctgtcagatatggctgtaacattagacaacagatactgtgtctaagctgttggaatagccttggctctgcccagggtaagcccatagaaactctgcccaggctggcccagtgtcccttcctgtgcactcaaattgtgtagcatttcagtacagcttgagaatctggccttcacttgctcttaaccactgggacatctgttacacaagacatgctgctagtgtctataaaagttatcttcctgtgtttawwamwrrrwwwwwaragctgtctgtgagttcagaatctcaggcccagtctgagagaaggaagcggaggggacctttagaaccagctgtaccaaagagaaatcagaacttcacatttcaggggcaaaatggcttcccccagctgcaaaacccaagggcctgatggttggctgaacaaagccagccgctcttgtgctgcctgccgtgtgaatggcgagggaagcagctgagcacagggcacagagcagtctgcctggccgagcaggatccagactcatttaggacactcacgctctctatcttcctgatagagagaaccagcaggtgttttactgttttattggtttttgttgttttggttttttggkkkttttttttttttttgkgtttttttgcctactttttggwcaacacactggtgaaactttgaagaataagttgaakttgacawsacctaygcacgtttttgacaakgtmaatacaakagccacatgtttaytttaccctgyvstgsttccasagggtamackwkgggaawgacttgayagctaagcttcccaccccccattttctgaataakaatgtaaatgtcbatttagtasaaatgacttttttaaagaactgaagaatataacaagacaggctggtaacackagaatttgccttgtasataggggatttamaattttaaaatactgtccttgckcctycccagccaagtctyccatyctgctgcagttcgggctgragtttagcawggwctgtgatggtcacgggggaagtttaggasawacagtctttctacaggaaaacacatctgaagccacaaagaatctcccgagggscagrgacaagatgaaaacatgcatcccagacygcctgytytgtgctgcatgtttctyaagaacagggaawtaaggackacagctcccaggkacaaggttaatacaggataccatcagtccttcctcataataaccctggaagggctaggaggacacaagggacacaaacagccatgtgctgggctctggawtcacatggtccagatatcaataaatattttgggggcttggttttttttttcctgtcaggaaataattttgaaaagttcctgaggaatgtccagtagaatgagsatcaaagggactagcatagatgaaggtagagagggagaagctctgtagtgcagcctgtgtcaytgtcagtcatgatccttccctctcaggtctgcggaaaayccaccactgagctgggatcactgtytcatggggcttttctgcttctttgtgaatgccaaccagcttgcccaggagattgggggagtgtatgtggtagtggacaggggtctaaagtacactggaatttatcgagagamtatagttmwctmttgcattytcttatmmagwatmytytggmaaatsgtacaccgtcaattaaaatgcttttgtgtaadmwdrawaaaaaaaaaaaaaaaaaaaa

SEQ ID NO: 144 - DNA, 2947 bp, Rattus norvegicus
ccgccccagctcagtccgaaccccgcggcggcggcggcctcctccacacgcctccacctccgccgccgccgccgccgccgcctccgcgccgskctcmgcccggmyrkccrggckgagmscgggaatggcggagcgagagagcsrcswgrgcgggggtgccgcgtccccaccggccgcttccccattcctgggactgcacatcgcgtcgcctcccaatttcaggctcacccatgatatcagcctggaggagtttgaggatgaagacctttcggagatcactgatgagtgtggcatcagcctgcagtgcaaagacaccttgtctctccggcccccgcgcgccgggctactgtctgcgggtagcagcggtagcgcggggagccggctgcaggcggagatgctgcagatggacctgatcgacgcggcaagtgacactccgggcgccgaggacgacgaagaggacgacgacgagctcgctgcccaacggccrsragtkrkkccytyyarwgmsgrgtctggccaggagccggcgtctcgcagccagggtcagggccagggccccggcacaggcwgcggagacacctaccggcccaagaggcctaccacgctcaaccttttcccgcaggtgccgcggtctcaggacacgctgaataataactctttaggcaaaaagcacagttggcaggaccgtgtgtctcgatcatcctcccctctgaagacaggggagcagacgcctccacatgaacatatctgcctgagtgatgagctgccgccccagggcagtcctgttcccacccaggatcgtggcacttccaccgacagcccttgtcgccgtactgcagccacccagatggcacctccaagtggtccccctgccactgcacctggtggccggggccactcccatcgagatcgaatccactatcaggcagatgtgcggctcgaggcgactgaggagatctacctgaccccagtgcagaggcccccagaccctgcagaacccacctccaccttcttgccacccactgagagccggatgtctgtcagctcggatcctgaccctgccgcttactctgtaactgcagggcgaccgcacccttccatcagtgaagaggatgagggcttcgactgtctgtcatccccagagcaagctgagccaccaggtggagggtggcggggaagcctcggggagccaccaccgcctccacgggcctcactgagctcggacaccagcgcactgtcctacgactctgtcaagtacacactggtggtggatgagcatgcccagcttgagttggtgagcctgcggccatgttttggagattacagtgacgaaagcgactctgccactgtctatgacaactgtgcctctgcctcctcgccctacgagtcagccattggtgaggaatatgaggaggcccctcaaccccggcctcccacctgcctgtcagaggactccacaccggatgagcctgacgtccacttctctaagaagtttctgaatgtcttcatgagtggccgctctcgttcctccagtgccgagtcctttgggctgttctcctgtgtcatcaatggggaggagcatgagcaaacccatcgggctatattcaggtttgtgcctcggcatgaagatgaacttgagctggaagtggacgaccctctgctggtggagctgcaggcagaagactattggtatgaggcctataacatgcgcactggagcccgtggtgtctttcctgcctactatgccattgaggtcaccaaggagcctgagcacatggcagcccttgccaaaaacagcgactggattgaccagttccgggtgaagttcctgggctctgtccaggttccttatcacaagggcaatgatgtcctctgtgctgctatgcaaaagatcgccaccacccgccggctcaccgtgcactttaacccgccctccagctgtgtccttgaaatcagcgttaggggtgtcaagataggtgtcaaagctgatgaagctcaggaggccaagggaaataaatgtagccactttttccagctaaaaaacatctctttctgtgggtaccatccaaagaacaacaagtactttgggtttatcactaagcaccctgctgaccaccggtttgcctgccatgtctttgtgtctgaagattccaccaaagccctggcagagtctgtggggcgtgcatttcagcagttctacaagcaatttgtggaatatacctgtcctacagaagatatctacttggagtagcagcaacccccctctctgcagcccctcagccccaggccagtactaggacagctgactgctgacaggatgttgtactgccacgagagaatgggggagtgagggctgttggggtcggggggcaggggtttggggagaggcagatgcagtttattgtaatatatggggttagattaatctatggaggacagtacaggctctctcggggctggggaagggcagggctggggtgggggtcaggcatctggccacaaagggrtcccctagggacagaggcgctgcaccatcctgggccttgtttcatactagaggccctggctttctggctcttgggtcctgccttgacaaagcccatgccacctggaagtgtcaccttcccttgtccacctcacccagwgccctgagctcatgctgagcccaagcacctccgaaggactttccagtaaggaaatggcaacatgtgacagtgaggaccctgttctcatctgtggggcctccggcagskccgaccyccagcctggccagcacgctgaccctggcaagcttgtgtgttcaaagaaggrgagggccacagcaagccctgcctgccagggaaggttccctytcagctggccccagccaactggtcactgtcttgtcacctggctactactattaaagtgccatttcttgtctgrraaaaaaaaaaaaaaaaaaaaa

SEQ ID NO: 145 - DNA, 1874 bp, Rattus norvegicus
gcccttccggctgggtcgtacggatcgcccgccgccatgggctcctcgcagagcgtcgagatcccgggcggcggcacagagggctaccacgtcctgcgggtacaggaaaattccccaggacacagagctggactggagcctttctttgactttattgtttctattagtggttcgagattaaataaggacaacgacactctgaaggacttgctgaaagccaacgtggagaagcctgtgaagatgctcatctacagcagcaaaaccctggagctgcgggaggcctcggtcacacccagcaacctgtggggcggccagggcttgttgggggttagcatccggttctgcagtttcgatggggccaacgaaaatgtttggcacgtgctggaagtggaatcgaattcccccgcagcactggcggggctgagacctcacagcgattacatcattggagctgataccgtcatgaatgagtctgaagacctgttcagccttattgagacccatgaagcaaagcctcttaagctctacgtgtacaacacagacactgacaactgccgagaagtgatcattacaccaaattctgcatggggtggggaaggcagcctcggctgtggcatyggctatggttatttgcaccgaatacctacgcgtccctttgaagaaggaaagaagatttcccttccaggacaaatgactggcacccccattactcctcttaaggatgggtttacgcaggtccagctgtcatcagtcagccccccatctttgtcaccaccaggaactgcaggagttgagcagagtctgtctggactgtccattagctcagctccaccggctgtcagcaatgttctcagtacaggtgttccgactgtaccattgttgccgccacaagtaaaccagtcccttgcttctgtgccaccaatgaacccagctgccacattaccaagtctgatgcctttgtcagcagggctgcctaacctccccaacctccccagcctctccaacttcaacctccctgctccgcacatcatgccaggggtcggcttgccagagctcgggaagccgggtttgccacctcttccgtccttgcctccccgaaacktacctggcattgcacctctccccatgccgtccgacttcctsccgtcattccctttggttccagarggctcttctgcagccagcgcaggggaaccactgtcttcccttcctgccatgggcccaccttctgaccctgtcatgactactgcaaaggcagacacctcctccctcactgtggatgtgatgtctcctgcttccaaggtccccaccactgttgargacagagtgagcgactgcaccccmgscayggrgaagcctgtgtctgcagttacrgatgcaaatgyttckgrsgmkkcttaacttggaatcaaccttcagaactgatgtggtctgtctatttaaccatgggatcatatctggaatcgcaaactrccattgatttcatctagtttgtacgtatctgtaggggtcctgtacataattctaaggsgaaactgcacaagagtctgarggcttgtctcccaccaagttgggggaattacagccaaggargggaatctgasaatgtgcytgtatyttaaacaaccaaaaaaagttgttatgggtggcttgctgccargcatctgctgccattytgggatgtwcgtctttggaagaracgssgggggcctgctaraatccctgtrccactggctacrccttstgtaaggaratraratattytatgcctagtgcccacacscaacatttcttgtwctktgtaagtystttgcaaraacacarcaccwcctcctraactgttaaaaggaaamawraawwwrawrwwrrwmtca

SEQ ID NO: 146 - DNA, 5006 bp, Rattus norvegicus
atgctcagctttgtggatacgcggactctgttgctgcttgcagtaacgtcgtgcctagcaacatgccaatctttacaaatgggatctgtacggaagggccccactggagacagaggaccgcgtggacaaaggggcccagcaggtccccgaggcagagatggtgttgatggtcccgttggccctcctggtccccctggtgcccctggcccccctggtccccctggcccccctggtcttactgggaactttgctgctcagtattctgacaaaggagtttcagctggccccggaccaatgggcttaatgggacccagaggccctcctggtgctgtcggagcccctggccctcaaggtttccaaggacctgctggtgagcctggtgagcccggacaaacgggtcctgcaggttcccgtgggccagctggccctcctggcaaggccggtgaagatggtcaccctggaaaacctggaagacctggcgagagaggagtcgttgggccacaaggtgctcgtggtttccctgggactcctggacttcctggcttcaaaggcattcgaggacacaacggtctggatggattgaaaggacagcctggtgcccagggtgtgaagggtgaacccggtgcccctggagagaatggaaccccaggtcaagcaggagcccgagggcttcctggtgagagagggcgtgtcggagctcctggtccagctggtgcccgtggcagtgatggcagtgkyggccccgtcggccctgctggtcccattgggtctgctggtcctcctggtttcccaggtgctcctggtcccaagggtgaacttgggcctgttggtaaccctggccctgctggtcctgctggtccccgtggtgaagcgggtcttccgggtctttctggccccgttggacctcctggcaaccctggagcaaatggyctcactggtgccaagggagccactggactccctggtgttgctggggctcctggtctccccggtccccgtggtattcctggccccgttggtgctgctggtgcyactggtcccagaggacttgttggtgaacctgrtcctgctggctccaaaggagagactggtaacaagggtgagcctggctctgctggagcccaaggtcctcctggtcccagcggtgaagaaggaaagagagggtcccctggagagcctggatctgctggtcctgcagggcctccagggctgagaggcagccctggttctcgaggtcttcctggagctgatggcagagctggtgtgatgggccctcctggcaatcgtggttcaactggccctgctggagtccgaggtcctaatggagatgccggtcgccctggagaacctggtctcatgggacccagaggtcttcccgggtctcctggaaatgttggcccagctggtaaagaaggccctgtgggtctccctggcatcgatggcagacctggcccaattggcccagctggaccaagaggtgaagctggcaacatcggattccctggacccaaaggcccctctggtgatcctggcaaacctggtgagaaaggccatcccggtctcgctggtgmtcggggagskscasgtmscgacggcaacaatggtgctcagggmcctcctggacctcagggtgttcaaggtggcaaaggtgaacagggmcctgctggtcctccaggcttccagggtctcccgggtccctcwggtaccgctggagaagttggcaagccrggmgaaaggggtcttcccggtgaattcggtctccctggtcctgctggtccaagaggagaacgtggtcccccaggtgagagtggagctgctggtccttctggtcctattggaakccgaggtccctctggagccccagggsctgatgggaacaagggtgaagctggtgmagtcggtgctcmaggctctgctggtgcctctggtcctggtgggcttccaggagagaggggtgctgctggcatacctggaggcaaaggmgaaaagggtgraackrgtywcaragrygaratcggcaaccctggtagagatggtgctcgaggtgctcctggtgctataggtgcccckggtcccgctggascctyaggtgaccggggcgaagctggtgctgmtggtccttckggccctgctggtcctcgaggtasccctggtgaacgtggtgaggttggtcctgctggmcccaatggatttgctggtcctgctggttctgmtkgmmaacctggtgytaaaggmkaaaagggmaccaaasggyctaagrgmgaaaatggcatcrktggwcmaaccggacctgtcggagctgctggcccatctggwcctaatggcccacctggccctgmtggaagtcgtggtgatggagggccccctggtatgactggcttccctggtgctgctggacggactggtccccccggamccagtggtattactsgscmscmkggtccccctggtgctgctggtaaagaaggtattcgtggtccccgtggtgacmaasgtccagttggccgaactggagamataggtgcatctggtccccctggatttgctggcgaraagggtccttctggaraacctggtamcamaggaccccctggcactgcaggtcctcagggtcttcttggtgctcccggtattctgggtctccctggctctcgmggtswamgyggccwgcvrssywtygmtkktscwcygggtgrrsywggtcctctgggcattgcaggccctcctggggcccgtggtccccctggtgctgtgggcagtcctggagttaatggtgcccctggtgaagccggtcgtgatggtaaccctggcagtgatggtcccccaggtcgtgatggtcaacccggacacaagggagascgtggttaccctggcaacattggtcccamtggtgctgcaggtgctcctggtcctcatggttctgtgggtcctgctgggaaacatggaaaccgtggtgagcctggtcctgctggttctgttggtcccgttsgtgctgtcggtccaasaggtcywastggycctcwwkktwttykwkktbwmaaggraravmctsgwgasaaagkkkycagaggtcttcctggcttaaaaggacacaatggattacagggtcttcctggtcttgctgggctgcatggtgaccaaggagctcctggtcccgtgggtcctgctggtcccaggggtcctgctggtccttctggccccattggcaaagatggtagatctggacatcctggaccagtcggtcctgctggcgttcgtggctctcagggtagccaaggtcccgctggtccccctggtccccctgggcctcctgggcctcctggtgtcagcggaggaggctatgactttggtttcgaaggagrcttctacagggmtgaccagcctcgctcacagccttcactcagacccaaggactatkaagttsatgsaacwstgaaatctctcaataaccaaatcgagacccttctcactscwramggctcyasawmsaassmwgscmgmacatgccgtgacttaagactcagscacccagagtggmagagcgattactactggattgaccctaaccaaggatgcactatggwtgycatcaaaswskaskgcgatttctctactggtgaaacctgcwtccaggcccaacctgtcaacaccccagccaagaatgcatamagccgtgcccaggccaacaagcatgtctggttaggagagaccatcaatggtggcagccagtttgaatacaacgcagaaggggtgtcctccaaggaaatggcaactcagctcgccttcatgcgcctgctagccwaccgtgcttctcagaacatcacctaccactgcargaacagcattgcgtacctggacgaggagacaggccgcctgaataaggctgtcattctgcagggctccaacgacgtcgaacttgttgctgagggcaacagcagattcacctacactgtccttgtcgatggctgctccaaaaagacaaatgaatgggacaagacartcattgaatacaaaacgaataagccatctcgcctgccattccttgacattgcacctctggacatcggtggtactaaccaagaattccgtgtggaggttggccctgtctgtttcaaataagtgaactcaacctwaattaaaaaacaaaaacccstgaaaaaaackkyykcwwkgyywtttcttcctttaaaaaaaaaaaaaaaactgaaagctgaatccttscgtgttttctatgcrcctacatcttaaactktgggcaaaagrgaaggattggtcagrgcagtgtgcamkwkgatscagataagtcccstccmtcaggccctccycrwrmsgtttscagtgkyakwkcwskrgktttttttwtaaacactctgacacctgttgtggacattgwcaacctytgtwagaraacccaaatraawttttraaaataaaataaaaagaaacscwygarsatttgsdccamwwrwrrmwwmwramwatcttccacaragggragkttawaaccsrmwckwbbaaaggtttgaactacskcamgasrcgttyccgtgagtgtwgmccaccccaatgggggttgatgcagacaghsatkaactgaggkacttgktttgbtttcsacacaaaggwgstwattagkagtatttyakacacttgragratgtggatgsagctwgaakaattacagaagactcgatcctycataghgryrygmrshgmrdrggwttyttwwtttgrcttassggycbtytvgttcaccttatycmcaactwaaggratgrrgaacacttgccccagatwctytyctctytakawwmasmattsgwtkhttdgcsarcctcrtttthsttcctccccgkggttccgaagaaktcytgtttmttggacaagcagaaaaaaaattgaattgkmcctwttgtgkmtatgtkagaygtttaaataaawtgtgwrgrrtaaawwaaarmawrwwwrgttttccaaaaaraaaaaaaaaaawwaaaaaaaaaaaa

SEQ ID NO: 147 - DNA, 7164 bp, Rattus norvegicus
  misc_feature (6494)..(6494): n is a, c, g, or t
  misc_feature (7019)..(7019): n is a, c, g, or t
aggatctgcctgccctgttgtcaaccccaagaaggttatcactttagtctaccttccttccatttaaaaggacattgaaggtgtctatgtcaccagataaaattgaccacccacagcattttctccagggactcagtcactgctcccaacaaagctggggcagaaggggggggttatcctttcttgaaagtacacagtgcacacacacacacacacacacacacacacacacacacacacacacacgagcttccctagtcatctatgtaggtgaaagaaaatgaccattgagtataaccaaaatcagtatcccaccagaacaacaacgacaagcccgtgccataatccctctgtccggacttctgatggggggaggggtgtgtgtgcacacacaccctccttttctcctttaaattcatctcaacgcccctcaccagctactgtacactacttgtcccccaaacacaaacacacagacaggcaaaccttcaatagtcatttagacacttttttttcttaagttggaaatgacttcttgggtagggtatacacggctaataagaaaatgtgactcctaacagccagtgtccgggctagttgtccagaaaacccactcgccccattgtgttcacccagctcctgacgattacagccatccacccctccctctactttctccctcttctcctctgtagctcgccccgtacccccaagccctttccgtacattccgtggggaggagggcgctgtgcagggagcgaaggggagcccccgtgtctagaaggcctctccccacccccaccccgtgtgagtttgcgctgcaaagctccctggcatccttgcatgggttgggtgttggggagctcaaattgcagctacaactggctggcagccaggggccgtctatttaaaagcgcctgctcgaccagagcccgcagtctctttgsavrmdbswgscgggggttttaaaagagctaggaaagagctgcaaagctgtttgggctttttttccccccttttttkttyytttttgttatccccytcctcggtctgcacccttctccggacttcctgcggrwttcgrmgasgwggtggcagagcaggagaaaagaggtgttggggtccaggtttggtgaggtctgagtttttgcctttytyttttttcctctcccttgatwtcaacattttscygatcttcttggcbccgcmgamgcytmttacctgttytgygcagygcgcgagytgkcagctgagagaagtgggggtgbgtyttaggttttaagcaaagscrmmraaaaaaattaagccaaatccattttttttcckkcacctstccccgtttcaaggcckccaagatywttwtttytgtagctttggggtgagcgattctgtgtttytcttcatcacccytccaattytgcsccgatcccgcctgggtstccactcactgcgtgcacmtggcgcgcmtcttttttttttcacccccaacctrwtgcaagtctttaatccttgcaattgggacttgcgtryaggcacytgaatcctccttgcctcatattttgcaagtgtktggaggacagcacctrctttacstgcaagrgrtattttttwwaaaaaaaaaaawmwmmwsgykccstcttggcccctttctccacacactctcgctctcctgccccgccccgaggtaaagccagactcggaaaaaatggtgatcagcgtggtcctcctgctgctggccgcctgtgccgtgccggctcaaggcctgggctctttcgtgcattgtgaaccctgcgacgagaaagctctgtccatgtgtccccccagccctctgggctgtgagctggtcaaagagcccggctgtggctgctgcatgacttgcgccctggcggagggacagtcgtgtggcgtctacactgagcgctgcgcccagggtttgcgctgtctcccccggcaggatgaggagaagccgctgcacgccctgctgcacggccgcggggtttgcctcaacgaaaagagctacggcgagcaaaccaagatagagagagactctcgggagcatgaggaacccaccacctccgagatggctgaggagacctactccccgaaggtcttccggcccaagcacactcgcatttccgagctgaaggccgaggctgtgaagaaggatcgcagaaagaagctgacccagtctaagtttgtggggggcgcggagaacactgcccacccccgagtcatccctgcacctgagatgagacaggaatctgaccaaggcccctgccgcagacacatggaagcttccctccaggagywcrargccagcccacgcatggtgccccgtgccgtgtacctgcccaactgtgaccgcaaaggattctacaagagaaagcagtgcaagccttctcgtggccgcaaacgtggcatctgctggtgtgtggacaagtatgggatgaagctgccgggcatggagtacgtcgatggggactttcagtgccacgccttcgacagcagtaacgttgaktgacgcgtcccctcccttcctccccctttcctaccccccakccccaaytycagccakygcctccctccaccccaggacgtcactcatttcatctcatttaggggaaatatatatacatatatatttgaggaaactgaggacctcggaatctctagcaagggctaaggagacactccccattcccgaccccsgaaacgtattcctatttgaagcaagttgaacggacagagaagggaagaagagaaggggcaagaaggagcgaggaatggaaagaaagcattggagtagaggagaaggaaggacagatgggattacagagagaagagagaaacggcaaggcagacagggcttcacaaccaaggctggatctgccctttgctttcaactctagcctggggtcagagaaaggttgggacactcaaaaatgtggcattcagtgacacccagtttaatcgtggggagaaaaggaacaaggtgtgtcagtgcctctctggggtctgttgcttcctccggccagcagtgtggatggctagacccctcaccctcctctcctcttacccaagtgcagggtggtttcttccccaaatttataaagatgaaaatgcattccatccctctgaaaacaaaggaaacaagtgattgcagataggtttttccccctgagcagaagagtgaactcagaatgtgtacaaattttactcttgttggaatttttttttttttaagaaatcagtatgccccacccccaacactggaaagacttgatttccagcgtgacaagtattcagaagcatgtggctttggcccttgtattccactagtactcaaagctggcccggcagcctctgtggaggaggaggataggcggagaaaacgaaggggtttgtacttacctacaaggctccatgtagacttatataggcatataaatctattttctttacttttattcccccttccctttctttcaaagtttttgcattacctctttgaagtagttttttttttagggccctgaagatcttcctcgttctgagaaatccatatttcactactacaacccagaacgcctgctttggcctgcttctggcagcctttctcatgaactacagatgtggctctttagtggggcacatttggatcttctcctgattcccagcctgtgtttaaatgtacccaccaagccaggtagctgccagcacccaagggtgcatcaactgtgcagtccatttcagccttccaacctttggaaagtaactgtctcacaccacaccacataaacccaccagacccatcttcaacccactggcctgcccaggccttttactctatctgcatttttttgaattgcattttggaagtctccctcagatgccagactgacagatcagagagaaactgccatgagagatgacagaggaggaggaagttaaaggtggggagcgccttccacagagagacatagaagatatagcaagggatgaactcttgggggagaacccgaaagagacccgaaagagagaaatacccatagaattttccttggtgtctcccagctaatcagctctctggaatttgaaaggaaaatggggggaaaggggctctgaggtacaaatgagctcagctcaagtcacagascccagatggtgggtaattgaggcaasatgcagactgsasacscatggttggaaacaasgatcmatascctgaatgggtaytgaagggtgaasasgacscctgtgaaasacagcacaatttcmgtccaacttcasccctccaaggagggactgasgccaaasaatctttcmagcgcttcattgattctgcccmactcawscatcctccctgggacasarcgagsyagamagccasgacagctcaggcctagatcttcagagaatttgatccaagagaaaaatctcattgaccactggcttcttcaccaaagaggtgtttcacaaagggcttaggactgtctttgaagactgaagattgcctgccaggagaggggactaggacattggtacaggaggcccccctttggctgtggacacagctctttcctcttttttgatggcatgccatagtagaggtcccctccaacacaggcacgtggagcaacaaaaagrgacascaambaaacwwwsrwatgtmaacwcatagkmcmtgkmtggctacggagctaggaggggttgtctcctattgcctggacaggacagttggctgggaataaaggaggcagttgatcttcacaaramaaarrrmmwratggagttggcaatataaggacttaccacacctgcagggtcagttttaaccatcaccctgcacgacatccccagcccccaacctgaacttgtggaaacaaacgtatgtcaactcataggacatggatggctacggagctaggaggggttgtctcctattgcctggacaggacagttggctgggaataaaggaggcagttgatcttcacaagacaaagggcctgatggagttggcaatataaggacttaccagacctgcagggtcattttaaccatcacctgcacgactatccccagcccccaacctgaacttgtgtatcttaggccagtatcctaaaccttttccatgagtcttgttctttctgccatttttcctgtggatcttgagcagtcatcagactgagatttgccaagtggatactggggtactgttacccccaagaaaagactgagccaggaactgcctacctactacccctcccaggcctggagctaactcctgtgaggggtggtatcttcaccccactacttgctggaccttgaatgagcctctgccccttacatgggctctttgttttgagccacagatagaggacattgtatagacacttagccttccccagttcagcctacctcccccaagattgtgagtctccccgctgcttatacggagaggcatgtctaagacagcaatcttttcctagaggaagcttgcctttaacagtcagatgggactaagccttccaaacgggaggtctgactgaacccaggatatagagaccatggaaatggggtcatcgagagaagagggatgcccttgtccatgttatggggagagaaggcaggcttgcaatggtcccatcatgccctgcgtaagaagcttcttggatcaagactagcctttagctccactagaggcctctatgttgggtttatccacagccgtaggtctaagtgttgcctgtccccacctccacctcccatgaagggcttcttcccacccctttttgacaaatgcctcactcaagcagtggaaaagatagctctcttctccatctactgccagtaactgagagaggcctaaccaggacctgttctccaccccagccagtcttgaccagccagaacaaagcagggaacctggagaataaaagactctatgttcctctgacggccaggcctaagcagacaaggcttgggaacagctgccccacaggagactgaggaggccatctgtgctcactcctcttctccttccaagaccctcttcctaccatgagttatcaccatggtaacatcctcaccatccttctcccaccaccaagggttgccacagcaacctccaaaccacctgcccatacccaggcagggcagcagtccttctgctcagaacccttgaggatctaggtgaaaaattacagccagagagaggagtgagccaaggagaagagaccctgtagccctctggctttcraragaatggaggttacvwtttaaagcmcrgyagargggaaagaggtttcatyagcctytaccamsgagcctaggggtygtactgtctttattywyrwdssamyrargyrcarkgkkksctgcmctcttgttactccmccctytyttccccgttyttatttytytgagcaractttcttggkgttkttttaatggagtwtakactttcrccasttmacaggcthtgacstyctytntarkwywkkytggatgggraaaaggaaggtwsagrgtcadagggrakkksrsgakccmtbgwsrccvmgmatycrktcacmmsrctththtgstcbmtagtcascarcstcagtcsccatyycsgmmmstcrwkgtcacacrrwtarcytgtcacacggatagcacagttcadacawgaykcbwtcagattccrrracgcctaccggttgtttttggcktwtgtwytghhtghdtgtttktkkacracagcamtrytcacagcacattaktactatkagctctttgtagtgttgcsttcaggcmscahagmwmtgttywctyttmkktytwrdkkycsamwdhammaaaaaaaawrvwwawamhwwwwrmwrrwraaacggattgaaaaaaaaattcaatwgcaamccmgtttktgggraaaaawcaaaaarygawatgtgggaaaaaaaatcaccccaatgtkgagggctcagctcctstktagcattttgtacttmaggraatwaawaagaaaarcctgmaanadmwmamawwwwawwamaarrwgaagattgctgtattctatttattcaactcataatttatgttactccctgatctttgtctkttgtcgtgacaaagcatttatttaataaaattatgcattcrgttaaaaaaaaaaaaaaaaaa

SEQ ID NO: 148 - DNA, 1681 bp, Rattus norvegicus
  misc_feature (37)..(37): n is a, c, g, or t
  misc_feature (102)..(102): n is a, c, g, or t
  misc_feature (142)..(142): n is a, c, g, or t
ggaaattcaagctggtgttcctaggagagcagagcgntggaaagacatccttgatcaccagattcatgtatgatagttttgacaacacctatcaggcaacanttggcattgacttcttatcaaaaacaatgtacttggaggntcgaaccgtgcgattgcaattatgggacacagcaggtcaagagcggttcaggagcttgattcctagctacattcgtgactccactgtggcagttgttgtttatgatatcacaaatgttaactcattccagcagactacaaaatggattgatgatgtcagaacagaaagaggaagtgatgtcatcatcatgctagtaggaaataaaacagatcttgctgataagaggcaagtgtcaattgaggagggagagaggaaagccaaagagctgaatgttatgtttattgaaaccagtgcaaaagcaggatacaatgtaaagcagcttttccggcgtgtcgctgcagctttacctggaatggaaagcacacaggacagaagcagagaagacatgattgacataaaactggaaaagcctcaggagcagccagtcaatgaaggtggctgttcctgctaatgcccctggcatcctacaaccctttaacagaagctcactgckttggccccatactttcattgactgcagtgtgaatattggcttgaaccttttcccttcagtaataacgtattgcaattcatcattgctgcctgtttcgtggagatgatctattagcttyacaagcacaaaaaagtcagtgtcttcattatttatattttttaaaagccaaacaattccagcatactcgtgataactttgaggattagatacattttcttaacattttttccctttttaatgttatgataatgtactttaaaatgatgaaaatctcagcagtatgtgtgtggctwgtaaagagcagwgtgttcacagcagcatttgmctaccttcttgctgtctcccagctttwyttgcctcttccttctcccctttcctgtccttaccttmcccaaacaaacaagagatggcaaacagcagtataaccaagccctttggaattatctgtagttttacagataccttttagctcctggscatgagccataatgtccaaaattactcttgagcactgatataagtcacttagaccttctttgaggtcagaactcagctgttgctatcatgatgggcagtgcctgagtacaggaaagggttctggtatgtcttcaaactgaatcttaacgagtttactgagtggttaccggtacaggaacataaactataatttctgatcagaacagggtacccctttacatgagctatatagactctgggagagaaacagtggcccagactctcacctgtgtttatacttcgttagacatgtgaactagtcaagtctacagtctcccaaatttacatgtccaatctggcatttaggaacaacaaattgacgtttaagacgtactccctatatgtctcaacacgacaatacagaatgtacaaagtcgctcaactcccaacacgcgtagaccgcgtagtgacatcaagtcacatgcccgcagaacccacagagaggaatgcaccttaccgggcgaaactaattgttttgttctttcttattttctttctgacgatagaagaactcaaagtgaacacaacaa

SEQ ID NO: 149 - DNA, 3809 bp, Rattus norvegicus
gcacgagtacgggctcaaatgtagaagacagaagtagctcagggtcctgggggaatggaggtcatccaagcccgtccaggaactatggagatgggactccctatgaccacatgactagcagggatcttgggtcacatgacaatcwcwskcyrcctkyygccaakyccmgaakacaaagtaaaacagaaaggggttcatactcatcttatgggagagaaaacgtacagggttgccaccagagtctcctcggaggggacatggatatgggcaacccaggaaccctttcgcccaccaaacctggctcccagtactacccatattccagcaataacgcccgacggaggcctcttcacagtagtaccatggaggtgcagacaaagaaagtcagaaaagttcctccaggcttgccatcttcagtmwrygctccttcwkyywkywywgcyswstacwwyrkssaytswsyakgykwttsktsctccaagccagcagccagcactttctccagctccttcttcatgcaagatggccatcacagcagtgacccttggagctcctccagtggaatgaatcagcccggctatggagggatgctaggcaactctcatatcccacagtctagcagctactgtagcctgcatccacatgaacgtctgagctatccatcgcactcctcggcagacatcaactccagtcttcctccgatgtccacgttccatcgaagtggcacaaaccattacagcacctcttcctgcacacctcctgccaacggaacagacagtataatggcaaacagaggaactggggcagcaggcagctcccagactggagacgctctggggaaagccctggcttcgatctattctcctgatcacacgaacaacagcttctcctccaacccttcaactcctgttggctcccctccttcactctcagcaggcacagctgtttggtctcgaaacggaggacaggcctcgtcatctcccaattacgaaggacccttgcactccttgcagagccgaattgaagaccgtttagaaagactggacgacgcrattcatgttctccggaaccacgcggtgggcccatccacagctgtgcccggtggccatggggacatgcatgggatcatcggaccctctcacaatggagcaatgggcagtctgggctcaggatatggaactggccttctctcagccaacagacattcactcatggtcggggcccaccgtgaagatggcgtggcactgagaggcakccattctctcctgccaaaccaggttccggttccacagcttccggtccagtctgcaasttcccctgacttgaacccaccccawgacccttacagagggatgccaccaggcctccagggacagagtgtgtcttccggcagctctgagatcamgtccgacgackagggckatgagaacctacaggacacawaatcttccgaggacaagaaactagacgacgacaagaaggatatcaaatcaattactagcaataacgatgatgaggacctgaccccggagcagaaggccgagcgtgagaaggagcggaggatgkccaataacgcccgtgagcgcctgagggtcsgtgatatcaacgaggctttcaaggagctgggccgcatggtacagctccacytgaagagcgacaagccccagaccaagctcctgattctccaccaggcagtggctgtcatcctcagcctggagcagcaagtgcgagaaaggaacctgaacccaaaagctgcctgtctgaaaagaagggaggaagagaaggtgtcctcagagcctcccycgctctccttggctggcccacaccctgggatgggagacrcagcgaatcacatgggtcagatgtgaaagggtccaagttgccaccttgcttcattaaaacaagagaccacttccttaacagctgtattrtcctaaacccacataaacactgctccttaayyyykttttttttgtaatataagacaagtctgagtagttatgaatcgcagacgcaagaggtttcagcattcccaattatcaaaaaamaraaaammaaacmcaaaaaaaawraawraaagaaakwmrgmamgagaaaatgcaacttgagggacgacttctttaacatatcactctgaatgtgcgaagcggtatgtacaggctgagacgcagcccaragactgaatggcaatccttccacactgtggagcaatgcatttgtgcctaaacttcttttggaaaaaaaaatataattaatttgtaagtctgaaaaaaaatatttaatttaaaaaaaattgtaaacttgcaataatgaaaaagtgtacttctgaagaaaaacgacatgaacgtttttgttggtattcaagtcagmtagtgtttctaatwaccggatattgaatagaggaagcccggstaccctcataacaaaaccagcaaccgtcctgatggcaaccgaaatgatgacattagccattccttagggtaggagggacagatggatgttatakmcctatgvcaratwtatatatwawyatatatataaatatatattaaaaatttagtgactatggtaarmwwhwrwwvrwwwrwwwmaramwtttttcwcctgymmaaaaatagymctgattaacttttttaaaaraaagatttwamwgtaaatatggattttttttttgtctgatttttgtcccttcccccrgywygttaksgtgacctgtagtgccaamwmtgcwkmcrrarrrrmarwrmaggacgaaatgctgaccctgatgttgcttctcattcataaatagtagaaagttgtttctccagtcttttgggaacacaggacttaaaagtcacatcatgtgtagaaattacatgcagcattgcccgggcaaggcaaaaagagtttgtctggcttgtggcactgtgcttgttaccctctcctgggattttcagaggtacacggttagaatgctacaatgttmccactgtgcctkccaatgtttatatcatcggaaacatgacataatcaaagtggmtgtkayyctmwcmwrrrawwwwmaraggtacacggttagaatgctacaatgttaccactgtgccttccaatgtttatatcatcggaaacatgacataatcaaagtggctgtgatttaacaaaaaaaaaaaaaagaywcragtgttaccwwyctgtgtagcggaagtagtgtgcagtgagacgtttctgaatacatgrtcagattttttttggaaaaaatmcaaaaacaaaaaaaaaamcaaaaaaawttaaaaaaaaaaagtcaagttcaaaaaccgtcaaatgagaaaatcgcaaggagtgtgacagctgattgattytgttgcttttcttgatttttttttttgtttccaaatgggtttactaaaaagtacatgacttacctgcctcctcmttcgtctgaaaacaaaaaamaaaaaaacaatgccaacstatcccacagcattatrgcaagccttataagccctaaagcattaagttgcactttggtgaggaggggtagcgcagtattctctctggccagtatgagtgaagtttatacttaacatttgatagaaacatagatcaaactgtggcacagtaactcatcagatagctagcgttgactctgggcacaattgaaccaattcccatcstaaatctttccaacaattgactttggtgtacagtgcagtgaacacatagaactcctacttaagtattcgtcagcatccttttgtctctaactcggttctgttttgacagccacacaatcttggcatgtattaagtaaaaaaaaaaaaaaaaaa

SEQ ID NO: 150 - DNA, 3958 bp, Rattus norvegicus
ctgcggagggagcgctgaccatggctccttggcccgagttggaaaatgcccaccccaaccccaataaattcatcgaaggggcctcaggtccacagtctagcataccagacaaagacaaggggaccagcaaaacaaatgacagcgggactcctgtagccaagattgaacttctaccctcatattccgccctggttctcatagaggagccccctgaggggaacgacccctgggacctgcctgaactccaagacaatgggatcaaatggtcagagagagactccaaagggaagattctctgcattttccaggggattgggaaattcatccttctcctggggtttctctacttgtttgtgtgctccctggatgtactcagtagtgccttccagcttgttggaggaaaaatggccggccagttcttcagcaacaactccattatgtctaatcctgtggctggacttgtgataggggtgctggtgacagtcatggtgcaaagctccagcacgtcctcgtcaatcatcgtcagcatggttgcctcctccttgctgtcagtccgcgctgccatccccatcatcatgggtgctaacatcgggacctccatcaccaacacgattgtggcacttatgcaggcaggagacagaaatgagttcagaagggcatttgcaggagctactgtccatgacttcttcaactggctctctgtgttggtgctcttacctctggaggctgccacccattacctggagaaactgaccaaccttgtgttggaaaccttcagcttccagaatggagaagatgccccagacattctgaaagtcataacagaccccttcacaaagctcatcatccagctggataaaaaagtcatccaacaaattgcaatgggtgactcagaagcccagaacaagagcctgatcaagatctggtgtaaaactataagcaatgtgattgaggagaatgtcactgtcccctcgcctgataactgcacctctccttcatattgctggactgatggcatacagacctggaccatccagaatgtgactgagaaggagaacattgctaaatgccagcacatcttcgtgaatttcagcctcccagacctcgctgtgggcatcatcctgctcactgtctccctgctgatcctttgcggctgtctgatcatgattgtcaaactgttgggttctgtgctcaggggacaggttgccactgtcatcaagaagacccttaatactgatttcccctttccctttgcctggctgactggctacctggccatccttgtgggggcaggcatgaccttcatagtgcaaagcagctctgtgttcacttctgccatgacgccactcatcggtattggggtgatcagcatcgagagggcatatccactcacgctgggctccaacattggcaccaccacgactgccattctggctgccttggccagcccaggcaacacattgaggagttccctccagattgccctgtgccattttttcttcaacatctctggaatattgctgtggtacccaatcccattcacccgtctgcccatccgtctggctaaaggcctgggcaacatctctgccaagtatcgctggttcgcagtcttctatctcatcttcttcttcctcctgaccccgctgacagtgtttggcctgtccctggctggctggccagtgctggtgggcgtgggtgtgcccatcattctgctgatcctcctggtcctgtgcctccggatgctgcaggcccgctgccctcgcatcctgcccctgaagctccgggactggaatttcctacccttgtggatgcactctctgaaaccctgggacaacatcatctccctggccacctcctgcttccagaggcgctgttgctgctgttgccgtgtgtgctgccgtgtctgctgcatggtgtgtggctgcaagtgctgccgctgcagcaagtgctgcaagaacctggaggaggaggaaaaggagcaggacgtcccagtcaaggcttctgggggctttgacaatacagctatgagcaaagaatgccaagatgagggcaagggccaagtggaagttctgggcatgaaggccctgtccaacactacagtgttctaggagcacctagtagtcaggggtgcctccctcccataagacagaacagagatgtagactgtgaacatggcccacagatgaccacatccacccatggcctataatgccttcaaagtccatcctcacccaaagacattaagagggaggcattagggaaggttctggaaagatccaatgtaaagagtatttgtaaatatatgtacaaagcagttgtttcttggtataaaacctcagccacatctctcattttataagtccactccttacccaataacttctcctactcacccctgccccagagcagccaagttcaaacacactgaatgtttgtagcccataggtgtgagcctttctagctcacactggcagggcatgttctattaaggcatcgtctggtatagtcaggccaagcagctgaccacagtgtcctctgaagtccgcggtgctcagcttcctaggatggagtgaatgggggttcacgacgtgtttggcacattgttggtttttctatgcctagggctgggactagaataggagacattgttgctacatatttctgatggacttgtaagacctgtgtcccagccctcctctccattgctactgcctgggtcatctgctggtgaagggtctgcctatctttctcttttgtgcaaggagactttccgggccagcttttcatgctctgtttcatccaccccctcaccctcctgctcatgtattcatatcaaacccatcgtcttacacagatgagcttcctaccccttccatgcctacaaagttccaagggattgcttaggagggaggagatgggaaatggctaaaatgcccttagaatcaagatgaagccagtaagtagggttgggagtgtgcatgtgggagcttgtatggcacaggatgcaatagtcaatacgctgtgctcatgtgcagtccccatggtggctctgcaagcattcccatcccatccccttccccacaagaacgggcctcagcttgacttgggtcaggctgtgtggttccacggccatcctcttccatcatactgccatgggaagaggctgagggccagcccgagcccctctgtagataaacgttcccccaagagccatttatgcggcataatttatrgccatgcatctgtacagaatacttcatwwcttatagtaaatagtgacttgttttatagtgtctcatttggaaatgaggcasggttcttttatgtactgtgaacagaaagaacacctttgtatattttgtaatactgcctttaaacacaactctcgagggtcatgctacacctcmccctgtaaatatgtaaggtacaccccaggaagkkgctttgccctctgttgattactttttttaaaaaaaatgggatctttrwwwmwrwrwwaawwrwatttttttaaaacgggttgagggaagggagaaatacgcaccsccgcccccaagtactgcttccaattgcagggtgctgtaaacaaragaggtgtatttccttactcaaacctcaccatacaccaccatgggaagctgtagtttttggggttcccagwgacaytggracacagagaggmcttagtcccaccttcactcagccttctctttccctggtcttgtggactagctactragagctatgytaagtaaagcatagcattttgtggttwatgaatcttaccgggtttgraagctgatttttgaagctgtatgcaggttatcttttcagtcttgttttaaaaatcaattccacctgtaagaragwaggggagggggscagtgagtgsgatgtaaasysaaaaagaaaaataaaaaatattaattccaatatggtwaaaaaaaaaaaaaaaaaa

SEQ ID NO: 151 - DNA, 1095 bp, Rattus norvegicus
gtgccgagcacagttactggaaggcttaaccaaagttttgatgcctgggaaccgcgcaggaaaaacacgcggaacgtgcttcacagtggcggctaactgctctcgttcgctgtgcagagccgtctggcagggttgacctcctaaagggatattccatctttattaatcattagtagtgtggtcagagacttagcaccattggtctcccccaacctggtccagacattkcrgsastktatcggaayrgcwwcrmswgsrhvvadvhskyrmrrytkcrrgtctttaagaaatagaaatggcatccaaaagagctctggtcatcctagccaaaggagcagaggagatggagacagtgattcctgtggacatcatgcggcgagctgggattaaagtcaccgttgcaggcttggctgggaaggaccccgtgcagtgtagccgtgatgtagtgatttgtccggataccagtctggaagaagcaaaaacacagggaccatacgatgtggwtgttcttccaggaggaaatctgggtgcacagaacttatctgagtcggctttkgtgaaggagatcctcaaggagcaggagaacaggaagggcctcatagctgccatctgtgcgggtcctacggccctgctggctcacgaagtaggctttggatgcaaggttacatyscrmccattggctaaggacaaaatgatgaacggcagtcactacagctactcagagagccgtgtggagaaggackgsctcatcctcaccagccgtgggcctgggaccagcttcgagtttgcgctgsccattgtggaggcactcagtggcaaggacatggctaaccaagtgaaggccccgcttgttctcaaagactagagagcccaagccctggaccctggacccccaggctgagcaggcattggaagcccactagtgtgtccacagcccagtgaacctggcattggaagcccactagtgtgtccacagcccagtgaacctcaggaactaacgtgtgaagtagcccgctgctcaggaatctcgccctggctctgtactattctgagccttgctagtagaataaacagttccccaagctcctgacggct

SEQ ID NO: 152 - DNA, 1612 bp, Rattus norvegicus
  misc_feature (411)..(412): n is a, c, g, or t
  misc_feature (414)..(414): n is a, c, g, or t
  misc_feature (423)..(423): n is a, c, g, or t
aagccatatgatggttaaagagaccccagcagccctcctccacgttgtkyctctgmrcygrctsarwgkmtgatkcwtgmcrckacycttrkcctttystytscckataagaatgtgttgtgcgtcacgttgacccagagctcccttgaccaggcagtggtgagcggcagcaaagtaacgttgctctgcacttttgrtgggagttctccaaayccwgatttattttggtatcgcaaaaggccagacgggtccttccagttcatcctttatagggataactacaggtcccatgatgcagaytttgttcaaggtcgattttctgtgaagcacagcaaggctgacggaaccttccacctggtgattgctccagtgaggcttgaagacagygctacgtattactgtgccyyarsnnvngstsdcwcnyvyvwkkakggmbrckdkmhmsygaywrastcatctttggacaaggaacccaagtgactgtggaaccaaaaaaacagcctcctgccaaaccatctgtcttcattatgaaaaatggaacaaatgttgcttgtctggtgaaggatttctaccccaaagatgtgaatataagtctcagatcgtccaagaagatarcggaattcgaccctgctatagccatctcccccagcgggaagtacagtgctgtcaagcttggtcagtatggagattcaaattcagtgacatgttcagttcagcacaacagtgaaactgtgcactcaactgactttgaacaatatgcagattctgtcgataatgtaaaaccaacagaacctgcaaaaaatgacacacaaacttcagagccttgccacagcccaagagtcatgattcatgccaagaaggtaaacacgatgtccctcacagtgctgggactrcgactgctgctcgccaagactgttgccatcaattttctcttgactgccaagttattcttttaaggtgggctggcatgaggagactgaaagaaatcaaaagcttagaaagatgctatatccaaggcttctaacttctcagtgcttcaaactgacccttcaccaccacatttacacagctaacaaaactagcttttctgtgatggcaacaagcctaggtaatcctccagtctagaagaaaaacaaaagtcctkgggagtggagtgtgccctggctttacacgctgctttataaaggcaccgaaarytatgaaaacagatccattctactttacccctataactggtatactttgaaaatggtgtttcatccctctctatttacccagaactggaaagtggggaccagtaaatcaccagctycattatccagggggaaaatggtcttgggagagagaacccatacctttttagctaaatgtggaaagctgctcatccctagccagagctcccctcctcctctcctgaggcaggaggtagggcccactctctgtgtttgctccaacagccacataggagagttttcctagtagcactagggtgtgaacaatgttagcactttctgtttctcctgatactttacaaacaaaatcacgtttggcttcctcgaygctctccaagcagacaataaagcttctaaacccgcaaaaaaaaaaaaaaaaa

SEQ ID NO: 153 - DNA, 1680 bp, Rattus norvegicus
agattaccctttggaagaggctgtgctgagccgtgaaatcttcacttcctctgttcacggcaagttcccaaccacaagtgccaaaggcagagmrgcasgcagsacgagacctgaccccagcagccacagccagagcagcagccaagccatgtaccttgaggtcagtgaacgtcaagtgctagatgcctcggacattgcctttcttctggaaaacagcacatctccctacgattatggggaaaamraaarmramwwmtctgactccccgccctgcccacaggacttcagcctgaactttgacagaaccttcctgccagtcctctacagcctcctctttttgctggggctgctaggcaatggggcagtggctgctgtgctactgagccagcgcactgccctgagcagcacagacaccttcctgctccacctggctgtggccgatgtactgctggtactaaccctcccactgtgggcagtagatgctgctgcccagtgggttttcggctctggtctctgcaaagtggcaggtgccctgttcaacatcaacttctacgcaggggccttcctgctggcctgtataagctttgaccgctacctgagcatagtgcatgccacccagatctaccgcagggacccctgggtacgtgtagccctcacctgcattgttgtgtggggtctctgtgtgctctttgccctcccagatttcatcttcctgtcagccagccatgatcagcgcctcaatgccacccattgccagtacaacttcccacaggtgggtcggactgctctgcgtgtactgcagctagtggctggtttcctgatgccccttctagtcatggcctactgctatgcccatatcctggctgtgctgctggtctccagaggccagaggcgctttcgagctatgaggctagtggtggtggtggtggtggcctttgccgtctgctggaccccctatcacctggtggtgttagtggatatccttatggacgtgggagttttggcccgcaactgtggtcgagaaagccatgtggacgtagccaagtcagtcacctcaggcatgggctacatgcactgctgcctcaatccactgctctatgcctttgtgggagtgaagttcaaagaacaaatgtggatgttgctcatgcgcctgggccgctctgaccagagaggmccgcagcggcagccttcatcttcacggagagaatcatcctggtctgagacaactgaggcctcctacttgggcttgtaattcaggaatgcaactggagcctgtgcaacccaagtcctaamasamtycmggcwckwskccttgtagttgggctagctctaacttacccataactttgytgctgggactcagtgacagctcagcatatccaggtctcctgagaaccactctcagctccaaggacagcagcacctttastgagccatgccctgcctccgctgttttagaactagttgcctggagccccaccacccttctaaattagcagatagcactcagccatccctgtgtgagaagaggaagagacaaatagcactgaaggccaggccttgctcagcactgaatgtgtttatggtctccaatatctcaacatgtgcccaattttatggctagaaaccctgcttaaactttcaataaacwagatawtgrggaaaaaaaaaaaaaaaaaa

SEQ ID NO: 154 - DNA, 3585 bp, Rattus norvegicus
cggccgctgcagcctcacattcggtcgccaaactggaggagcgacggaagcccgatcccaggaggatggaggatgaagctgtcctggacagaggggcttccttcctyaarcatgtgtgtgaygaagaagaagtwgaaggycaccayacsatytacatyggrgtccatgtgccsaagagytacmggagaaggagacgycayaagagaaagrcwrggcacaargaaaagaaggaraaggaragratctctgagaactaytcygacaaatcagatrtkgaraatgckgaygaatccagcrgcagcatcctmaarcckctcatctcycckgcygcagaacgymyycgwkycrtcttgggagaggargatgacagcccagcwccyyctcagctcttcacggaactsgatgagctgctggcygtggatggrcaggagatggartggaaggaracagccaggtggatyaagtttgaagaraaagtggaacagggtggggarmgatggagcaarccccatgtggccacmttgtccctkcayagyttrtttgagctgakgacatgtatggagaaaggatccatcatgcttgaycgggaggcytcytctctcccacagytggtggagatgattgywgaccaycagatygagacaggcctmttgaarccygamctyaaggataaggtsacctatackytgctscggaarcaccgrcatcaaaccaagaaatccaaccttcggtccctggctgacattgggaagacagtctccagtgcaagtaggatgttyascaaccctgataayggtagcccagcyatgacccayaggaatctgacwtcctccagtctsaatgacatttctgakaaaccrgagaaggaccagctgaagaataarttcatgaaaaaaytgccmcgtgatgcagaagcttccaacgtgctygttggggaggttgacttyttggayactccyttcattgcctttgttmgkctacagcaggctgtcatgctgggtgccctgactgargtkcctgtgcccacaaggttcttgttcattctcttaggtccwaaggggaaagccaagtcctaccaygagatyggmagagccatygccaccytgatgtctgaygaggtgttccaygayatygcttayaaagcraaagayagrcacgacctgattgctggyattgaygagttcytagatgaagtcatygtcctkccacctggggaatgggayccrgcaatyagratagarcctccwaagagyctyccatcmtctgacaaaagraagaatatgtactcaggtggagagaaygttcagatgaatggggayacrccycatgatggaggycacggaggaggaggmcayggkgaytgtgaagaaytrcagmgaactggmcggttctgtggtggaytaattaargacataaagaggaaagcrccattttttgccagtgayttttatgaygctttaaatattcargctctytcggcaattctcttcatytatctggsrackgtaacyaaygcyatcactttyggaggmctgctyggggatgccactgacaacatgcagggygtgttggagagtttcctgggcactgctgtctctggmgccatcttttgcctttttgckggtcaaccrctcacyatyytgagyagcacsggacctgtyctrgtktttgagaggcttctwttyaayttcagcaaggacmatarttttgactayttggagtttcgyctttggattggcctgtggtcmgccttcmtrtgtctcatyytggtrgccactgatgccagcttcytggttcartacttcacmcgtttcacggargarggmttytcctctctgatyagcttcatcttyatctatgatgctttcaagaagatgrtcaagctkgcagattactaycccatcaactcyracttcaragtgggctacaacactcwcttytcctgtrcytgystgccacctgacccagytaatmtctcartatctaatgayaccacactrgccccagagkayytgccaacyrtkycttctactgacatgtaccayaatrctacctttgactgggcmtwyttgtcraagaargagtgtkyraaatwyggaggaaasctcgtsggraacaactgtrayttygtkcctgayatcacactcatgtcyttyatcctcttcytgggmacytacacctcttcyatggcymtgaaraaattcaaaacyagycsytattttccaaccacagcaagaaaactgatcagygattttgccatyatcytgtccattctcatmttytgtgtaatagaygccctmgtmggygtggayacyccraarctaattgtgccaagtgagttcaagccaacaagyccwmaccgrggttggttygtyccaccstttggagraaacccctggtgggtgtgccttgctgctgctatcccggctttgytrgtcacyatmctgattttcatggaccarcaaatyacrscygtgattgtraacaggaaagaacataarctcaagaarggagcwggstatcacytggayctsttttgggtsgccatcctcatggtkrtrtgctccytcatggctcttccstggtatgtrgctgctackgtcatctccatygctcacatcgacagtytgaagatggagacagagacttctgcrcctggagaacaaccaaagtttctrggagtgagrgaacaamgagtcactggaacccttgtgtttattctgactggyctgtcagtctttatggctcccatcttgaagtttatmcccatgcctgtwctstatggygtgttcytgtatakgggrgtrgcmtcmctkaayggtgtgcagttcatggaycgtctkaagctgcttctsatgccyctgaagcatcarcctgacttcrtctacctgcgycaygtyccyctgcgcsgagtccacctgttcacytycctgcaggtgttgtgyctggcyctgctytggatcctcaagtcmacrgtggctgckatyatttttccagthatgatcytggcmctkgtagctgtcagaaaaggyatggactacctcttctcccagcaygacctcagcttcctkgatgatgtcattccagaraaggacaagaaaaagaaggaggatgagaagaaraagaaaaagaagaarggaagtctggayagygacaaygaygattctgactgcccatactcagaaaargtyccmagtattaaaattccaatggacatcayggaacagcaacctttcctaagygatarcaaaccytykgacagagaaagatcmycaacattccttgaacgccacacatcatgctrataaaattcctttccttgagtcactgggtttacccagtcctccaagatctccagtgaaagtcgtgcctcaaattagaatagaacttgagtctgaagacaacgattatctttggaggaacaagggaacagaaaccacgttgtaacctgttagtcattctcaaaactgacagttctgttgttaactgttctaattttttttttgtctatgtattttaaaaacttttgtttggtcactgactgaataatacagtcactctctctgcttctctcttgcataggta

SEQ ID NO: 155 - DNA, 3456 bp, Rattus norvegicus
cggccgcgcctcttakgcgggcggagccgctgagcttcgccgcggcggggaggaggggagagcavgctcakaggcggctgcagggcactgggctgggcggtgctttttttttttcttttctttctttctttttttttttttttcgcaatttccactttcggagagcaggaaacccggagcagccgggtgcagcggggccgcgatgcwgcagcagcagcagcaggagtcgccccagggcagcagcggcagcagcagcakaagcagtagcgggcggcgctgagctgctgccaccaccgccgctgaggaagaagccggccaagcagcagccgcgtcccgacgcccgcgcccccgatycccgcgccgcgacctccgcgccccgaaccctacgcycggttccgccaactttcamtctgctttggcgactcagctcggcttggcdccaatggtggaggccatagtggagtttgattaccaggcccagcatgatgatgagctgacgatcagcgtgggtgaggtcatcaccwacrtcmgrawskwggatggaggctggtgggagggacagatcaacggcaggagaggtttgttccctgacaactttgtaagrgaaataaagamkswtktgaagaaagaccttctctctaacaaagctcctgagaagcccatgcatgatgtgtccagtggaaactctttgctttcttctgaaaccattttaagaaccaataaacgaggagagcgacrgagacgccgatgccaggtggcgttcagctacctgcctcagaatgacgatgagcttgagctgaaagtcggggacatcatagaggttgtaggagaggtggaggaaggatggtgggaaggcgtactcaatgggaagactggaatgtttccttccaacttcatcaaggagctgtcaggggagtcggatgagcttggcatttcccaggatgagcagctttccaagtcaagcttaagagaaaccacaggctccgagagtgatggaggcgactcaagcagtaccaagtctgaaggcgccaatgggacggtggcaactgcagctatccagcccaagaaagttaaaggagtggggtttggagatattttcaaagacaagccaattaaactaagaccaaggtcgattgaagtggaaaatgacttcctgcctgtagaaaagacaattgggaagaagttacctccagctacatcaaccccagacccatcgaaaacagaaatggacagcaggacaaagaccaaggattactgcaaagtaatatttccatatgaggcacagaatgatgacgaattgacaatcmaggaaggagatatagtgactctcatcaataaggactgcatcgatgtaggctggtgggaaggagagctcaatggcagacgaggagtgtttcctgacaacttcgtgaagttacttccgtcagacttcgacaaggaagggaatagacccaagaagccgccacctccatccgctcctgtcatcaaacaaggggcaggtaccacagagagaaaacatgaaattaaaaagatacctcctgaaagaccggaaacacttccaaacagaacagaagagaaagaaagaccagagagagagccaaaactggatttacagaagccttctgttcctgccatcccacctaaaaagcctcgtccacctaagaccaattctctgaacagacccggtgtgttgcccccaagaagacccgagcgaccagtgggcccactgacacacaccaggggtgacagttcaaagattgacttggcaggcagcacgctctctggcatcttggataaggacctctcagaccgcagcaatgatattgacstagaaggttttgactccgtgatatcatctastgaaaaactcagccacccaaccacaagcagaccaaaagctacgggaagacggcctccttctcagtcgctcacatcttcttccctktcaagccctgatatctttgactccccaagtcccgaagaagataaagaggaacacatttcgcttgcgcacaraggaatagacgtgtcaaagaagacttccagaactgttaccatatcccwagtgtctgatamcaaggcttccctgccacccaagccagggaccatggcagctgccagcagtgggccagcctctctctcttcagtggcttcctctcccatgtcatcctctttgggaacagctggacaacgagccagttctccatctctgttcagcgcagaaggaaaagcaaagacggagtytgcagtgagcagccaggctgccatcgaggagctcaagatgcaagtccgtgagctgagaaccatcatcgagaccatgaaggaccagcagaaacgtgagattaagcagttactgtcagaattggatgaagagaaaaagatccggctccgattgcagatggaggtgaatgacataaagaaagctctccaatcaaaatgaatacttgatcattgaaacgccacattattcaccccgagtgcaagamtcagatattctgccccaatcaaaatcatcttgtgccaaaaaaaaaaaaaaawwaaargtttgattcatcgtgtccctgtttgaacattcagcacaaaagtcttcttagcacaacacaattctacccaagagaagactctttcccatggtgttgtcctgggtccggcagtggttgtgatttagagccaaacgtgctaaaggcttttctaccttgagatctccggcaaaatgaaaactcaggcagtttagtccatagtagtactattttgatgatattttccattaacaaaatgtaatttcggattattcgtttataggctttataatgttatggttttttttttttaaatcgtgttttgtcacagatgcccctagtgtttgtgctaacgtagtcagaagcaagtgcctcactcacttgctgcagatggagcaaatgctgcctggctttgtattccccatttaggagtctatcacatatgcaatttgaggtccaatccttccctttccctgccagctgacccccaccactctaagagaaattttagcttatatatgatggtatatttacaaaaagagaaagaaaaaatctggtatttgcaatgatctgtgccttctttctaccacccttttgattggagcttttgtgatgcagctaccaagattccaaataaagaaataaaaatcagccacttttatccctgtccactagaggccactgtcttcacagcttctctcaccctagccaaaggtcctaagaggaatccgctgagaagtctggcctgctctttggtaccagctgtgacttttccgtttctcctgctttgaggttgttcacgagactagaaatgtcattccagcttgattgttttatcatcagccaagttaaacccctgcttcctgccttttacacctattgcgtgaacagaatatgcattattaaagcaaaaataaataaaaataaaatgcaagtg

SEQ ID NO: 156 - DNA, 1947 bp, Rattus norvegicus
ccgggagctgctagctcctctatggtcacaaagtctcgaggyttctcgsrckarraggcgactcaaggcggcatccagcaccatgaattcactgatagcagttcctgccagtcaggcctgaaaccttggccccgggagcagccaggagcccttccggwtctttgtcttcaaactgctgggccattccacatctggagcagtcaggcaggtgacaagtgagggtaccctccaccaagaccggaaaaatggcatccggacaaggaccaggtcctcccaagggggactgcgatgaggccctgtctgcttctgaacagcaagttgcccaggacacagaggaggtctttcgaagctacgttttttacctccaccagcaggaacaagagacccagggggcagccgcccctgctaaccctgagatggacaacttgtccctagaacccaacagtgtcttgggtcaggtgggtcggcagcttgctctcatcggagacgatattaatcggcgytacgacacggagttccagaatttaytggaacagcttcagcccaccgytgggaatgcctacgaactyttcaccaagatcgcctccagcctatttaagagcggcatcagctggggccgtgtggtggctctcytgggctttggctaccgtytggccctgtatgtytaccagcgtggtttgactggcttcytgggccaggtgacctgctttttggctgatatcatactacaccattacattgccagatggattgcacagagaggtggttgggtggcagccctgagtttgcgtagagaccccatcctgagtgtagtggtaatttttggtgtggttctgttgggccaatttgtggtacacagattcttcagatcatgaytgccccgggagctccagccacatgactgcytggaytaaactaaacctytccccaacccmcwmmmmwrmaamarwmmwctcctgcctctcagggcaaacaggcacccctgctttggaaagccacggcccgggggtcatggaggcagcatgaccaccccaacatcgcatggtgctactgaaccccatcctgtctcagaggggctgacagatgctctgggggggggggggtcgggcaagaggctgggccaccgcttcccagaaagttagttttagttttatactcccctctggatacaatcctcccttttcatccgctctgcccaaagtcagaacattggggaccagtggctctaacctgccttcccagcacacctgctactttggaaggtcggaagggacctaagcacagtcctgaccctccctacataggaccagctgtaggggtgtgtgatctaccctgccctcccacctcatcttccackryccmmtcctttatcccccctccttctcccctcccctcccccgatccatttttgcctttgcggctggactctcagggattccgagcccagagtgagggcagaggtgagagctcagaccacagctgtctgaacacgtccatcaaggccctccaaaccccaagtgcctccctgaccactgctaccaacctagtgggtaagggaagaccctcaccttctccccagtgcctccctgctggggagggcagtcactctgacaggggaaggggtgggcattcagtgggaggtkctcacgctrgagaactacaccagcaaaagcaactgtggatctggttgcaatgtgaccccccctaaacctgtgaatacttgaaccccaccttcacccatgctcctgttatgcctargtcctcctcgggtggggtggggggtgtttttctctgtcttgcacaacataggggtgagaaaagtcttgattaagccaaatgtagcaagggtggggggaggcagatggattcccccacctcgccctcggtgtytggaaataaacggtgcaatgcccccmmmammmmaaaaaaaaaaaaaaaaacctcgtg

SEQ ID NO: 157 - DNA, 2321 bp, Rattus norvegicus
cgaattcggcacgagctcacttgctgcccaaggctcctgctcctgccccaggactctgaggtgggccctaaaacccagcgctctctaaagaaaagccttgccagcccctactcccggcccccaaccccagcaggtcgctgcgccgccagggggcgctgtgtgagcgccctattctggccacccggcgccccctcccacggcccaggcgggagcggggcgccgggggccatgcggggccarggcmgmaaggagagtttgtccgaatcccgagatctggacggctcctatgaccagcttacgggccaccctccagggcccagtaaaaaagccctgaagcagcgtttcctcaagctgctgccgtgctgcgggccccaagccctgccctcagtcagtgaaaacagcgtagaggatgagtttgaattatccacggtgtgtcaccgacctgagggcctggaacaactccaggaacagaccaagttcacacgcagagagctgcaggtcctgtaccgaggcttcaagaacgaatgccccagtgggattgtcaacgaggagaacttcaagcagatttattctcagttctttccccaaggagactccagcaactatgctacttttctcttcaatgcctttgacaccaaccacgatggctctgtcagttttgaggactttgtggctggtttgtcggtgattcttcgggggaccatagatgatagactgagctgggctttcaacttatatgacctcaacaaggacggctgtatcacaaaggaggaaatgcttgacattatgaagtccatctatgacatgatgggcaagtacacataccctgccctccgggaggaggccccaagagaacacgtggagagcttcttccagaagatggacaggaacaaggacggcgtggtgaccatcgaggaattcatcgagtcttgtcaacaggacgagaacatcatgaggtccatgcagctctttgayaatgtcatctagctccccagggagaggggttagtgtgtcctagggtgaccaggctgtagtcctagtccagacgaacctaaccctctctctccaggcctgtcctcatcttacctgtaccctgggggctgtagggattcaatatcctggggcttcagtagtccagatccctgagctaagtcacaaaagtaggcaagagtaggcaagctaaatctgggggcttcccaacccccgacagctctcaccccttctcaactgatacctagtgctgaggacacccctggtgtagggaccaagtggttctccaccttctagtcccactctagaaaccacattagacagaaggtctcctgctatggtgctttccccatccctaatctcttagattttcctcaagactcccttctcagagaacacgctctgtccatgtccccagctggcttctcagcctagcctttgagggccctgtggggaggcggggacaagaaagcagaaaagtcttggccccgagccagtggttaggtcctaggaattggctggagtggaggccagaaagcctgggcagatgatgagagcccagctgggctgtcactgcaggttccggggcctacagccctgggtcagcagagtatgagttcccagactttccagaaggtccttagcaatgtcccagaaattcaccgtacacttctcagtgtctyasgagggcccgggatccagatgtctggttcatccctgaatcctctccctccttcttgytcgtatggtggragtggtggccargggaagatgagtggtgtcccggatgatgcctgtcaaggtcccacctcccctccggctgttctcatgacagctgtttggttctccatgacccctatctagatgtagaggcatggagtgagtcagggatttcccgaacttgagttttaccactcctcctagtggctgccttaggggmmtkkgaagarcccagtgtgggggcacccattagaatctttgcccggctcctcacaatgccstagggtcccmtagggtacccgctccctctgtttagtytacccagagatgctcctgagctcacytagagggtagggacggtaggytccaggtccaacctctycaggtcagcaccctgccatgctgstgctcctcattaacaaacctgcttgtctcctcytgcgccccttctcagtcagccagggtctgaggggaagggcctcccgtttccccatccgtcagacatggttgactgctttgcattttgggctcttctatctattttgtaaaataagacatcagatccaataaaacacacggctatgchcraaaaaaawaaaaaaaaamwmrag

SEQ ID NO: 158 - DNA, 3286 bp, Rattus norvegicus
  misc_feature (345)..(345): n is a, c, g, or t
cggccgmcagtctccgcagcggcgccggagccgggtgtggggggttgcagcatgcccgcgcgcatcgcttgaggacgccacggccccagctccggagccatggtagtcccggcctgcgtgctagtgttctgcgtggcggtcgtggctggagttacttccgagcctcccggtccagagcagcgagttggtcggagagcggcagaggttccagggcctgaacctagccagcaggagcaggtggccttcggcagtggggacactgtggagctgagctgccatccgcctggaggtgcccccacaggccccactctctgggctaaggacggtgtggggctggtggcctcncaccgtatcctggtggggcctcagaggcttcaagtgctaaacgccacccatgaggatgctggggtctacagctgccagcagcggctaacccggcgtgtgctgtgccactttagtgtgcgtgtracagatgctccgtcctcaggagatgacgaagatggggaggacgtggctgaagacacaggggctccttactggactcgaccggagcgtatggataagaaactgctggctgtgccagctgcaaacactgtacgcttccgctgcccagctgctggcaaccccaccccctccatcccctggctgaagaacggcaaagaattccgaggggagcaccgcattgggggcattaagctccggcaccagcagtggagcttggtcatggaaagtgtggtgccctctgaccgcggcaattacacctgcgtggttgagaacaagtttggcagcatccggcagacgtacaccctggatgtgctggagcgctccccacaccggcccatcctgcaggctgggctgccagccaaccagacagccgttctgggcagtgacgtggagttccactgcaaggtgtacagcgacgcacagccacacatccagtggctgaagcacgtggaggtgaatgggagcaaggtgggccctgacggcacgccctacgtcactgtactcaagactgcaggagctaacaccaccgacagggagctagaggttctgtccttgcacaatgtcacctttgaggatgcgggggagtacacctgcctggcgggcaattctatcgggttttcccatcactctgcgtggctggtggtgctgccagccgaggaggagctgatggaagttgacgaggctggcagcgtgtacgcgggtgtcctcagctacggggtgggcttcttcctcttcatcctggtggtggcggcagtgacgctctgccgtctgcgcagtcccccaaagaagggcctgggctcgcccaccgtgcacaaggtctctcgcttcccgcttaagcgacaggtgtccttggagtctaattcctctatgaactccaacacwcstsycgyccggattgcccggctgtcctcaggagaaggtcctgtcctggccaatgtttctgaacttgagctgcctgctgaccccaagtgggagctatccaggacccggctgacactcggtaagcctcttggagaaggctgctttggacaggttgtcatggcagaagctattggcatcgacaaggaccgcactgccaagcctgtcaccgtggccgtgaagatgctgaaagatgatgcgactgacaaggacctgtcggacctggtgtctgagatggagatgatgaaaatgattggcaagcacaagaacatcattaacctgttgggggcctgcacccagggtgggcccctgtatgtgctggtggagtatgcagccaagggcaacctgcgagagttcctccgggcacggcggcctccaggcatggattactcctttgatgcctgcaggctgccagaggaacagctcacctgcaaggatctggtgtcctgtgcctaccaggtggcacggggcatggagtacttggcttcccagaagtgtattcacagagacctggctgccagaaacgtgctggtgactgaggacaatgtgatgaagattgcagactttggcctggcccgagatgtgcacaacctggattactacaagaagaccacaaatggccggctacctgtgaagtggatggcaccagaggccctttttgaccgagtctacacccatcagagtgatgtctggtcctttggtgtcctcctctgggagatctttacactgggtgggtcaccatatcctggcatcccagtggaagagcttttcaagctgttgaaagagggccaccgcatggacaagccagccaactgcacacatgacctgtacatgatcatgcgggaatgttggcatgcagtgccttcacagaggcccaccttcaagcagttggtagaggatttagaccgcatcctcacggtgacatcaactgacgagtacttggacctctcggtgccatttgaacagtactcgccaggtggccaagatactcctagctccagctcgtccggggacgactctgtgttcacccatgacctgctacccccaggcccacccagcaatgggggacctcggacgtgaagggccgacagtcccacagaccaagccccagccaatgtttacgcggaccctagcccgccctgctactgctggtgtgcagtggaccctagccagcccagcgcaatgggccagcaatagacaagacttcctgcgtgtttatccttggctcctgggtgcagaggcccctggggaacatgtactgctgtagaatgatctcctgactggccagggccaggagcaccaaatgagaatgtaagagggcccccccgcccctgtgcgacagtggggttctggctccctcactccccactgctaccttacagggaccgttgtagagagggctggacttcatgtccagggtgggccttggcctttttggtgcccaaagctgagcctgtagggaggctctgctcttatgtggcaagcctctctcctacatggcaccttgtgcctggggtgagtcatagctcgacacctccaggctgcccgcttcccatcctgtccctcaaattacgggtacctgaagggggggtggccataacttctatcagaaaggtttattccagaggaaaatgtacatttatataaatagatgttgtgtatgatatatatagatatatacatacatatatataagaatatctatatggaaaaaggcaaagctgaggcccaagggagcaagacaccccatggggctcaccagtgagatggcacaggcaggccgagaagcaggggccttgtctggcattgcagtgttgtttgtatctggacctgtatatttgtaaagctatttatcaaccctcgg

SEQ ID NO: 159 - DNA, 1032 bp, Rattus norvegicus
gcgctcgmsatgagtgagctggagcaactgagacaggaggctgagcagctccggaaccagatccgggacgccagaaaagcatgcggggattccacactgacccagatcacagmtgggctggacccagtggggcgaattcagatgagaacacggaggaccctccgtggacacctggcaaaaatctatgmcatgcactgggggacagactcaaggctgctggtcagcgcckcccaggacggaaagctcatcatttgggacagctacaccactaacaaggtccacgycatccctctgcgctcctcctgggtcawgacctgtgcctacgccccctcggggaacttcgtggcctgtgggggkttggacaacawctgctccatctatagtctcaagacccgagagggcaatgtcagggtcagcarararctscctggccatactgggtacctctcctgctgccgcttcctggacgacaaccaaatcatcaccagctctggggacaccacctgtgccctgtgggacattgagacaggccagcagacagtggrwtttgctggacacagtggggatgksaygkccctgtccctggsccccgatggccgcaccttygtgtcaggtgcctgcratgcctccatcaagctgtgggatgttcgggawtccatgtgccgacagacattcataggtcacgaatcggacatcaatgctgtggytttcttccccaatggttatgccttcaccacgggatcagatgatgccacatgtcgcctgtttgacctgcgggctgatcaggagctgctcatgtattcccacgmcaacatcatctgcggsatcamctcggttgscttctcacgcagsggscggctgctgctcgctggctatgacgacttcaactgcaacatctgggatgccatgaagggtgaccgtgcaggtgtcctcgctggccatgataaccgtgtgagctgccttggggtcacagatgatgggatggctgtggctacaggctcctgggactccttcctcaagatctggaactaa

SEQ ID NO: 160 - DNA, 1572 bp, Rattus norvegicus
gagtcgtctgctgagcttgagcagctgagtcccttccctgtctttcactcttctggcatcggtggctttacttcttcgattgagctctgcttcctcgacccccccgggaggccgcctccttcaggcgcctcccttctctctacgaactcgctctgacagccgaggaactggcaagatcctgtacccagagggtgaatgggtatctttcctggaataatcctaatttttctaagggtgaagtttgcaacggcagcagtgattgtaagcggacatcagaaaagttccgctttaagccatgagatgtctggtctgaactggaaaccttttgtgtatggcggccttgcctctattgttgccgagywcgrsrctttccctgtggatcttactaaaacacggctgcaagtccaaggtcagagtatcgatgtccgtttcaaagaaataaaatatagagggatgtttcacgccttgttccgaatctatagagaagaaggcatcttggccctgtattcgggaattgcccctgctttactaagacaggcatcatatggcaccatcaaaattggtatttatcaaagcttgaagcgattatttgtagaacgtttggaagatgagactctcctaattaatatgatctgtggagtagtgtcaggagtgatttcatctactattgccaaccccactgatgttctaaagattcgaatgcaggctcaaggaagcttgttccaagggagcatgattggcagcttcatagatatataccagcaggaaggcaccaggggtctgtggagaggtgtggtcccaactgctcagcgtgctgccatcgttgtgggagtagagttgccagtttatgatattaccaagaagcacctgatagtttcgggaatgctgggagacacaattttaacacactttgtttccagctttacctgtggtttggctggggctctggcatctaaccctgtggatgtggtgagaactcgaatgatgaatcagagggcaatagtgggacatgtggacctctacaagggtactttggatggtattttaaagatgtggaaacatgagggattttttgcactctataaaggattttggccaaactggcttcgacttggaccctggaacatcattttttttattacgtatgagcagctcaagaggcttcagatctaagamctggaaayccatcagcccagccctgctgccctttctaccgttcctctttgtgttcctgatgtattttgacaaagatgtgtgtgtttacagaaccagcagtctcgcagggcccctgactgaagagtagtasgrcgackwrrgtttatgcatttgtgttccctcttccctgagaagaagtttcgacattgagagtgtgaccccagattggtgtcttctgtgaagatggatactgatgggtgacattcaaaagggcctcctttttaactgtagcttcaatgtagttggttttcccgagacaggctacagcagcaggctaccggcacagttactgctatgtgtgtttttgacctcagttctcattaaagtatttattgrtygaaaaaaaaaaaaaaaaaa

SEQ ID NO: 161 - DNA, 4053 bp, Rattus norvegicus
  misc_feature (1265)..(1265): n is a, c, g, or t
  misc_feature (1287)..(1287): n is a, c, g, or t
  misc_feature (1412)..(1412): n is a, c, g, or t
ataatccgaaggtgtatccagaggttcttcagtctgaatgacggacagtcatggtcccagaagcgtcactatcaggaagcgtacattcatggccatgcagagaccccagtgtatcgtttctcattggctgatggaactattgtgagtgctcagacaaagagcaaactcttccgcaatcctgtaacgaatgatcgtcatggcttcgtctcgacccacttccttcagagagaacagaatggatgtagaccaaacccaatcctgcaggacaaaggcatccgacctcctgcagcagggtgtggcatgagcctgtctccaagtcagagtgtgcagatgctgggcagccggacctacggcgtggccgaccccagcaacacagggcagatggctggagctaggtatggggcttctagtagtgtagcctcgctgaccccaggacaaagcctgcagtcgccatcttcctaccagagcaacagctatgggctcaacatgagcagtcccccacacggcagtcctggtcttggccccaaccagcagaacatcatgatttctcctcgtaatcgtgggagcccaaagatggcctcacaccagttctctcctgctgcaggcgtgcactcgcccatgggctcttctggcaacacagggagccacagcttttctagcagctccctcagtgccttgcaagccatcagcgaaggtgtgggaacctctcttttatctactctgtcttcaccaggccccaaattggataactctcccaatatgaatataaaccagccaagtaaagcgagcagtcaggattctaagagccctctaggcttatactgtgaacagaacccagtggagagttcggtgtgtccatcaaacagcagggatcccccagtgacaaaagaaaacaaggagaacagtggggaggcgtcagagactcccaggggacccctggaaagcaaaggccacaagaaactgctgcagttactcacatgctcctcggacgaccgaggccattcctccttgaccaactctcccctggattcaaattgcaaagactcttccattagtgtcaccagcccctctggagtgtcgtcctcgacatcaggagcagtgtcttccacctccaatatgcatgggtctctgttgcaagagaaacaccggattttgcacaagttgctgcaaaatggcaactcaccagcggaggttgccaagatcactgcagaagccactgggaaagacactagcagtactgcttccggtggagaagggagtgtcangcaggagcagctgagtcctaanaagaaggagaataatgcccttcttagatacctgctggacagggacgaccccagtgatgtgcttgccaaagagctgcagccccaagcggacggaggggacagtaaactgagtcagtgcagctgctncaccaatcccagctccgggcaagaaaaagacccgaaaattaagacagaggaggtatcgggagacctggataacctagatgctattcttggagatttgactagttctgacttctacaacagtcctacaaatggcagtcacccaggggccaaacagcagatgtttgcaggaccaagttctctgggtttgcgaagtccacagcctgtgcagtctgtgcgccctccatataaccgagcgctgtctctagacagcccggtgtctgttggctcagttccgccagtgaagaatgtcagtgctttccctgtgttaccaaaacagcccatactggctgggaatccaagaatgatggatagtcaggagaattacggtgccaatatgggtggaccaaacagaaacgttcctgtgaatccgacgtcctcctcaggagactggggtttagcgaactcaagggccagcagaatggagcctctggcttcaagtcccctgggaagagctggaggagactacagcgcagctttaccaagacccgccttggggagctccgggcctaccttgccacttcgttctaatagactgccaggcgcaagaccaacgttgatgcttcaaatgagagctggtgaggttcccatgggaatgggcgtcagtccctatagcccagcagtgccatctaaccaacccggatcgtggccagagggcatgctctcgatggaacaaggtcctcatggggctcaaaataggcctcttcttagaaattccctggatgagctgctcgggccgccttctaacccagaaggccagagtgatgagagagctctgctggaccagctgcacacgctcctgagcaacacggacgccacaggcctggaggagatcgacagggccctgggaattcccgagcttgtgagtcagggacaagctttggagtccaaacaggatgttttccaaggccaagaagcagcagtaatgatggatcagaaggctgcactgtatggacaaacatacccagctcagggtcctccactgcaaggaggctttcaccttcaggggcagtccccgtctctgaactctatgatgagtcagattagccagcaaggcagttttcctctccaaggcctgcatcctagagccagcatggtgagaccaaggacaaacaccccgaagcagctgagaatgcagcttcagcagcggctgcagggccagcagtttttaaatcagagccggcaggcactggagatgaagatggaaagccccactggtgctgctgtgatgaggcccatgctgcagtcccagcaggctttctttaatgcccaaatggcagcccagcagaaacgagagctgatgaaccatcacctgcagcagcagaggatggcgatgatgatgtcacagccacagcctcaggccttcagcccacctcccaacgtcaccgcttcccccagcatggacggggtcttggcaggctcagcaatgccacaagcccctccacaacagtttccgtatgcgacaaattmwsgarkgggacaaccgccagagccagcctttggtaggggctctagtcctcccagtgcaatgatgtcatcaagaatggggccttcccagaatgccatggtgcagcatccccagactgcacccatgtatcagtcctcagagatgaaagggtggccatcagggaacttggccaggaatggctcttttccccaacagcagtttgctccccaggcgaaccctgcagcatacaacatggtgcacatgaacagcagtggtagtcacttgggacagatgaccatgactcccatgcccatgtctggcatgccgatgggtcctgatcagaaatactgctgacatgtccctggtgggacactgtacagatgacactgcacaggaccattgggacataaggagtcattgtctatgyatccagcttggaagcaaggccagcgtgaccaccaccgggtgttcccaagtgctgtcatctgagcagaactgggtctcaagctgaagcgcactgtctacctgatgccctgcctctgtgtggcatggkgttctscctcatgtaggatgtgatctggagatgggatgttcatgatcaccaytctcttacgtcacttccttytgccccmccagccaaagtyttcmcataaatctagatggctagggtttctgtcctgcagcactggaaggggagcmcagactgccttgaggcagcaagtggccctgtgtcctctcctgtcagtgcaatcagtgtttstacgctcgtgtcctttacaggggtagtccccagagtctgttgtcctggatctcctcctgaggaggtccccataccccgtaattctcaaggatttgtcattgatgtttaatggctttgcagaagggaaaatgaggtggcaatattgaattttcccgccccaatgtgcarmmaarwrmmmwwwamtgaggaagtcmcagagaaatgcaatgttcttgagggcatgaggaatggtgaaccmcattcctggtttttgtctgcmctaatctgttaggacaagaacatgattgttttttktttgtttgktgtttctttcaagtactggcgtcaccctttgcctatatggtagagcaataatgctttgaaataaacttgtgaaacccaaaaaaaaaaaaaaaaaa

SEQ ID NO: 162 - DNA, 1287 bp, Rattus norvegicus
cttctgcccaagtcgctccctgctggaagtgctctcgacattcccgactctctggccctctttctgccctggttgtacccaggtgtgttggcgaatagctcccaggacgtcctgtgtgtgtctgcaagataatgatgtttgaactgaactactaaggattctgaaatcaaaacttacactattaatcatggcaggaaaatcgtctctttttaaaataattctccttggagatggtggagttggcaagagttctcttatgaacagatatgtarccaataaatttgattcccagctcttccacacaataggtgtggaatttttaaataaagatttggaggtggatggacattttgttaccatgcagatttgggacacagctggtcaagaacgattccgaagcctgaggacaccattttaccgaggttctgactgttgcctgcttacatttagtgtcgatgattcacaaagcttccagaatctgagcaactggaagaaagagttcatatattatgcagatgtgaaagagcctgaaagctttccttttgtgattttgggcaacaagactgacataaaagaacggcaggtatctacagaagaagcccaagcctggtgcaaggacaacggcgactatccttacttcgaaacaagtgcaaaagattccaccaatgttgctgctgcctttgaggaggcagttcgaagaattctggctacagaagataggtcagatcacctgattcaaacagacacagtcaatctgcaccgaaagcccaagccaaactcttcttgctgttgatggcattaaagggatagctggtgcattttaaccaaccaacacacacacacacacacacacacacacacacacacacacacacagacacacgaatgagagtggagaacaaattagtatgcagaagagttcatctaytaataaaattcawttaacgcatattgttscctcattagtccwtggragaagggmccwctcactytgaaggaatctatttastcagtawtggcacattacatttataaactgtaatggttgtctattrtttsttaaaattaaaacattagtgctaataagatgaccaagaattgayttwwttgtaattcagacataaatcttgactattcttagattgttttgccccacaagaaaatggagaattacttttatatgtgtatatttttatgtaatgagcattctattcttggtccaggaaagtaaattcctacagcaatactattaaagattaaaatctaatgcaaaaaaaaaaaaaaaaa

SEQ ID NO: 163 - DNA, 1361 bp, Rattus norvegicus
cgcagtcttgacaggcagaggttggccttacaccgatcgggagccacaggttgcagactgcagagagccgtgcccatgactgtgactctgtgaggctggctgcctgcgcgccttggttgctggcttgctggcgggtccccggagctcgagaagactagagtgggccccgaaacctgataccagcgccctcactgccgccgctctgcgggctggcccgccaagaccctcactatgactgatggagactatgactacctgattaaactcctggcccttggagactcaggagtagggaagacaacatttctttaccgatacacagacaataaattcaatcccaaattcatcactacagtaggaattgattttcgggaaaaacgtgtggtttatgacacacaaggagcagatggatcttcagggaaagcctttaaggtacatctgcagctttgggacactgctggacaagagcggttccggagtctcaccaccgccttcttcagagatgccatgggcttcttactaatgtttgacctcaccagtcaacagagtttcttgaatgtcagaaactggatgagtcaactgcaggcaaatgcttactgtgmamrmssagatatagtattaattggcaacaaggcagacctgctggaccaaagggaagtcaacgagcgacaagcacgagagctggctgaaaaatatggcrtaccatactttgaaacaagtgcggcgacaggacagaatgtagagaagtcagtggaaacccttctggacttaatcatgaagagaatggrgaagtgtgtagagaagmcgcaggyyccggacactgtcaatggtgtgaattctgggaaggtcgatggggagaagccagcagagaagaaatgtgcctgctagaccctcagaggaaccagtgatggagagctcacccaaatcctatgtcccaaaacaatgacaaacacagcgtggttgttgagtagtcgctcatgagcgatggcgtgtctttctcccctgaccccaatctattttaacaaagcagaatggtcatagtgttaaaagaactgtcctgtgatcccaagtcccttccaaacaaaactcaaagctgccccacgtgaatgctcagttgtatttttataaggttgtatatatkaaaaaaaaaarwawwrrtcagttttaaatgaaagcacattattactgtcagcctggagaatggaagaggctaactaaatggagatgataaaaggatgatttctgctttcatctatgtatgcggagtatgactcatacaacttctatatttgcactggggaagacatattcctaaaaatagatgcataacaaagatgaaagcgacccaagattattcatgg

SEQ ID NO: 164 - DNA, 2056 bp, Rattus norvegicus
atggacgacattttcactcagtgccgggagggcaacgcggtggcggtgcgcttgtggctggacaacacagagaacgacctaaatcagggggatgatcatggcttctcccctttgcactgggcctgccgagaaggccgatctgcagtggttgaaatgctgatcatgcggggagcacggatcaatgtgatgaatcgtggggatgatacccccctgcacttggcagctagtcacggacaccgtgacattgtacagaagctgttgcaatacaaggctgacatcaatgcagtgaatgaacatgggaatgtgccccttcactatgcatgtttctggggccaagaccaggtggcagaggacctagtagctaacggggctcttgtgagcatctgtaacaagtatggagagatgcctgtggacaaagccaaggcaccccttcgagagcttctccgagaacgggcagagaagatgggccagaatcttaatcgtattccatacaaggacacattctggaaggggaccactcgcacaaggccccgaaatgggaccctgaacaaacactctggtattgacttcaaacagctyaacttyctggcaaagctcaacgagaatcattctggagagctatggaaaggccgctggcagggcaatgacattgttgtgaaggtgctgaaggttcgagactggagtacaaggaaaagcagggacttcaatgaggaatgtccccggctcaggattttctctcatcctaacgtgsttccggtactaggtgyttgccaggytcccccagctccccacccaaccctcatcacacactggatgccatatggatmtmtmtacaatgttctacatgaaggcaccaatttcgttgtggaccagagccaagctgtaaagtttgctttggacatggcaagaggcatggcttttcttcatacactagagcytctcatacytcggcacgcactcaatagccgtagtgtaatgatcgatgaagatatgactgcccgaatcagcatggctgatgtaaagttttctttycagtgccctgggcgcatgtatgcacctgcytgggtggcccctgaagccctgcaaaagaagcctgaagatacaaacagacgctcagcagacatgtggagttttsccgtgcttctgtgggaactggtgacacgagaggtgccctwtgctgacctttctaatatggagattggaatgaaggtggcactggaaggcyttcggcckmstatcccaccaggwatttyccccmacgtgtgtaagctcatgaagattkgcaygartgaagaccctgywwwkbkwyyywwktttgacatgattgtacctatcwtggaraagatgcaggacaagtaggacttgaaggtccctgcccaaacttcaraagtatcagcatatggytgggggaatgcamttccccgaarctgaagatctctssttgcctcccctgtcymtaaksatgktmctaccccagktrtggggcttgttccctgctcccatccctaccactgtagccccararagggmtgggctcaragckwtgtcacttrccacwtgmkgtmkccmaaywtkkkwkkkdtbwkyhybkyybkkcacwayarartttwyydkraaammaddmwmawrwddvramarmrrrraaramwaatmsatctgggttgggtggcycargtgaaktadtgcggcttcttcacattgatgccawacycsctgarggcasgggtcaagtcctccatggttasggtgtacwtkcgatscttgctcttgctccgggagctgccagaggctgtacccttcawtttgcastgctgtmkggcatcattggcaatakctgasatgaatttcygggcasctagtgagatgagccgaattatgcgtgggtctgaagcttcaaagccagcacggttcaggtagtrrccagtcactgcwtccgggatcgtaggtgtataaycctycaactgcatcaagaagtccactartggtgtgctggacactacgggcttcacttcwccgttggccgcgctcgstmgdrcstaaaccccgtcctcgtgcc

SEQ ID NO: 165 - DNA, 1016 bp, Rattus norvegicus
agccccatcactgaccgaatgcctgaggcaactgcaaagcctaccaccccacattgcttcacctgtgtggtctgcgcctgtcccctggagggcacttccwkcawtrtgkmcaagcgttgctctgtctgctcggagcccatcatgcctgagcctggccgsgatgagactgtgcgagtagtcgcgctggataagaactttcatatgaagtkykrcamgwgtgaggactgtgggaawgccctgtccattgaggcagatgacaacggctgtttccctctggatggccatgkcmykwgkcggaagtgccackctgctagagcccagacctsaskwgragatggacctcctyccacaccamaggkccatccsccrccgtggaccacccacagaggccagtccttgcctccrccctccctgcatyccaaatccctcccttgtgtctcaagtgccctsacsmrgggccccagmatggcctagaagtactgaggcyccgtcctggtgctgaggcccagccctgggcwccaacccttgcctcttctgcagggatcacctatcatcctgaggcccccaacccaagggtcacatttagtgctgctgctttcactgctgcaccaatgcccttggctggcctgagcagcmtatgcaaygtgcttgctgagggtggaasccccaaccctctggkaacgtggctccagcagcctggacacccaccttgytmtgtgmtgstaggttgtggccacasctargattataaaacctcattttccagaawwrhwrrmamwwrrttttttgataataccctwtactyttggagttkaaataaagggtcttgatggggaaaaagatcarrrrarrrwwaaaaamwcaactytgtttatttacaaaaatagataatgcatatgtaagtatatatattaaaccctccccccagcacccacccacccacagtccccttcacttgtaccccacccaccccctttataaacaaaggctccttggtccaaaaaaaaaaaaaaaaa

SEQ ID NO: 166 - DNA, 314 bp, Rattus norvegicus
  misc_feature (207)..(207): n is a, c, g, or t
  misc_feature (277)..(277): n is a, c, g, or t
cggccgcgttcttctggctgctctgcgtcttggggacctaccccctggcgcgctgcggtcgggcaggagacgcctcactgagagaactggagaggggggacggaaaccgcttcctggagcgccagagcaccgtaccactgcgcctcatctaccgcttgggcggcgaggacgaaactcagcacgagcagctcaacacgcgggtgcggngcgaccctggcggacggcagcctactcacgtggacaaggcaagcttccgggtggacgcctttggaacctncttcattctcgatgtcctgctgaaccacgagttgctg

SEQ ID NO: 167 - DNA, 533 bp, Rattus norvegicus
cggccgcgcgttgagccgaacctgccgaagccctagccatggggccgcgcgcgctctcgcccctcgcctctctgcgactaaggtggctgctggcgtgtggcttgctgggcccagtcctcgaggccgggcggccagactctgaacagaccgtccatctttcttcttatgaaattgtaactccttggagattaagtagagaaagaagggaagctctgaggcccagttcaaaacagatctcttatgtcatccmggcccaaggaaaacagcatattattcacttggaaagaaacmcagaccttttacctaacgactttgtagtttatacctmcgacgaggagggctccctactctctgaccatcccaacgtacagagtcattgccattaccgaggctatgtggagggagtgcccaattccaccgttgctgtgagtgcctgctttggactcagaggattgctgcatttggagaatgccagttttggaatcgaacctctgcacaacagctcmcacttygagmwygcctcgtgccgaatt

SEQ ID NO: 168 - DNA, 394 bp, Rattus norvegicus
tttttttttttttttttcgtttttaatgctttttacttctgcaactatatataaatatcaaatcagtttttccaagccggcctcctcttttgggagccattgtccccttaggcaacaccactgtcttgtctgagacctaccatgctaactcctccggactggtacacagaacacatggccatgaggggggccaggccaatggtggtgccttggaaggacctgcccgtgattagctgggcattgtcatggctcttctgggtgagcagcttgcgcctccaactgagaaaggaccagagggtagagtacggattctctgagacttcacacttatccccgtgtgtccacacctcctagccgacaagcgcgatccggatgctcagggagcggtaaaact

SEQ ID NO: 169 - DNA, 421 bp, Rattus norvegicus
tttttttttttttttttaaaggaagccagtatatttacttttcttaattcagttccaagctaagaggcgatttaaatgtgcttttgaaaacatgacacacacaggcttgtgcatcttcatggcaaacggatgcgttcctgtgcgtctccttccgaagccatggaggtgcattgctgctgcagtgggagagtgggaatgaacacagtctgcaatgatctaaaactggaatcatacaaacccttaggtccttcatcctttggggggttggggttccgaactggatcccggatgctgcagtctgtgcctgcccaagtgaagtcacagatgcaggtggcttcgttgctacacaccccatggcctgagcagactttacccttggagtcaagtgggcagctgctcatatttagggcttgaatctgta

SEQ ID NO: 170 - DNA, 756 bp, Rattus norvegicus
aagcacagaacaccgccgccaccagagatcagtaacataacataaacattcacatcagggcccctcatgagcgtgagtcttttattcctgtggcagccacagggatcaaattccacacggagagtgtgacacccttcctagccaagaactcccactctccccattcttcccattgtggaaattcggcccagrgwgtagagctgcccgcccaaggtcatgcaamaaggaggtggtgtccaacacaccctgctttggctgcttctctcggtcagtcccctccgacagtcagccactttcttcctcacagcaagtaaaggaaagaaatacacggagagcaagcaaagtgttcaacagagactcacgtccaagtgtggtttctatggtatgtactgtgtgtgtgtgtgtgtgtgtgtgtgtgtgtgtgtgtgtgtgtacacgtgctcacatggtttgttgagaatctcagctccagagtgtagagacaaccagacaggccattcagcctggtttctatctccctgaagacggtgttcccacaataaccagagtcctcacatctgcaggsrwgsgtcccctttagagatggacacaaaaagacactgatagagcaaaaataatcaaaccaacacataccgattaaaaccccaggggggcccaaaatcaccacgttacctaataacaactagaggccagtttttctaagtgccaggcctctctgaggtatcactgtcccagtgttttcctgtgctgtgaatc

SEQ ID NO: 171 - DNA, 1559 bp, Rattus norvegicus
  misc_feature (1368)..(1368): n is a, c, g, or t
tttttttttttttttttaaattgcaagcgtattcttttaatgactccagtaaaattaagcatcaagtaaacaaaagtggaaaagaacctacacttttaacttgtctcactagtgcctaaatgtagtttaaaggctgcttaaattttgtgtgtagttggattttttggaagctgaaggtatccatctgcagacattgaggcccaagttgaatttggattcragtggattcttaacacttctgcctgtgctgaagagaagcttcataaggaacaagcaagttgaatagagaagatagtgatcaataagaggcatttagtggtctttttaatgttttctgctgcgaaacatttcaagatttattgattttyytyyyycattyyccccaccacactcasacacgcacgctcacactttttatttgccataatgaaccgtccagcccctgtggagatctcgtacgagaacatgcgttttctgataactcacaacccarccaatgcgactctcaacaagttcaccgaggaactcaagaagtacggagtgacamctttggtccragtttgtgatgctacctatgacaaagctccagttgaaaaagaagggatccacgttctagactggccatttgatgacggagctccgccccctaatcagatagtagatgattggctaaacctgttaaagaccaaattccgggaagarccaggctgctgtgtcbcagtgcattgtgttgcaggattggraagggctcctgtgckagttgcacttgcactgattgaatgcggaatgaagtatgaagatgctgttcagtttataagmcaaaamasragrggagcattcaattccaaacagytgctttacttggagaaatmccgacctaaratgcgattwygctycaragatwccaacgggcactgctgtgttcagtakaagcagaggamgsccggctggatcgtggcattasagggaactmtgggtacctggaaatgtgaatctggattcywacctgtgtyatyaaagtrgtgatggattccgtactcctcgactyctcatgattgrgargaaggcaaacgataaagaaatcccyctrtracacgaataaaatgtttwrraaarraaaaawraaarrraaarvrattawtywagtgaaagawgattttgctcctagttttggagttttkwtttttgccaggattgaattatttcraatctcctgtgttttttaagctttttcaaaatagatgtytgaggaaaaccagcagaatattaaccagtgcggagccagttgttggggagcacacacttccattatgcttggsacataggtctccttgwggtgggatttgggggaggtagattttccctykntsskgcctccctcccttbtcctgataracgtmsatsgwrymgaaagaaacccttgttgctgtaratgtgcgtgtgtctggcagccttaagcccacctggscamttttaggaaaaaaaaaaaaccaaaaaayaaatmaatgrataaataaataaaaataaargcaaaraaaaarmaaaaaaaaaaaaaaaaa

SEQ ID NO: 172 - DNA, 1077 bp, Rattus norvegicus
  misc_feature (686)..(686): n is a, c, g, or t
  misc_feature (922)..(922): n is a, c, g, or t
  misc_feature (968)..(968): n is a, c, g, or t
tccgccaaagttttgatgcctgggaaccgcgcaggaaaaacacgcggaacgtgcttcacagtggcggctaactgctctcgttcgcggtgcagagccgtctggcagggttgacctcctaaagggatattccatctttattaattccagacatttcagcagtttatcggaacagcaacaacagcaacaaaaccttcaaaatttacaagtctttaagaaatagaaatggcatccaaaagagctctggtcatcctagccaaaggagcagaggagatggagacagtgattcctgtggacatcatgcggcgagctgggattaaagtcaccgttgcaggcttggctgggaaggaccccgtgcagtgtagccgtgatgtagtgatttgtccggataccagtctggaagaagcaaaaacacagggaccatacgatgtggttgttcttccaggaggaaatctgggtgcacagaacttatctgagtcggctttggtgaaggagatcctcaaggagcaggagaacaggaagggcytcatagctgcmatctgtgcgggtcywasrryyckgcwsgmksacgaagtaggctttggatgcaaggttacatcgcacccattggctaaggacaaaatgatgamcggcagtcaytacagytactmagasasccgtgtgrrraaggacggcctmatcctmaccanccgtgggcctgkgaccagcttcgagtttgcghtgsccattgtggrggcackcagwggcaaggacatggctawccaagtgaagrccccrcttgttykcaaagaytagagcccaagccbtrgaccbtggacccccaggbtgagcaggcattggaagcccaytagtgtgyccacagcscagtgaacctcaggaactamcgtgtgaagtasmccshtgcwcaggaatytcgcmmtgsmwntgtmmtattytgagccttgctwgtagaatmaacagttccccaagcnramddmhhaaaammaaaramwwrrwatttgttggctgttgatttcactgcagcctcaggcatctcatcaatccgggccggccaatgtgggtatcccttcatcgtcgcga

SEQ ID NO: 173 - DNA, 5082 bp, Rattus norvegicus
  misc_feature (576)..(576): n is a, c, g, or t
  misc_feature (598)..(598): n is a, c, g, or t
  misc_feature (2731)..(2733): n is a, c, g, or t
  misc_feature (2738)..(2739): n is a, c, g, or t
  misc_feature (2744)..(2747): n is a, c, g, or t
  misc_feature (3132)..(3147): n is a, c, g, or t
  misc_feature (3226)..(3228): n is a, c, g, or t
  misc_feature (3234)..(3234): n is a, c, g, or t
  misc_feature (3390)..(3394): n is a, c, g, or t
  misc_feature (3429)..(3429): n is a, c, g, or t
  misc_feature (4195)..(4195): n is a, c, g, or t
  misc_feature (4199)..(4199): n is a, c, g, or t
  misc_feature (4732)..(4732): n is a, c, g, or t
  misc_feature (4777)..(4777): n is a, c, g, or t
  misc_feature (4837)..(4837): n is a, c, g, or t
  misc_feature (4899)..(4899): n is a, c, g, or t
  misc_feature (5033)..(5033): n is a, c, g, or t
  misc_feature (5040)..(5040): n is a, c, g, or t
tggtcaagttcagggactaggtaaggagctctactctctgacctcaggcttgcagaaactttaccatgcactgcaggcgttgctctcggtcacaccccaccaatttggaatcagtaggcctcagacccaggtgtgaggaagttcaaagttaatggcactatatttatagctcagtttcagagtacataagacatgggtcatggattattgtgctttacaaagctccttcagttgttcatctgttctctgttggagggcaaaacctggtattacatgaatttttcaaatccctatcaccactttcccagctaatttcacagtggtgaaagttaagtgaaaagtacaaggccctgaatcctgtgctttctttggacttttcttcttcttgaagtctgggtcggtttctgtggtaggactggcctgcgcttcactccaaggtctcactattggtctttcccctaggtcatagagcagggcaatgtctggcagtatgaatccctccaggctcttctgagcgagaagagtgtcttccagcgagcccttagctcctcagaaaagatgaagctcttccacggncggcactccagcaagcagaagnctcggacacagatcactgctgtgaaagagagagacggaggaagaagtgcaagagacccggctctagtgctgggtgctggagaagcaactcgaaaacccatgcaaaatgaaaagggcaggcagtccccatgcttctaacccagtgctggggacacaggcacaggtggctactaggggctctgtggaaagtgatcctagcccacaaagagagttccaggccgggcacctgaaagacaatacctgtggatatcctcttgctccttatgcaagttcaaacacacacacacacacacacacacacacacacacacacacacacacacacgcacacgcacactaatggcatacacacagaaaagcaaagaccgaaagaaggaaagaatcagtgcaagtgactgcgaagcaatcatgcatggagtctgctcatggacttggaggagctgagccccactacctatgcccgtgaaagcagggtgaagtccaaggcttgctttttaagagactgttttggaagagaaatcaaaaccattcatctgggtatgggtaaactgactttctagcagtggtcaaattgtttgaaaggggatggtgaccactgagtattgcaagttttctgaaaacatttgccctctagaggtagctgtaaagatagctataaatggcaaccaggagagctgttcagcttatcattcaatgcagctgattaatttgtgttattgaagaactgaaatcatagtgcttagatacagggtaagtaaagagaactaaaacagggctcacatagctcatagcccaactttctttgtaatattttggcacacagctgtattgccttctatacattgtttgtcacattccaagtaagtgttagaatactatacaaatactgagaggtattgaaagttgcctcactttacatctggtgaccctgtaacctatcagtgttaagaatatccagatcttggaaattaagattaagaccatctagccttactaccatacagctaaacattcttagctgacctaggaaaagaactgttacagtcccatgacgggccaggataatcaccttgatatggaaagtgacacacttatgttcccagaaagcgacagatctttaagagttctgaagtgaagggaggtgtgttagtgcaaactagtgcagcacagcaccaggtgcaggagttagcatgtagaaggccatgggcgctcatggaaatgtgcagtggtgtgttcatgtgctctcagctagctgtgtgtacttcatactgtctccacagagttgtggagacactctgaaaaagatttaatcatgaattagttttatatgctttattttataatttgtgatgcaaatgaaattttctctgagaaatatttattttagtagtaatgtttcaaactcatatataacaatgctgtattttagaatgattatataatgacttacacttgtataaaataatttttatatttgaagtgttgaattttcatagcactagctattttagaacagggagtgaggaagacaaggatgataaggaccattcacaacgatgtgaagcacggagactgatgtagacctcggacccatctgtgtggttctcagtcaacacatactcccttttaatgcagctttgaagaagatgataccaaaagttaagatggtccccttctgggaacatcagcttctgaactgcaaactaagccttagatgaatgtattgtatttattactgtaatagaatatcatgtgtcaataaaattcttttatttgtgtgaaamwmmwmwrwwwwmaratatgttcattgggtgtgtctctggaccctagctctaggctcttagatttgggaacacaaatctctcttttagatataatctctttgagaatctcggttgaattagaagcacaaattatcaagttgggtctttaaattttaggaaaatatctataattgtttacaactttcatcattttaaagaataattcagtagtattttataaatccacatagctgtgtaattaccaccactattgacttcatttctggttgaattttttttttttcatcctgaaaaactgtctttatccattaggacattaactctttttgcacctatgaattcataaatgnnnctatnnttttnnnnttatgtaataggcatgcaatatcaatattagttcctttgtacttaccttttttgcttagcgtgtcttaaaaaattcagccacattattatcatgtgtcagaattttcttcctagccaagactaattatatatatatgtgtgtgtgtgtgtgtatgtttgtatgtatacgtatatatgtatatataatgtaatagatattttgcatatcattttgactacaaatgggctcagattaattctatatctttataaagtaagtacctctgtgaacatgagtgtacaaacatctcttcacaactcagtatactttaaaggttttatattaaatggaagcattgagaacacaaaagatttataaaaaaaataatgggctactttttttttnnnnnnnnnnnnnnnnatcattatcaaccaaagataatggttgagataatgactcgacctgtgagtcacaatcaattgtgaatgacttttatttnnnaggaantcacatatcagatatcctgcctatcctattcattattatatgtaacagcaacaaaattattgttatgaaaataatttcatggttgggatcaccacaacacaaggaactaatttttacagcattaggaaggttgagaacctttggactggctagatnnnnngatacaagatagaattacctaggaaggagaacctnagttaaggaaatgcctcaaacaagttgatggtaggcaagacttcagttcattttcttgattgagaaattctggattaacatgggaggatctagctcactgtgagctacaacccccggactggtagttgtgaatggtacaagaaactgggctgagaaagccatagagaacaagccaatgagcatctcctccacagcctctgttttagttcctgccttgagtccctcaagggtggactataaaatgtaagctgaaataaactctttccttcccaagttgctcttagtcaatgtttttttttaattttttattaaatatatttctttacttacatttcaaatgatattccccctccctgtttcctgtccataagccccccattccttttcctctcccccacatatgtatattctccctatacatcccccttactgctccccccatattcccctgcatgggtgtccaaccttggcaggacaaagggctttcccttccactggtgccccaacaaagctattctctgctgcatgtgcagttggagccctgggtcagtccatgtgtagtctttctgtagtgctttagtccctggaagctctggttggttggcattgttgttttcatggggttgcaagctcctacaactctttcaatacttcctataaatccccccaagtgggtagtattttcagttcggtggtttgcggctagcattgacctctgtatgatgtgctctggatgtgtctctcaggagagatctatatcctgtcnctgntcaacatgcattttttagcttcatcaatcttacctagttttggtggctggatatatatgggtcacatatggggcaggctctgaatggccattccttgagtcactgttctaaactttgcttccatatcccctcctatggatattaatttcccctattaagaaggagtggaatcatctgggttttggtcatccttcttgatctggggtctgtggacaagtgtgtttttctgtgattgggtgacctcactcaggatgatattccatttgcctatgaatttcatgaagtcattgtttttgatagctgagtagtactccattgtgtagatgtaccacatttttttaatccattcctttgttgaagtctggagtctttccagcttctggctaatataaataaggctgctatgaacatagtggaacatgtgtctttgttgtatgttggagcatcttttggtatatgcccaagagaagtatagctggtcctcaggcagttcaatgtccaattttctgaggaacctccacattgatttccanagtggttgtaccagtctgcaatcccagcaacaatgcaggagtgtncctctttctccacatccttgccagcatcagctgtcacccaagtttttgattttagccatnctgactggtgtgaggtggaatctcagggttgttttgatttgcatttccctatgactaagganactgaacattgctttaggtgctttggccattcgatattcctcagcttggaatgttttgtttaactctgtacctcatttttaatagggttatttggctctctggagtctaacttcttgagttctttgtatatttnggatatnagcccctctatcagaaagtaagatgggtaaagatcttcccac

SEQ ID NO: 174 - DNA, 1225 bp, Rattus norvegicus
gaaggagttgagggaagccagagaaatttgtattcagtcgcctttctctttgggtcctaaggggcccaattccaacaatgtttggttcacacttccwcmksakarsctkytmwktcgtkctkstggttgytttgcwggatgtaatatggcccagaaagtgactcargctcactcatcagcaagcaggcaggagggggaagaagtcaccctggastgttcatatgagacaagttatgkcryatattatcttttttggtacaagcagcttcttagtggagaratggttttccttattcwccaamyttcttytgaytstcagarscagaggagyggccgctattctgtartcttycagcaatcactcaagtccatcagccttgtcatttcagcctctcarccagaggattyggggaagtatttctgtgctctcwgkswvtrydrcawbhmhtsdrsksdtdbgagswhmbgacarwctswtytttggasmwggmaymcaagtswytgtggarccmmaaaaacagcctcctgccaaaccatctgtyttcattatgaaaaatggaacaaatgttgcttgtctggtgaaggatttctaccccaaagatgtgaatataagtctcagatcgtccaagaagatagcggaattcgaccctgctatagccatctcccccagcgggaagtacagtgctgtcaagcttggtcagtatggagattcaaattcagtgacatgttcagttcagcacaacagtgaaactgtgcactcaactgactttgaacaatatgcagattctgtcgataatgtaaaaccaacagaacctgcaaaaaatgacacacaaacttcagagycttgccacagcccaagagtcatgattcatgccaagaaggtaaacacgatgtccctcacagtgctgggactrcgactgctgctcgccaagactgttgccatcaattttctcttgactgccaagttaywckwkkmaggtgggctggcatgakgagactgaaagaaatcaaaagcttagaaagatgctatatccaaggcttctaacttctcagtgcttcaaactgacccttcaccaccacatttacacagctaacaaaactagcttttctgtgatggcaacaagcctaggtaatcctccagtctataagaaaaacaaaagtccttgggagtggagtgtgccctggctttacacgctgctttataaaggcaccgaaaactatgaaa

SEQ ID NO: 175 - DNA, 1590 bp, Rattus norvegicus
  misc_feature (232)..(232): n is a, c, g, or t
  misc_feature (289)..(289): n is a, c, g, or t
  misc_feature (294)..(294): n is a, c, g, or t
  misc_feature (296)..(296): n is a, c, g, or t
  misc_feature (304)..(304): n is a, c, g, or t
  misc_feature (306)..(306): n is a, c, g, or t
  misc_feature (430)..(471): n is a, c, g, or t
  misc_feature (485)..(485): n is a, c, g, or t
  misc_feature (490)..(490): n is a, c, g, or t
acgcaggagcccagtcctggactctgaggytctcccaytcagtaatcagtactgcagcactgcacagactmctcaccatggacwycaggctcagcttggytttccttgtccttttmataaaaggtgtccagtgtvaggtvmrrctgswggagtcwggsggmggmttdgtdcagyctggaarstcymtrrraytmycctvtgyrgcctcwggattcacdtwcrrtvactatdncrtgvsykggrychgccwgdctccadvgadgggkytggagyggdyyrcadmmaytmnthhhnrntgryrgynvnahyhwytayssmgactcyrtrardggccrattyacyrtyyccrragayrryrcamrrrrcwsccwrtayctrcwrmtgracastykgrrgtckgaggrcayggccacttattwywgtrcrmvvnnnnnnnnnnnnnnnnnnnnnnnnnnnnnnnnnnnnnnnnnnmhsdvdyhmwgkvnyyhynsyyayhskskcytmmgsysamwcwrcagycccatctgtctmtycactggctcctggaactgctctcaaaagtaactccatggtgaccctgggatgcctggtcaagggctatttccctgagccaagkcaccgtgacctggaactctggagccctgtccagcggtgtgcacaccttcccagctgtcctgcagtctggactctacactctcaccagctcagtgactgtaccctccagcacctggtccagccaggccgtcacctgcaacgtagcccacccggccagcagcaccaaggtggacaagaaaattgtgccaagggaatgcaatccttgtggatgtacaggctcagaagtatcatctgtcttcatcttccccccaaagaccaaagatgtgctcaccatcactctgactcctaaggtcacgtgtgttgtggtagacattagccagaatgatcccgaggtccggttcagctggtttatagatgacgtggaagtccacacagctcagactcatgccccggagaagcagtccaacagcactttacgctcagtcagtgaactccccatcgtgcaccgggactggctcaatggcaagacgttcaaatgcaaagtcaacagtggagcattccctgcccccatcgagaaaagcatctccaaacccgaaggcacaccacgaggtccacaggtatacaccatggcgcctcccaaggaagagatgacccagagtcaagtcagtatcacctgcatggtaaaaggcttctatcccccagacatttatacggagtggaagatgaacgggcagccacaggaaaactacaagaacactccacctacgatggacacagatgggagttacttcctctacagcaagctcaatgtaaagaaagaaacatggcagcagggaaacactttcacgtgttctgtgctgcatgagggcctgcacaaccaccatactgagaagagtctctcccactctcctggtaaatgatcccagagtccagtggcccctcttggcctaaaggatgccaacacctacctctaccacctttctctgtgtaaataaagcacccagctctgccttgggaccctgcaaaaaaaaaaaa

SEQ ID NO: 176 - DNA, 332 bp, Rattus norvegicus
  misc_feature (12)..(29): n is a, c, g, or t
ccctgaaactcnnnnnnnnnnnnnnnnnnttcactttcagtaactatggaatgaactggattcgccaggctccagggaaggggctggagtgggttgcatctattagtagtagtagcggttacatctactatgcagacacagtgaagggccgattcaccatctccagagaaaatgccaagaacaccctgtacctgcaaatgaccagtctgaggtctgaagacactgccttgtattactgtgcaagtgatgtgcctacccgggccccatatactacggatcccccccattggtttgcttactggggccaaggcactctggtcactgtctcttca

SEQ ID NO: 177 - DNA, 1830 bp, Rattus norvegicus
tctgccggacagcagaaggaatattgatggattcgagaagctgaagcccttacaacctgaaagaagactggggaagtgattcgtctcctcctccatcgggtctgtaggacggggaggtcctttctgatgcagctgagaaaaatgcaggccatcaaaaaggagcctgcatccctggatcctaccggcagctcagacaagatgttgctgctgaactctgccttagctgaggtggctgaggacctagcctcaggggaagatccgctcctgaatgaagggagcatggggaaaaacaagtcctctgcctgtcggagaaaacgggaattcatcccggatgagaagaaggacgccatgtattgggagaaacggcggaaaaacaacgaggccgccaaaaggtctcgggagaagcgtcgcctcaatgacctggttctggagaacaagctgatcgccctgggagaagaaaatgccactttaaaagctgagctgctctccctgaaattaaagtttggcttaattagctccacggtgtacgcccaagaaatccagaaactcagtaatcccacagctgtgtattttcaggactaccagacatccaaggctgccgtgagctcttacgtggacgagcatgagcctgcgatggtagccggaagttgcatctctgtcatcaagcactctcctcagagctcgctctcggatgtgtctgaggtgtcctctgtggagcacacacaggaaagccccgcacagggaggctgccggagccctgagaacaagttccctgtgatcaagcaggagcccgtggagttggagagctttgccagggagtccagagaggagcggggtgcctattccgcctccatctaccagagctacatgggtagctctttctccacctactcccactcccctcccctcctgcaggtccacggctccaccagcagctccccgagaacctcggaggccgacgagggtgtggtgggcaagtcttctgatggggaagacgagcagcaggtccccaaaggccccatccattctccagtggagctgcagcgggtgcacgccacggtggtgaaggttccggaagtgaacccttccgccttaccgcacaagctccggattaaagccaaggccatgcaggtcaaagtggaagctttggacagtgagttcgaaggcatgcagaaactctcttcaccggtagatgcgctagccaaaagacattttgacctggagaagcatggcgcttcgggtacggcccattcctccctccctcctttctcggtgcaggtgacgaacattcaagattggtccctcagatcggaacactggcatcacaaagaactgggcggcaaaactcagggtaccttcaaaacgggtgtggtggaagtcaaagacagtggctataaggtttccgaggctgagaatttgtatttgaagcagggggtggcaaacttatccgcagaggtggtctcgctcaagagattcatagcmacacagcctatctcggcttcggactccaggtaaatggctactgactgagctatgcgtggaagaggatgctcttggtaccatactgaatttcccactggacctctaaagtcatttcactgtagtgtgcacaacggtgtctgtctggtgtccttgtgtacacaacgytgaagacttgatgccctcactctgcytggcgtgtagtcagatagcccttccctccccaccccccagaggctgtacataccgaacgttatttttgctctatgataaagtgtgtacgttgccagtttcaataaaggattggtggcaaacamaaaaaaaaamaaaaaaaaaaaaaaaaaaaaaaaa

SEQ ID NO: 178 - DNA, 781 bp, Rattus norvegicus
cacgaggctccttagcccgccgtctcccacggagctgctcgcccttgtctcggagctcgcggactcgcggacaggcgtcctcagcgcgaagaggccggattcggagtcgtcgtcttgagccttgcatctaagaagtcccaggtactttgtacaactgcatcccagaagctgagtttcttcagcaccttcataagtgatggctgccatcaggaagaaactggtgattgttggtgatggagcttgtggtaagacatgcttgctcatagtcttcagcaaggaccagttcccagaggtttatgtgcccacggtgtttgaaaactatgtggcagatattgaagtggacgggaagcaggtagagttggctttatgggacacagctggacaggaagattatgaccgtctgaggcctctctcctamccagacactgatgttatactgatgtgtttttccatcgacagccctgatagtttagaaaacatcccagaaaartggactccagaagtcaagcatttctgtccaaatgtgcccatcatcctagttgggaacaagaaggatcttcggaatgatgagcacacaaggcgggagttagccaaaatgaagcaggagccggtaaaacctgaagaaggcagagatatggcaaacaggattggcgcttttgggtacatggagtgttcagcaaagaccaaagacggagtgagagaggtttttgagatggccacgagagctgctctgcaagctagacgcgggaagaaaaagtcggggtgcctcatcttgtgaagc

SEQ ID NO: 179 - DNA, 1908 bp, Rattus norvegicus
atggaggggtctaaggcgtccagcagcaccatgcaggtgagcttcgtgtgccagcgctgtagccagcctctgaaactggacacgagcttcaagatcctggaccgagtgaccattcaggaactcacagctccattacttaccacagcccaggcgaaaccaggagagagccaggaggaagaggctaactcaggagaggagccatttattgaaactcgccaggatggtgtctctcgaagattcatccccccagccaggatgatgtctacagaaagtgctaatagcttcactctgatcggggaggcatctgatggtggcaccatggagaacctcagccggagactcaaggtcactggagacctttttgacatcatgtctggccagacagatgtggatcacccactgtgtgaggaatgcacagatactcttttagaccagctggacactcagctcaatgttactgaaaacgagtgtcagaactacaaacgctgtttggagatgttggagcaaatgaatgagggcgacagtgaacagctacagagggagctgaaggagttggccttggaggaggagaggctgatccaggagctggaagatgtggaaaaaaaccgaaaggtggtggcagaaaacctggagaaggtccaggctgaggcggagagactggaccaggaggaagctcagtaccagcgagaatatagtgaatttaaaaggcagcagctggagctggatgatgagctcaagagtgtagagaaccagatgcgctatgcccagatgcagctggacaagctcaagaaaaccaatgtcttcaatgcgaccttccatatctggcacagcggacaatttggcacgatcaataatttcagactgggtcgcttgcccagtgctcctgtggaatggaatgaaatcaatgctgcctggggccagacagtgttgttgctccatgctttggccaataagatgggtctgaaatttcagaggtaccgactygtkcsskatggaaatcactcgtatctggagtccctgacagacaaatctaaggagttgccgttgtactgttctsggsskywrmggtttttytgggacaacaagtttgaccatgcaatggtagctkttctggactgtgtgcagcagttcaaagaakakgtggawaaaggagagactcgattttgtcttccgtacaggatggacgtggagaaaggcaagattgamgacactggaggcagtggcggctcctattccatcaaaacccagtttaamtctgaggagcaktgracamaggcgctcaarttcatgctgacgaatmtcaagtggggtcttgcttgggtgtmctcacagytctmtaacamgtgacttgctccttavgggatatttgcctttaagrttktacattttgtktggtttggaaagatgctttaaattaaatttgggtaatattaamccacatkttdmcawtmmmaraawmmmmaraarcywcktkmykttacaatatgacagttttcagagcacagcacgccatgtatagcaaagagccctsccgtagtttggctcaaccccatgctgtcctttccctcttcsctggaamcaactaatttaaathkgcykwgktttyttttytaagttgaattgacattaatgtgtytycactggattttatctctctcaacttcctgtacttaaaatttgaaacagaaaagttttgagatgagatgcttgtggcacacagttgggtaatgtggggaarggacaagaggtamaggtttaactctgtcctcacttctagtattgaacgcttactgtgctaactattggaatyacaaaatgctgtttgmtactgtttgagatgtggaaggayttaattatttgtaataaaggatttgctatggtctwttaawwammaaaaaaaaaaarmww

SEQ ID NO: 180 - DNA, 2519 bp, Rattus norvegicus
gaattcctgacggatctggagaagcccaatctcgcaggccacatgttcgacgtaggtctgattggaggcggcatctcaggattggctgctgccaaactgttgtctgaatacaaaattaatgtcttggttttggaagcccgggatagagttggaggaagaacatatactgtgaggaatgagcatgtcaaatgggtagatgttggtggagcctatgtgggaccaacccagaacagaatcttacgcttgtctaaggagctaggcatagagacctataaagtgaatgtcaatgagcgtctagttcaatatgtcaaggggaaaacttacccattccgtggtgcattcccacctgtgtggaaccccttggcatatttggattacaacaacctatggagaacaatggatgaaatgggaaaagagatccccgttgatgcaccgtggcaagcaagacacgctcaggaatgggacaagatgaccatgaaagatctcattgataaaatctgttggacaaaaactgctcgggaatttgcgtatctttttgtgaacattaatgtgacttctgagcctcatgaggtatctgccctgtggttcctgtggtatgtgaggcagtgtgggggcactgctcggatattctcagtyaccaatggcggccaggaacggaaatttgtaggtggatctggccaagtaagtgaacagataatgggtctccttggagataaagtgaagctgagctctcctgttacttatattgaccaaacagatgacaacatcattgtagaaacactgaatcatgaacactatgagtgcaaatacgtaattagtgccatcccaccgattttgactgccaagatccactttaaaccagagcttccacctgagagaaaccaattaattcagcgtcttcywatgggggctgttatcaagtgcatggtgtatkacaaggaagccttctggaagaaaaaggactatyrygrskgcatgatcattgaagatgaggaggctccaatcgccatcactctggatgacactaaaccagatgggtcactgcctgccatcatgggcttcatacttgcccggaaagctgatcgacwwgctaaactacataaagacataaggaagaggaaaatctgtgagctgtatgccaaagttctgggatctcaagaagcattatatccagtccattatgaagagaagaactggtgtgaggagcagtactccgggggctsstacacagcctacttccctcctggtatcatgacccagtatggaagggtgattcgccagccagtaggtaggatttactttgcaggcacagagacagcaacmcagtggagtggctacatggaaggagcagttgaasstggagaacgagcagctagagaggtgttgaatgctctaggaaaagtcgcgaagaaggatatatgggttgaagaacccgagtccaaggatgttccarccattgaaattacccacaccttcttagagaggaacctgccttccgtgcmtggtctgctcaagatcactggtgtttccacttctgtggctcttctctgctttgtattgtacaagattaagaagctcccatgctgaagtttcaccctcaggcctcctgcacgatcatcgcatgtgaaagaaagtgtggataaattacagcctatggtttgggccatttaagtgcacttgatttaaccctcmtcagtttaatttcagtctttgtaaagtgataacaatccaaagaaycacctakcyaatttccataagaacamgtttcatcctgtttgttagactaatttstgtgggttgagagaataaaatgttgagtgcttaatttcaaaaarwraarwrmwwmwgaggaataatttctgggttyttttkttttytttttgcctttaatgcaaaatagctaattcagaaataaaacacttgacttactgtgamwwwwrwrwarmrwmmaaggtgtacagaggaaaatagtggctgaagtgttccctaggtatcctcactgactagctccatgtgatacacactacccttggcactttcttttctggactgtatctagacatgcattgacccttgtcagtaacattctgtgctsatttaaggaaattagcattattttaatatagtccatagttatctgatcagaggattagatctctaagtctacctgtgtcttcaagatggttatatttttctgttggttgatagtataccattttttctcaattwccaaaggacatatgaaatgttctctattgttatttgttgatacagtcaaatacagaaattaaatttgggctctgtgtgataacatgacttgcttgaattattaggttttatagcagacattaaattggatgattttatatacccaaactatggtctctatcttaggagtgttgtgggtccagaatgatgtctgtcttttctctttcccatctgaaaaattgtcaattaaaaaaacttttcaaaggtttcaaccacaaagcacttctttttctaaaaaaaaaaaaaaaaaa

SEQ ID NO: 181 - DNA, 2367 bp, Rattus norvegicus
gggttcctgctggatgccacgcgctgccgggtgtggacttgccgggttcgcccgctcggatcccactgcccttgcctgccgggcccgctcgggtgcacgcgccgcccggctgtgatcgccgccagcagaagactgatctttgaaaatatgtatttgggagataatcacgttctgttgaatactttgtgctggtgctgccatcgaaaaatctggttacagtccggggaggcctgctaccattgcaggactgaaccgcctcggccctgagatgagtgtcccgacagagcaggcgcaccatgaatagatacacaacgatcaaacagcttggggatgggacctatggttctgtcctgctggggagaagcattgaatctggagaactaattgccattaaaaaaatgaaaagaaagttttactcctgggaagaatgcatgaaccttcgggaggttaagtctttaaagaagctcaaccatgccaatatagtgaagttaaaagaggttatcagggagaacgaccatctctatttcatcttcgagtacatgaaggaaaacctttaccagctcattaaagaaagaaataagttgttcccagagtctgcaataaggaatataatgtatcagatattgcaaggactggcgttcattcacaaacatggtttcttccaccgggacttaaagcctgagaacctcctctgcatgggaccagaacttgtgaaaatygcggacttcggattggcccgagaaatccgatcaagacctccatacacagactatgtgtctactagatggtatagggctccagaagtactcctgagatctaccaactacagctcccccattgatgtctgggccgtgggctgcatcatggcagaggtgtacaccctccggcctcttttccctggggccagtkaaattgacacgattttcaaaatttgccmagtgttgggaacaccgaagaagactgactggcctgaaggctaccagctgtcaagtgctatgaatttcatctggccccagtgcatacccaataacttaaagacactaattccaaatgctagcagcgaagcaattcagctcctgagagacttgcttcagtgggatcccaagaaacgaccaactgctagtcaggcacttcgatacccttacttccagatcggacacccactgggcatcagcacacaggactcgggaaagccacagaaagatgtccaagacaagacaggcccacctccttacgtcaagccagcccctyctgcccaggccccaaccaaggcgcatacactgatttcttcacgaccaaaccaagccagtcaaccccatcagcattttgtatatccctacaagggcgaagcctctaggacagagcagctgagccacgtgcaggagggccagccaaacccaccattcttcccgtccctccacaacaagaatctcccgccaaaaatcctagctggcctggaacagaaaagcggtgacatgaaaccaaagagcaggagaagatggggtctcatttccaggtcaaccaagggttctgatgattgggccgacttggctgacttagatttcagttcctctctcaccagaatagatgtcaaaaacaagaagagacagagtgacgaccccctctgcaggtttgaaagtgttttggacctgaagccatctgagccggtgggtacaggaactagtgtctccacccargcttyctcccagaggagagacacgccgaccctgcagtccacagcaaagcagcactacttgaagcactctcgctacctgcctggaataaatataagaaatggcgtgctcccaaatccaggcaaggactttcttccatcaagttcatggtccagttctggtttgtctggaaaatcttcaggaacggtatcagtagtgagcaaaataacttcagttggctcvggctccacgagctytrstggactgactggargctacatccytycctttctgaagaaggaagtcggctytgtcatgcagagggtccagctggcgcctctcgcagcccyttcccccggmtactcttccctcaaggccgtgagacctcacccagggaggccattctttcacacccagcytaggagcacgcctggcttgattccacgacctccagctgtgcagcctgtgcacggcaggatagactggtcttccaagtacccatctcggcggtgactgtcccagctgactccgttgtacccccacaaccacgtggcggtgtaaaagcacccacacttacagcagttctgaactaacacatttcaatatttcttttaaatgtttttttaaacattgatttgaatgcaataccctctttttgtataaaattattttattctaaaaaaaaaaaaaaaaa

SEQ ID NO: 182 - DNA, 1640 bp, Rattus norvegicus
  misc_feature (1399)..(1399): n is a, c, g, or t
cacgagggcggggcgagcggactctctagcccttgtgggtccctgttcagcgcccggccgtgtggagacccgggagccagtccgggcctccgaggcgaagatggtggactacagcgtttgggatcacatcgaggtgtcggacgatgaggacgagacgcaccccaacatagacacggccagcctgttccgctggcggcaccaggcccgggtggaacgcatggaacagtttcagaaggagaaagaagaactggaccggggctgccgggaatgcaagcgcaaggtagccgagtkccagcgcaagctgaaggaactggaagtggctgagggtggtggccaggtggagcttgagcggcttcgagcggaggcacagcagctgcgcaaggaggagcgaactgggagcagaagctggaggacatgcggcaaaaaggmgaagaacatgccctggaatgtggacacactcagcaaagatggcttcagcaagagcatggtcaataccaagcctgagaaggcagaggaagactcagagsaggcaagggagcagaaacacaagaccttcgttgaaaaatacgagaaacagatcaaacatttcggcatgctccaccgctgggatgacagccagaagtacctgtcagacaatgtccacctggtgtgcgaggagacagccaactacctggttatctggtgcattgacctggaagtcgaggagaagtgtgccctgatggagcaggtggctcaccagaccatggtcatgcagttcatcctggagttggccaagagtctgaaggtcgacccccgggcctgcttccggcagtttttcaccaagatcaagactgctgaccagcagtacatggagggcttcaagtatgaactggaggcctttaaggagcgtgtgcggggccgcgccaagstgcgaatagagaaggccatgaaggagtacgaggaggaggagcrcargaagaggctaggccctggtggcctggaccctgtggaggtctacgaatctctgcctgagsasswgsagaagtgctttgatgtgaaggatgtacagatgctgcaagacgccatcagcaagatggatcctactgatsccaagtatcacatgcagcgttgcatcgattctggcctctgggtccccaacyccaagtctggtgaggccaaggagggrgaggaggsgggccccggggacccattgctggaagccgtccccaaagcgggcwwcgagaaagacatcagtgcgtgacccttctccagaaaaggaaaccmagccassatgkmsctwgmkcccgacttyttcactthtgstgctcctcacgtcmtggcycrtggcctgccccatgtcccctytcctccggsmtgtssmsrkcamtcakcagattctmtgswtcgggttraggggstntghkryhysyagcccccccacccccatcagcgttatgccaaagtcctgkgggtytggrraggggcagcagctsccaggttggtccaccgggttgggrrtacacatrtccccatbtgggcagggtctgtccctatgggtytatggtcactgtttythttctgtstagctttytgtcctgcaamtgkcaacaatgwccaataaacagttccaggtgctgrrarmmaaaaaaaaaaaaaaaaaa

SEQ ID NO: 183 - DNA, 612 bp, Rattus norvegicus
gaggaacgtgttcaaaagagttttcctcatcctattgataaatgggcaattgctgatgcacagtctgccatagagaaacgaaaacgaagaaatcctctcttactacctgtggacaaaatccatccttccttgaaggaagttttggggtataaagtggactaccatgtatccctctacattgtggctgtattggagtatatctcagcagatattttgaaattggctggtaattatgtttttaatatccggcattatgaaatatctcagcaagacattaaagtgtcaatgtgtgcagataaggttttgatggacatgtttgaccaggatgacgatataggcttggtttctctctgtgaagaggaaccttgttcttctggtgagctaaactattatgaccttgttagaactgaaatcgcagaagaaagacagtatctacgggaactgaatatgatcattaaagtattccgggaagcctttctttcagacaaaaagttgttcaagtcttctgaaattgaaaagattttcagtaacatttcagatatacatgaactgactgtgaaacttttaggtttgattgaagacacagtagaaatgacagatgaaggcagtccc

SEQ ID NO: 184 - DNA, 2802 bp, Rattus norvegicus
aagctttaatgaaactataacacaaatatattgttttgataaatggcagattgataataattagactgataacacaatctggagaaaattaatcttgactgtcaacttagacggacatgtttttgctgcaaagaaagtaatatatcagaaaaagatttctgcaacataaatcatagtgtacttgtttagagtggaatgggtgtggatattctaagaaaagaattgggtaaaatttcctattcaagaggaaaccttgttttaggttagcatgtaaatacatttttatgccatggtttgtagacttgtgtcgttacactttgttctcactcatgcacactgccccagctgtcatttgtgttcctgtcccactggtcccttcttagttagggtcttattgctgtgaacagacaccgtgaccaaggcaactcttataaagacatttagttggggctggcttacaggttcagaggttcagtgtcttatcaccaaaacgggagcatggcagcatccaggcagacatggtgcaggaggagctgagagttctacatcttcacctgaaggaaggccaggaacagcctgagcatccctaggtagctaggaggagggtctccaagcccacctcacagtgacacacttcctccaacaaggccacaccttctaatagtgccactccctgggccaagcatatgcaaaccaccacttctccaaaacatatgctttttatcacacatactcccttaccctttctcttcactacccaagatgttttcctttgtaatgactcagtttccacttccatgctatgcgcccgccccccatgcacgcatgtgagcccacactatgtgctttattttttttttttaagattgatatcagtttccaattgtatttaagagtcttggcccgaagagtgcgctcggctctgccaaggacgctgcgctcgtgactgagcgcgggctggagcaaccgccaactgagtgcaaaccctttgcgcccggacccgtccaacgactaymwakagrgmakwctgkccgctaagmskcaycmmgamttcrgcagvsbgactgccttcttgthgcttacmccgttgctccagattcaccagatctcggaatggaccccaactgstcctgctccwccggcggytccwgcacctgbkcsascksmkgcgrctgsaarawctgcawmtkcmyctyctkcwwvmagagctgctgctcctgctgccccgtgggctgctccaaatgtgcccagggctgtgtytgcaaaggtgcctcggacaagtgcacgtgctgtgcctgaagtgacgaacagtgctgctgccctcaggtgtaaataatttccggaccaactcarartcttgccgtacacctccacccagtttaytaaaccccgttttctaccgagcatgtgaataataaaagcctgtttattctwaaaaaaaaaaaaaaaaaaaaaaaagagtctattgcacacattttgacgtttaacataaagactttagttttggtggtcattattacgagacgctggaaagcatgcctttggcaattacctaaatgagcaataaaaagaaaatctcagggttggagagatggctcagcagttagagtatctgctgctcttgcagaggacctgggttcagttcccagcacccacataggatatctgaaaatggattgtgttcctggcaattcaatatcctttttctggtctctatgggtacctgcacatcatggtacacagacagacaagcaaggacacacacacacacacacacacacacacacacacacacacacaaattaaaagggatatcaaattgaatttgtgagggaaagcacagttattagaaatattttgaggtctggagagatggctcagctgtgagaaacagtcattgttattgcagaagcctcattttggctcccagcacccacactggcgcttacaaccatccccacctccaaatccagggatctgatgtcctcttctgatctcagagagtgccaggaatgaaagtgctgttcaaaatacatgcaggtaaagcacccatacatgtacaaccagataaacaaagctaaaagcatacataaggatgtcacttaaataaaggtaaaatcgttgaggtggaaaatggaattggaaccactaagaaggatatggtggctcaatgaatccgtcttgttttgatggccttgattcttggagaaatgctcatatctgtgaactgagaaggctttcatctttttacttaccattaaattgcaatgggtagtccttgctgcccacttgactacatctggaatgaactacatatagtccagagatggagggctcgcctgtgatccagatcttgaggctggaagaaacaggcttctgacctggttctttttttttttttaagtttttttaattttatttatttaatgtatatgagaggtctatctacatgcctgcatggacacttgcatgccagaagagacttcattatagatgtgatttgccgggaattgaactcaggacctctggaagagcaggcagtgctcttacctgctgagtcatctctccagcccccaggccagaatttatattggaagttgacgggatcaccaggatgtacttacccgggccttttatttgtttgtttatttggtgttttggaggttgatttttgccacagtgcttgggcttttcactcctggggtcacatgatctttttgcagagacaagtatataccacacagcacccaggttttttttgttttgtttttttttgttgttgttgttgttgttgacaagctt

SEQ ID NO: 185 - DNA, 1556 bp, Rattus norvegicus
taagcttgcggccgccggcggccccgacccgccggycctctcagcggtcgccggcatgagccacatccagatcccaccggggctcacggagctgctgcagggctacaccgtggaggtgcttcggcagcagccgcccgacctcgtsgacttcgcggtggrgtacttcacacgcctgcgcgaggcccgccgccaggaatcakactcgttcatcgcccccccgacgacctttcacgcgcaggagtccagcggggtcyccgtcatcgaggaggacsggsakagtgaatcggactcggacgatgaggatctggaagktmygmkkcsrgsmaaakkyackagrygmgtrtsrgwcygwrcagaarsrtttaaccctgatgaagaagmhsrtvvygmtysaagggtggttcacccmaaaaccgacgagcagaggtgcagacttcaggaagcctgtaaagacattctgcttttcaaaaacctggatcaggaacagctttctcaagttctggacgccatgttyraaargatagtcaaaactgacgagcatgtcattgaccaaggagatgatggagacaacttttatgtcatagaaaggggaacctatgacattttagtaacaaargataatcaaacacgatctgttggtcagtatgmmaaccgtggcagttttggagaactagccytgatgtacaataccccgagagctgctaccattgtggccacctcagacggctccctttggggattggaccgggtgacttttaggagaatcatagtgaagaacaatgcaaagaagaggaagatgttcgaatcgtttattgagtctgtaccgctctttaaatcactagagatgtcagaacgaatgaagattgtggatgtgatcggggaaaagatctataaggatggagagcgaataatcactcagggtgaaaargccgacagcttttatattatagagtctggrgaagtgagcatcttgattagaagcaagactaaaacgaacaagaacggcgggaaccaggaggttgagattgcccactgccataaggggcagtactttggagaacttgccctggtraccaacaarccaagagctgcttctgcttatgcggttggagacgtcaaatgcttagtcatggatgttcaagcatttgagaggcttctgggcccctgcatggacatcatgaagaggaacatctcacattacgaagaacagctggtgaagatgtttggctccaacttggatctattggaccccgggcagtagatgtgatgaatctcggagccttctcagtgtgataccaaatccttccagtcagccacaagaacacacccagaaaacagacacgacasarctrcrccwscygctgtctctgctgctgccatcgctgtggtaaagggcacttagaagtcttgaaagatggacagaggctctacccacacccaccttccactttgcttctgaacgccgtcattagaccacttatgtcacgattactccagcccaggtttcacgtttggttcagaatggcatgtctctccagcaatttaagtgcctgata

SEQ ID NO: 186 - DNA, 1935 bp, Rattus norvegicus
aggggaaggcgcgcggtctctgggttgggggcgggggctggggggcgcccaggagccgagtggggggcggcggccagcatgcgggcccgcagcgccctgccccgcagcgccctgccccgcctgctgctgccactgctgctgctgccggctgccgggccggctcagttccacggggagaagggcatctccatcccggaccacggcttctgccagcccatctccatcccgctgtgcacggacatcgcctacaaccagaccatcatgcccaaccttcttgggcacacgaaccaagaggacgcgggcctggaggtgcatcaattctacccgctggtgaaggtgcagtgctcgcccgagctgcgcttcttcctgtgctccatgtacgctccggtgtgcacggtgctggagcaggccatcccgccgtgccgctccatctgcgaacgcgcgcgccaaggctgcgaggcgctcatgaacaagttcggcttccagtggcccgagcgcctccgctgcgagcatttcccgcgtcacggcgcggagcagatctgcgtgggccagaaccactccgaggacggaactcctgcgctactcaccaccgcgccaccgtctgggctgcagcctggcgctggtggcaccccgggcggccctggcggtggtggcgcgcccccgcgctacgccactctggagcaccctttccactgtccccgcgtcctcaaggtgccgtcctatctcagctataagtttctgggtgagcgcgattgtgccgcgccctgcgagcctgcacggcccgacggctccatgttcttctcgcassassasactcgttttgcccgtctctggatcctcacatggtcggtgctgtgctgcgcttctactttcttcacggtcaccacctmtttagtggmcatgcagcgattccgctacccagagcggcccatcatcttcctgtccggttgctacaccatggtgtcagtggcctacattgcgggcttcgtgctccaggagcgcgtggtgtgcaacgagcgcttctctgaggacggttatcgcacggtggggcagggcactaagaaagaaggctgtactatactcttcatgatgctctacttcttcagtatggccagctccatctggtgggtgattctgtccctcacctggttcctggcagccggtatgaagtggggccacgcggccatcgaggccaattcgcagtacttccacctggccgcctgggcggtgccggccgtcaaaaccatcaccatcctggccatgggccagatcgacggcgacctgctgagcggcgtgtgcttcgtgggcctcaacaggctggacccgctgcgaggcttcgtgctggcgccgctcttcgtgtacctgttcatcggcacatccttcctgctggcgggcttcgtgtcactcttccgcatccgcaccatcatgaagcacgacggcaccaagacggagmmgctggagaggctcatggyrcgtaksggcgtcttctccgtgctctacaccgtaccggccaccatcgtcatcgcctgctacttctatgagcaggccttccgcgagcactgggagcgctcgtgggtaagccagcactgcaagagcctagccatcccctgcccggcccamtacacgccccgcaygtcgcccgacttcacagtctacatgatcaaatacctcatgacgctcatcgtgggcatcacgtcgggcttctggatctggtccggyaagacgctgcactcgtggaggaagttctacacgcgtctcaccaacagccggcatggagagaccaccgtgtgaagcggtctcgytgctgggcgcccccctctcccaggtccggactgcaaccgtgccctccttcactcgggaggggggtgcaccctacggactcctattttatttttttaaataargaacagtgaaaaccaaaaaaaaaaaaaaaaa

SEQ ID NO: 187 - DNA, 1051 bp, Rattus norvegicus
  misc_feature (159)..(159): n is a, c, g, or t
  misc_feature (1031)..(1031): n is a, c, g, or t
tgcacaattatggagatcatagttccgtgagcgaacaattcagggactcggcgagcatgcactccggcaggtacggctacggctacaatggcatggatctcagcgtcggccgttcgggttccggccactttggctccggcgagckckcccgcagctacncggctggggccagtgcggcgcccgccgagcccaggtacagccagccggccacgtccacgcactcgccaccgcccgacccgctgccctgctcagcggtggcccccttgcccggcagcgacacgcaccacggcgggaaaaactccctgggcaactccagcggctgctcggccaactgcggcagcacccacatcagcagcagagagggggttggcacggcgtccgcagcggaggaggacgcccctgccagcagcgagcaggcgggcgcccagagcgagccgagcccggcgccgcccgctcaaccccagatctacccctggatgcgcaagctgcacattagtcacgacaacataggtggcccagaaggcaaaagggcccggacgtgctacactcgctaccagaccctggagctggagaaagaattccacttcaaccgctacctgacccgccgaagaaggattgaaatagcacatgccctttgcctctccgagagacaaattaaaatctggttccmaaacaggaggatgaagtggaaaaaggataawwagctgaaaagtatgagtatggccgcggcaggggggsccttccgcccctgaggttytgagcggccaaagtactggscagtagtagcgcscgravsaactctccgtagtgtcagtactaaggtgactttytgaaactccccttgtgttccttytgtraaraagccctgttctcgttgcccwaattcatcttttaatcatgagcctgtttattgccattawagcgcctgtataagtagawcagcttctgttcatctctttgcwgawgcttgtcgaaaaaaawakagatgttttaacttatttatatgaagcaagctgtgttacttgaagtancttaaccaaaaaaaaaaaaa

SEQ ID NO: 188 - DNA, 936 bp, Rattus norvegicus
  misc_feature (234)..(234): n is a, c, g, or t
  misc_feature (332)..(332): n is a, c, g, or t
  misc_feature (341)..(341): n is a, c, g, or t
gaattccactttaaccgatacctgacccggcgccgccgcatcgagatcgctcacacgctctgcttgtccgagcgccaggtcaagatctggttccagaaccggagaatgaagtggaagaaagaccacaaacttcccaacaccaagatgcgatcttccaaccctgcctcggcccctgccggcccgcctgggaaagcacaaactcacaacccacacccccattcccaccctctcccncggtgcttcacacccattccctcgtctatataatctagagacctagatcagtttctgtcacttatgtgcccaactcatctcctgctcctgtcctcgtntgctccttnctaagtaaacctgagacaccaaaacaaaatccaacttgctggaaatcataaccaaaaagaagatattattcctggttggtgtctgtgtgtgacccccccaagagacatctgtcctggttactgcttagtggaacggcctgctgacctggacaactttgccagggttggacacctgtaaggaagcactggtcatcgactacctttgagtccaccmgrcasmasgtgctgactggggacatgtatgtttgktgcaagcagaagaagcaggcasttccccagcttccttacctytctcttvtggcattaaaggcagctcacatgagcttactggtaagaccattgtggrcctcaccagattatttaawtctcaaagtgtgthgmcctwgwwsgtaggtgtggcatgwagwtycctctccttgcatttatttaagatactgttatagagatattgttgtcttattctggggcacagtcttggggaragggaaatgcatttagacccacttgcaactgtacagagcgatatggttgtataaagaggaatgtgctaagaataaacttcaatttatamgacvtttaaaaaaaaaaaaaaaaa

SEQ ID NO: 189 - DNA, 381 bp, Rattus norvegicus
ggatggagtcacatactagggtcttcatattcctgctgctggttgtctggtgctgatggggacattgtgatgactcagtctcccacatccatgtccatatcagtgggagacagggtcaccatgaactgcaaggccagtcaaaatgtgggttctaatgtagactggtaccaacagaaaacagggcagtctcctaaactgcttatctacaaagcatccaaccggtacacgggagtccctgatcgcttcacaggcagtggatctggaacagatttcactttcaccatcagcaacatgcaggctgaagacctggctgtttattactgtatgcagtctaactcctatccgtggacgttcggtggcaccaagctggaattgaaacgg

SEQ ID NO: 190 - DNA, 411 bp, Rattus norvegicus
gcttcacacatgttacacagaaacatgaacatgccactcaactccttgggttggctgctactctggtttacaggtggtaaatgtgacatccatgtgacacagtctcctgcctccctgtctgcatctccggaagaaattrtcaccatcacatgccaggcaagccaggacattggkarttsgttatyatggtatcagcagaaaccagggaaatctcctcagctcctgatctatrgtgcaaccakcttggcagatggggtcccatcaaggttcagyggcagtagatctggcacacagtattctcttaagatcagcagactacrggttgaagatattggaayctattactgtctacagkyttmtagtkctctsacgttcggtkswggsaccaagctggarwtsaaacgggctgat

SEQ ID NO: 191 - DNA, 2082 bp, Rattus norvegicus
  misc_feature (1947)..(1947): n is a, c, g, or t
  misc_feature (2007)..(2007): n is a, c, g, or t
  misc_feature (2020)..(2020): n is a, c, g, or t
  misc_feature (2056)..(2056): n is a, c, g, or t
gtggacccagccaggttggtgctggctaacatccaagaagatgaggctaaaaataatatcaccatctttacaagaattctagacagacttctggatggttacgataatcgtcttagaccaggactgggagacagcattactgaagtcttcaccaacatctatgtgaccagttttggccctgtctcagatacagatatggaatatacaatagatgttttctttcgacaaaaatggaaagacgagcggttaaaatttaaaggtcccatgaatatccttcgacttaacaacttaatggctagcaaaatctggactcctgacaccttctttcacaacgggaaaaagtcagtggctcacaatatgacaatgccaaacaagctgcttcgaatccaggatgacggaacattgctgtacaccatgaggcttacagtccaagccgaatgtccaatgcacttggaggactttccaatggacgctcactcatgcccactgaaatttggaagctatgcttacacgacctcggaagtcacttatatttggacttacaatgcttctgactctgttcaggttgctcctgatggctctaggttaaatcagtatgatttgctgggccagtcaattgggaaggagacaattaaatcaagcacaggtgaatacacggtaatgacagctcatttccacttgaaaaggaaaattgggtattttgtgattcagacctatctgccttgcatcatgactgtcattctctcccaagtgtcattctggctgaacagagaatcggtgccagcgagaactgtgtttggagtaacaactgttttgacaatgaccacattaagcatcagtgctcgaaattcccttcccaaagtggcctatgccactgccatggactggtttatcgctgtttgttacgcgtttgtgttctctgccttaattgaatttgcaactgttaattacttcacgaaaagaggatgggcttgggatggaaagagtgtagtaaatgacaagaaaaaagagaaaggctccgtcatgatacagaacaacgcctatgctgtagccgttgccaactacgccccgaatctttctaaagatcctgtcctctctaccatttccaaaagtgcaactactccagaaccaaacaagaagccagagaacaagccagccgaagccaagaaaactttcaacagtgtcagcaaaatcgacagaatgtctagaatagtgttcccggttctgtttggtacttttaatttagtttactgggctacgtatttaaaccgggagcctgtattaggggttagtccttgagtctagacattgttacttgggctgtattgcagtgttatatttagttttgttttgttttgtttgtttcattttgcttgtacagtctgactaataactgctaatttatgacccaatatgtatagtatgtatataatggtagagcttaccagtagacctctaaaggagacctgcacttgctagctcatggaaatacaggcagaaaacatcccgtgccagaagagccattgccttttcaacacatttacctaggacctagttcaaagtggatttcagatcccataatttatttattaatgttctaattagaatgaaagttgagatcctatgtcacacttcgggaaacctttgatttagatattacatagagaactatttctacggatgcctcaggatgatcagagattaatattgtcactcaaatatatgaaacagctaaacctctggcctggtgctttaggagagttgaacccctgctagtgtaattggaagcttgacacacaaacacacacacacacacaccaaatattaccctattactccactcagtatttacaaaactgcaaaccctgagtgacaagaagtcctgcaatgatgtgattttatgtaataaatgcacctgtcaacatatattgttagagaaattggttntgcacttactttcttaattttttaagattatacatccagtcaggaagcctctacctactntacaacataacanaatcaaggaaaatatatttttcattcacccagcatncatggctgtgaaagtttccacgtact

SEQ ID NO: 192 - DNA, 2825 bp, Rattus norvegicus
gaattctggatccagaggctggtgggtaaagatgtcagggaaggtgggtcgttctggtccttgatttgcctcctgccggatggtgtgggctccagcctgggcgaaggtgagtcccacagagggatctgcaacgggaccgttggatgcgcttttcattttgaccactagtgggagctgctggccaacctcaggcctgacaggagctggaggcccgcagccgagtgatcagtggtccatctgttagaccctccagagtcatccgttcagagtgcaggaccatcactgtatattggcttcttatataccttccaaggcaccagaacctcctggagccgccacactcaagtcccaaatggacaacaccactggcccacagccacctcttcaaaattccaataaagaagttgctgggcagagaaggatggcacaagctttcaggacttgggaggcaaagacaggcagggggaggtgaactcaagtccagtctggtccttatagcgaattgtagagtagcgagagatacatagtgagaccctgtctcaaaacaaagtaagtctgtgtgtgtgtgtgtgtgtgtgtgtgtgtgtgtgcttgtgcgcgcttgcccgtgtatgtgtgcgcgtgtgtgagtgcatatgagtgtgtgtgtgtgtgtgtgtgtgtgtctgtgcgcgtgcgtgcccgcgcttatatgagccatgcatatcctggctcccaaacccagaacctcagcaccctttgaaggctttaccttcccagagtacttgtctcctagcagtttgacaatactgcagagaaatcaaacctcgggacaaaggacagagtgggtgtctgtgtgcacctctgtgttcctgtgatagccctggacactgagtcgctcaaaatgtcctatggtagtggcctctcatgtttaaataagggagatgtgggtctgtgggtctttctgtctgtacaagcgaatgtatgaagctggaccaacatgtgcacggttgtctgtccacgtgtatgagtgtctgtgacggtattcttgtaggacagtcagtgctcctgtcagtgtgggacttggtatccctctgtgggtcaactagaaggctgaacacgggtcaagagggtgagtgtgtggaggtattcgtgtctgtgggtttgctagtgtttgctgctagtgtgtttgaaatggagtctgggggtgtgtttgatttctgtctgagttcatgtgtcagcatggccatataaatatctacaacgcatgggtctatgtactgtcattctatctctagaaatgtggctctaagtgttcgcatgtcagtgtgtcagtggatgtatctctaagtcacgtggtataattaggtttatcagtgattgttcctcaatgccagtgtatgtcagtggtgcctgtctgtatgtgtatgtccatgttcatatgtgtgttggtatctgtatctgtgtgtgtgtgtgtcaacgtaggtgcatgtgtgtcagtgtgtctcagcatggatgtcaggtcctgcccatgtccatgtacgtgaataagtgtggataagtgaggtttgggttagggtccccatatcatcgaggaggggtgtgtctgtgtactttggcttgggcgacgtgtgtgccaacgtttgtcggtgtgtgccggtccaggtctgcgtgggtggctctctgtagcgaggcgtccgcaggtcggcgtgcgtccgcgtgtctgtctgtccgtgtccgcgtgggcggccgtctccagcagggcgcacccggggtcagagtggtgggcgtgcgcccgccgggcagggtggctctccccgcgagccaggcgggcgcagcgccacgtgcggagccccgggcgcgtcgctctggggcggagccagcccggggccccggagccccaggccgaacccaggcggggcccgcccccgaccccgcccccagcccgagcccgcgccgcccgccgagcccgggagcccgagccgaacggcggagccgagacggcggcggcgcccgtgggatgcggggatcgcgcccccggggccgctgagcctgagcccgctgccccaagccctacgccgagccgagcccgcaccgcgctgcagccgcccaccccggggcgcgggccggggaccatcaggtgagcgatcaccccctgtgtcccgcagccccccgcgcccctccgtccgccgccgccgcccaactttcctccccgatggcccggagccgcccggccgggtccccagcccccgcagccgctgtccccgaggggggaggggcgggagaggcgcaggtggcccgggccggggttcccctgttcgtctctgatcgccgcgggtctcctcccgtcccctctccttccgggttccccgtgcgctgtcgagggccgggggatggggagcttcggccccagccccgggaccatcgctggcgcagactcgccaatgggctgagattgggacccggattcccgaggccggagaccccaaggtcagagcagcgacaaggcgcgcggagaatgtggctctcgagagctgggggtgaaagggttgagcgggcactgaccaggactagggagcaggccgagcgctcgttttccctgggccccgggggtggaggaactcggcacccgggttgtgccctcggttagacgagatcgctgcacccttgcaaggaatctgtgcactctattgggggtcagatctaagagtcgccctgtctttgggcgctcccactacgccgagatcttggtgccctgttgtcgccttgaagcggtcggatctcctcttgtctctgtgcgctcggagaggggagagatctctggacttggaaattcggcagaattc

SEQ ID NO: 193 - DNA, 929 bp, Rattus norvegicus
ctaatccggctgctgtgacaaacccaagtgcccagaaacaagtctctattggtttacccaactttaaggattggagaaaggaaggctatgtgactcctgtacggaatcagggtaaatgcggctcttgttgggcttttgctgcagttggtgcgatagaaggtcagatgtctctcaaaactggcaacctcacccctctaagtgcgcagaatctattggacwctaaaagtgaagraatakggctgccgtkgggtactgcacaccaagcattcaattatgtttwgaaaaataaaggtcttgaggctgaggcaacctatccatatgaaggaaaagacggaccctgcaggtaccacagtgagaacgctagtgctaacatcacaggttttgtgaacctcccaccgaatgagctttacctatgggttgctgtagcatctattgggcccgtctctgcggcaattgatgcttctcatgactctttcagattctacagtggaggtgtttatcatgagccaaattgcagcagttatgttgtgaatcatgcagtgctggtggttggctayggatttgagggaaatgaaacagatggcaataactactggctgatcaagaacagttggggtgaagaatggggcattaatggcttcatgaagatagccaaagatcgcaacaaccactgtggaattgcttcacaagccagcttccccgatatattytgagctgcctgttggtcmccacagggaggacatggtggrgacagcatttagtgccttccacttcacagtaaccagtytctcctgagtgctttcaacagttgagtagctaaaaagctaccttgtgktggtggaatytggaacccacytgtthtacaacagcatggcaamtactgtaataaaatctgtacctgatgtgtcwwmaaraaaaaaaaaaaaaaa

SEQ ID NO: 194 - DNA, 1738 bp, Rattus norvegicus
ggatccccagacttgtggccagatctctttgcttcgttgctaggtggtcagagtgagctggacagttcccaggtattgcttctgaggtgaagccaaggtcactgtggcccagagcaaagagaacctgttgaagagtagaggagggcccagacaccccccaaggactgctccccagtgccgccccaccttttctcagccctcagttccctgcataaaacacttttgagggccttcttatgtctaagccaggaccccatgagtgctagtagccccttgtagcccctcctggcagcccccagggtatgttgggaggaaggttattaataggacctggagtgggagagttgcctcagcacctgtgacccagctcactacagttgggtgggttgtagggatcttacccggatgcctgcggtgactaccggtgactacctagcctgtgtctctcctgtgtccccagccccatcagtcctgtcctccccaaccccctgttcctgagtcagatgccagagcagtccctttctagcctgaactgccaaagctgtctttttgggaaagttcgtgttcacacacacacacacacacacacacacacacacacacacacacaggggtgggagagacagagagagacagagagaccgagagagagagacacacacacaagggggggaagagagaggggaggattggagagacagagacagagagagagagagagagagagagagagagagagagagagaaggaagggggagatgaggagttggagagacagagacatagacaggcagacagagacagagaggaagacagagggggggtgggatggggtgttggagagagagagagagagagagagagagagagagagagagagagagagctcttcacccactgtgtatcatcacagtgtcccagcagcatcaggctccaccatcactcagttcatgtggtgacatgcttactttgtgttggcttaagcccagatggggaaactgagcccggagcagcaagaggaacagaacaggctggctaaggcagatcagggagacctcagctgtctctggtcctattaagagggaactttgccaatatggtccaaaggcacagtcaagggcccagggtgatacataggaactggcacagttgctcccactaggggaaagattgtggagttctcctatgtacctacagaaaggtattctgggctaagggcgcacagaagtgcgcactgtcggaatctgcgatctcagagaacccagatagagtccagataaccaatgagatagggagacagtcctcattcctctgtaatcagtaaccccaaactaacccaagacacctttcgcttaggcagagtagcatttttagattctgtgacttttgctacagacagatttcatgaagctcagagagatgaatacacctgcctgggatcaaacagccagccataagacccagacagggtttgggttcactggctcaaagttcagtcataaagtaagaatttctagataagtactcaccaacccttaggttgtggggaaatagattcccacagaggagggaggtatccagacatagaccagctgcagaaaaaagggacaattgtgttttaggagactgaatcctggagttgtgcgaggggaagagagatgaataggagactgcaaagaaagtctgggaaccagggtgaaggggaaaagaccttcttgccatggggctgcaggaattc

SEQ ID NO: 195 - DNA, 468 bp, Rattus norvegicus
cagaggatggtcctggaccttcatgggctctgcaggctccaaggacctgtggtggctgtgagggaaccgaacagtgtagagaccaaaagagtgctactctccctggaaagttggggctatttctgtcctttctgcctccctctgggctctaggctctaggacaagctggtgggggaggggtggggctaggctgtgtgtgtgtgtgtgtgtgtgtgtgtgcaggcgtgtgtgtgtgtgtgtgtgtgtgtgtgtgtgtgtgtgtgtgtgtctttggtttccttgataaggggacaggcccactttggagctaaggaggggtgggcctctccaatctcaaagctgcaggtctccacagaatgacgcacacaccacgtccaccccaccccaccccacccctgctcccatgggacctggggccacttcaggagggaaaagtgctggtctgtgactaagggacccaggtgtcct

SEQ ID NO: 196 - DNA, 946 bp, Rattus norvegicus
  misc_feature (365)..(366): n is a, c, g, or t
  misc_feature (373)..(373): n is a, c, g, or t
cgrgcaagatggaatcacagacmcaggtcctcatgtccctgctgctctggrtwtctggtacctgtrkggacwttgwgmtsacccarwctccatcctcycwggctgtgtcagcaggrgagamggtcastatvavctgyaagtccagtcagagtcttttwtayartrraaacmaaaagaactacttggcctggtaccagcagaaaccagggcagtctcctaaactgctgatctmctgggcatchastmggsamwctggdgtccctgmymgsttcabwggcastgrrtcwgrgamrrayttyachctbammatcarydswgtrsaggcwradrwyhtkrswrhywrwywmtgyswscarwvytwbvannhtcsdynsacgttygghkswggsacsaagytggarhtvaaacgggctgatgctgcaccaactgtatcyatcttcccaccatccayggaacagttarcawctggaggtgccwcagtcgtgtgcytcrtgaacaacttytatcccagagacatcagtgtcaagtggaagattgatggcastgaacracgagatggtgtcctggacagtgttactgatcaggacagcaaagacagcacgtacagcatgagcagcaccctytcgttgwccaaggytgamtatgaaagkcataacctctatacctgtgaggttgttcataagacatcatcctcacccgtcgtcaagagcttcaacaggaatgagtgttagacccaaaggtcctgaggtgccacctgctccccagytccttccaatyttccctcctaaggtcttggagacttccccacaagcgacctaccactgttgcggtgctccaaacctcctccccacctcatcctccttcctttccttggctttgatcatgctaatatttkgggaatattaaataaagtgaatctttgcacttgaaaaaaaaaaaaaaaaaa

SEQ ID NO: 197 - DNA, 1408 bp, Rattus norvegicus
gcggccgagcgcgggacgttgcggccgaaacgcggagccgcgagcaggattaagtagcggcccggccaccrgsacggcgccgctctccgctackggcttccaggtctccgttggctgcactgccggccggtkgttgaatatttggatgaagccattagactaattgcttgccatcatgagcagaagtaaacgtgacaacaatttttatagtgtagagatcgsagattctacattcacagtcctaaaacgataccagaacttaaagcctataggctcaggagctcaaggaatagtgtgtgcagcttatgatgctattcttgaaagaaatgttgcaatcaagaagctcagccggccatttcagaatcagacccatgctaagcgagcctaccgagaactagttcttatgaagtgtgttaatcacaaaaatataatkggccttttgaatgttttcacaccacagaaatccctagaagaawttcaagatgtttacatagtcatggagctcatggatgcaaatctttgccaagtgattcagatkgagtymgatcrtgmmagaatgtcytaccttctctatcaaatgctgtgtggaatcaagcaccttcactctgctggaattattcatcgggacttaaagcctagtaatatagtagtcaaatcagactgcactttgaagattcttgattttggactggcaaggactgcaggaacgagttttatgatgacgccttacgtggtaactcgttactacagagcaccagaggtcattctcggcatgggctacaaggagaacgtggatttatggtctgtggggtgcattatgggagaaatggtttgccwcaaaatcctctttccaggaagggactatattgatcagtggaataaagttattgaacagctcggaacaccttgtcctgaattcatgaagaaactacaaccaacagtaaggacttacgttgaaaacagacctaagtacgctggctatagctttgagaaactgtttcctgatgtgcttttcccagctgactcagaacataacaaacttaaagccagtcaggcgagagatttgttatctaaaatgctggtgatagatgcgtccaaaaggatctccgtagacgaagctctccagcacccgtacatcaacgtctggtatgatccttcagaagcagaggccccaccaccaaagatccctgacaagcagttagatgaaagggagcacacaatagaggagtggaaagaactgatatacaaggaggtcatggatttggaggagcgaactaagaatggcgtcataagagggcagccgtctcctttaggtgcagcagtgatcaatggctctcagcatccggtctcttcgccgtctgtcaatgacatgtcttcaatgtccacagatccgactctggcctcggat

SEQ ID NO: 198 - DNA, 3187 bp, Rattus norvegicus
aacacacctagaagaagcacgacttcagtccccgctattccctcggggtcccccaacctcctccagcctccagagagcggagcgcgaaggggcgcggcagcccgggccagcccacagctacacatagccttgtcagtccccctgccgtcgcagctgcagcgggctcgggatggggcagtggcaggggcgcaggggcttcactcggagccttggttattagctcccaggtctgggtgcctgcagccggcgtgagcagcttgtacctagcgcgggtctgcagtgacagtgcagcggagggaggctgggcgcgggctcaagccaggacccgggacacacgagtcatgacggacaccagccacaagaaggagggcttcaagaaatgtaggagcgccactttcagcatcgacgggtacagcttcaccatcgttgcaaatgaagcaggagataagaatgccagaccccttgcacgcttctcccgatctaagtcacagaactgtctgtggaactccctcattgatggcctcactgggaatgttaaggagaagccacggccaacaattgtccaggacacccgacccccagaagaaattctggcagatgaattgccacaactggatagcccagaagctttggtgaagacatccttcaggttacggtctttggtcaagcaattagagcgaggagaggcctctgtggtagatcttaagaagaatctggaatatgcagccacagtgcttgagtctgtatatattgatgaaacaaggcgcctgctggatacagaggatgaacttagtgacattcagtcagatgctgtgccttctgaagttcgggattggctggcctccaccttcactcggcagatggggatgatgcttaggagaagcgatgagaagcccaggttcaagagcattgtccatgcagtgcaagctgggatatttgtggagagaatgtatagacggacatcaaacatggttgggttgagctatccaccggctgtaatcgatgcactgaaggatgtggacacatggtccttcgatgtcttttccctcaatgaggccagtggagatcatgctttgaagttcattttctatgaattactcacacgttatgacttgatcagccgttttaagatacccatttctgcacttgtctcatttgtggaggcccttgaagttggttacagcaagcacaaaaatccttaccataacctgatgcatgccgccgatgtcacacagactgtgcattacctcctttataagacgggagtagcaaactggctgacggagctggagatctttgcaataatcttctcggctgccatccatgactatgaacatactggaactaccaacaatttccacattcagactcggtcggatccagctatcctgtacaatgacagatctgtactggagaaccaccacttgagtgcagcctaccgtcttctccaggaagatgaagagatgaatattctggtcaacctctcaaaggatgactggagggagtttcgaactttggtaatcgagatggtaatggccacagatatgtcctgtcatttccaacaaatcaaagccatgaagacagccctgcagcaaccagaagcaattgaaaagccgaaagccttatccctcatgctgcacacagcagacatcagtcatcctgcgaaagcgtgggacttgcaccaccgctggaccatgtctctcctggaggagttctttagacagggtgacagagaagctgagctggggctgccattttctcctctgtgtgaccgaaagtcaaccatggttgctcagtcacaagtgggttttattgacttcattgtggaacctaccttcactgtgctcacggatatgactgagaagattgtgagtccattaatcgatgaaacctcccagactggcgggacaggccagaggcgatcaagtttgaacagcatcaactcatccgatgcaaagcgatcaggtgtcaagagttctgggtcagaaggaagtgctcccatcaacaattctgtcatccctgttgactacaagagttttaaagccacttggaccgaggtggtgcagatcaatcgggagcggtggcgagccaaggttcccaaagaagagaaagccaagaaggaagctgaagagaaggctcgcctagctgctgaggaaaagcaaaaggaaatggaagccaaaagccaagctgaacaaggcacaaccagcaaagctgaaaaaaagacatcaggagaaacaaaaggtcaagtcaacggaacacgcacaagcaagggtgacaaccctcgtgggaagaactccaaaggcgacaaggcaggcgaaaagcagcagaatggtgacttgaaagatggtaaaaataaggcagacaagaaggatcactccaacaccggaaatgagtcaaagaaagcagatggtaccaagaagcgttctcatggctcacctgctccaagcactagttccacaagtcgccttaccttgccagtcatcaagcctcctttgcgtcactttaagcgtcctgcttatgcatctagttcctacgcaccttccgttccaaagaaaactgatgatcatcccgtaaggtacaagatgctggatcagcggatcaagatraaaaagatccagaacatctctcatcactggaacaaaaagtagggcaagtttaagaactgagggagtgggggagggccgaccgaccwgssygmmtwcykctcagcacctactacacacaccaggacacacccccgaagtcatgcagctggcactactgtggctgaccctgagagtcaaagtgaaatttgcctgagatccctcttggtcattttgttatagatgcaccagtcactacatttggagtcaatcaagactccagcaagaagctagtaaatggtagacttatttgattttactttgtaggcctttaaaagtcttaagttgcaatcaaattaaaaatgatatatcttatcctaaaaaataaaattcttcccactgccctgttttcatccccaagagatgatttacctttacatgaacactgccttaaaactgtcaggggtacgaaatgtacttttaaaaataacttttccaattaaaatgatgttattttgtgaaattaaaatataaatataccattttttctttcattttcccttcttccaaacctttacatatacatttgttctctctcaaaagcg

SEQ ID NO: 199 - DNA, 8351 bp, Rattus norvegicus
gaattccatcagaatttgcctttctggtggcttctctttccctgcccttgtggtgtttttccttcagtgagtgacaaatttcacaaccctggctgggactcccgaggtgctaagattacaggcctgggtcacaccacccaaacctgactttctttttcattgttgcttgtatttttctgtttgtaaccaaagctggacgactggaactcactgtgtagactaggctggccttgaactcatagaactctacttgcctctgcctcctgagtgctctgattaacggcactgaccaatacatccaacctacctactttcattttctaaatctaagtcctaacaggaagtgggaactgggcaggaataacagtacggtgggttaactccatgagtttaccggactttgcgagcctcgactgccaacgacatcctggcttgaggctggaagtcacagcccaacaggggcaaagattgctctgtgaccagtctggaaagggagcactggagcacagaaatcaatccggttcaagttcatacccagggcaaccacggaaagtgccaggaaaggaaagaacaggatgttttccacacattccatgggcagccatggggatccaggagaaagtgatgcttggctgagccaagaagcagtgccccagtttacagtaagggctgagaggacagcctgtcctgagcttccggtaacacatttcctgccttctcaaatgacagacattccatctacgactttgagtctgatttcagcagtcttatgcaagaggggaaacaccatatgcctccagggaaagaaaatttggctgccgtctccaccctttccctcagcatccaccgtgggtgggggtggggagggttagtggggctttccatccctgtctttcagaacactacgatctggccctttctgcttggccaacacctgcgcagagtcctagttcatatcctcccagaatggcctgctctccacctccagcagagacccccatcattttttcctgttcactctctgccccccaccccccaccaagaataagtatccttagcacaaggcttgtgtctttatggtctctagtctctgacaactggctggagtctcagtggattcgaaccctccattcatcttgggctaatgactatgtgattgcgcctccgtttccacttttctactgtgaaaataatgaacaccccaagctatgttgtaaggaaaaatgagagccctaacagtgcccccagcacgtgacacgcagggggtacgtgacacgcagggggtacgtaaccaaggccggtaaagtctgggctagggctggtttttgttacctgttcacactgtcagctaggttttcctgtatgcggggtctccaagccccgctttcacctaagttagcactcaagacgtgctgtggggactgtgtccccgtggacgctgcagggggttcgatgtcccgcaactcctctgcacccggccacttgggcccagggcacgtgagcaggtttcctggaaccggtccccaccggatcgcagaccctttgcgctcagccctttgctctcagtccctgcgccaggagaaagggggtgtgactcagcgcgggggcgtgtgcaggctctgtacccacgtgcaaaaggagggatgcttgcagacttcgggtcgtgcgcaggctcccgggcgtgtgcgggccatttcccttgagccagaagaagggcgtgtgcaggcagtggggaggagggcaggtggcgccccgccacccgggcggagcttttgcgcgcgacccaatactctgggctataaaggtcgcgctccgcgtgcttctctccatcacgctcctagaactctacagcgatctctcgttgatctccaactgccgcctccattcgccatggaccccaactgctcctgtgccacaggtaaggggggctgctgacgggcctctgtaaccggagcttctgggagagcaggacggacttttgggcccctactctggtaactacttttagggtactactggctgctgccttccgaacgaattctggaacactcccgccccttttaaactagtccttgagataatggctcgcccaagctggctggcttgcacccgagttctttggagaactgtgttcagttatgcccgggtccgctcaccgcgctccctgccttcttcctctagatggatcctgctcctgcgctggctcctgcaaatgcaaacaatgcaaatgcacctcctgcaagaaaagtgagttggatttattttctctaccctttcccttcgcgcccctgcggtccctagcccgccgcaccttcccagagcgtccaggstgcctctaactcggtttctcgctcacgctcaacttttttcccccaggctgctgttcctgctgccccgtgggctgtgcgaagtgctcccagggctgcatctgcaaagaggcttcggacaagtgcagctgctgcgcctgaagtgggggcgtcctcacaatggtgtaaataaaacaacgtaaggaacctagcctttttttgtacaaccctgaccggttctccacacttttttctataaagcatgtaactgacaataaaataaaaaaacttgacttgattaacccagctttgtctgtgttcattggaaataaggggctggcagaggcgttgaaatgggattggtgcaccttgatttgggataagtggattgatgacccctctggactttgatagtctcgaacatggtgggcagaaacatgtactggtcacaaatgtgggcatgtgtatattggggattaaacccaaagcttcctgcttataaaccagggtgctctaatgagccacactcctacccctagatgcataatgattctggtttaattttggattattaggcttaaagcagtatgaagtacctgttcataagctttggtaaataaaataaaagttggagtgagtctcatacgactcctctttgtagtcccaatatttgggagcctgaggcagaaggatcggtgcaactccgaagccaacttggtctcaaattctgttaacctttgattttgagaccatcttactgtgtaacctaaaatggtccttgaacttgcagtcctgcctcagacttctaggtactgggattacaggctcagcttaaaatcagggctggagagatggctcagcggttaagagcacccgactgctcttccagaggtcatgagttcaattcccagcaaccacatggtgctcacaccatctgtaatgagatcttacgcgttctggcgtaatgcaagcagaaaagacatcagtaacgtgaacaaaaccatgaaaagtactgtaaacactataaatatccaagggtgtgccttgcagtttggagactaaatggcacatgtccaacctagagctcccatgaggaactgcccatctctggtatacagggacacggacaggattttttttttcctcttccagagagccctgtgataggacttggctgtcagtctggaagttcttctcaaggtcaggcagaaatctacctacccctcactccataccaacccctggcaatttaagcaaagtaactagaaatttggaaggaattgactagcatcttcccaggagctaggcatccaggttgagtctgcaatttggagggcggggtggagtttcctactctataggaaggaggtgaatacatgcaattaaaaccagccgttaatgccccctggctatttgttgaggtaatgcgatttggtcttcaatcaaagggaaagtttcttggctagaagtaaggaccaagcttgccgtaggctttctctgtgaagagtaaatttacaagacagcctctgtttcttgctgtcaggaagtcctagttcacagcccactttctctcttattggtcatgtagcctgggcaagtcactgaacccctcaaatgctgatatcctgccctcctagatgctgataaccacctgtccccaaagaacacacgggcaaccaagcacagatctgatttttaaggaatttgttttgtaagtgcagtttgggaatctggcctcatttgtctcttgtgtgcccttgctgacaccattcattcagccctggccttgatttaggtgacaccgaactcgggctgtaccctcagagatttccctctttgtctacaaacaaacaaacaaagcaaatatcctaattaagactcttgtgtgtcaagtagggcatctaggaatgagtgctgggaccactcttagtcccagaatgccttgaaaccaagtgaatgacaattatacatttagcttctcaattaaaatggaagacattgggccgggaattggctcacagtggagagcctaccaggcttttgtgaagctctgaggttcatccctagaaccattaaaaaaaggtccgtgggcctgggaatgtagctccctggtacagtgcttacctaacatgcacggacccctgggtttgctccacagcatggagtaagcagtctgatggcacacacctgtaattctaacacgcaggaggcagaggcaaggaggatcaaacgttcaaggaccacggcaagtttgaggtgtgggccacatgtaaagccgtctccaaaaagacatcacacacaaaacacaacagtattgtgatacacacgtatacctgtatcctagcaacctgggaaactgaagcaggagactgtcttgagttcaaggccagactgggctgttcggtgatcgacaggccattctgagttacagagtgaggcccttggaaaaggagaggaaggagaggaggagagactgggcctggcaacatgcatctatcatcttagctactcaggagactgaggcagggggaggatttccagctcaaagtctagctacagagcacgtctaaagccagcctggacagcttagtgagaccctgtttcaaaataaaaagaatctaaaagactggaggtaaagctccagtgtagaatgcttgcctggtaaccaggaagccttgggttcaatccttactgtaaaaaaaggaaaaaaaatcatattatgcaagaggtctaaaggcccaagaatctgttacagatctcagttttggtaatagacaataaaatataacaagttggtaaaaacaagcaagagtaccaactacaaacatacttcatgtggttcagcagaagcatctcagtatgcatccagaaaacagcagacagacagaattgggcatccttgggctagggcacacctcagcctgacttctacccgagaagccagcagtcttagccagtgcagaaccactggtgtctctgacttgggatctctgcttaggatgcgcccttgagtgcttagaatttgtctctagtcaggctgaatcctctctctttccaaacccagtccttagctatttaaaaccagtaaactcatgagatttggagtcatccaacgttatccaggcaaggattctgtttttttcttaatttttatatttaattgcttattaatttttgaaataggatctcatttgtgtggccctggctggccttgaactcaagaagaccatctgcctctgacttctaatagctgagattaaagaggtagcctcaggcaagaacttaactatagaccaagactcagttccacgtgaagttttttggatcttcccacacagagggtataactgtgtcatctccaagatgaggtatcccgaggaaggagaaatggcctgggtcattgtcaccaaaccagtgggtaataggttaatggaaagacacatgtgtctaaaccaccaaggaggaggaggaagagggcaaagaggggaaagaaggaggagggggaggagtgtcatagcccaggactaggtgccttctttgcctacacacggacctacgtacagaaggacagcatcagagaacttgggacccgtacaggaacattggtgtcaagctgtactgcttcacagcccgttttactactgactggttgtatggcccacccggcaggtcattgaatcctctgtccttgtgtgtaaatagaatttgcatctctatataggtattaggtgagagatcggtttgactcctggttctggcataatcatcatatcgcacagtggctggtggaggtcctataacagttaagcaaaacctgcccaaggtctcatagctctgagtacgcgtgaaccaatggcatagctgatctcttgccctagtctcaagggctgacagaatctaacgttactctaaagtcagaaacattgaaaatataaacagctgcccgtattggttttggtttttgttttttgttttttttttttgtttatttgttttgttttgttttatctaatgcagtccctggatatcacctaaaatgatccctctgcctcggtttttttttttttttttttttttttttttttttttggttctttttttcggagctggggaccgaacccagggccttgcgcttcctaggtaagcgctctaccactgagctaaatcctctgcctcggtttttaaaaccggcctggagtagagccgatggctaaaggtttgtgacccccagcccggaacgtgcctacatatgcccgctcatgagtggggaatatgttgcgatgagtgtccgttggctctgttgctgtgtccagaaggaaggggctcaaccaaagaccatgatgggacagagacagacaataaggacccggaaagttcgtaatcaaggctagtctttataaaactgtctccttcgcctctgctagcttcgattcagagagacgtgggcggagccggtcgctgcccaggaactccaggaaaggagaagctgaggatagcgcgctacgattgtgtttacagagacagttgggcttcctgaggtgtgttctcgtaatgcactggatcagtgatggcctgtaatatcccggaaagcactacagaaacatgatgttccacacgtcacacgggtcctcctacccgggccctcctactcgggcctgtggcaccaaagggggcggtcccgttgtgcacaccggcgcccgagggagctctgcactccgcccgaagagtgcgctcggctctgccaaggacgctgcgctcgtgactgagcgcgggctggagcaaccgccaactgagtgcaaaccctttgcgcccggacccgtccaacgactataaagagagcagactgtccgctaagcctcatcccgacttcagcagcctgactgccttcttgtcgcttacaccgttgctccagattcaccagatctcggaatggaccccaactgctcctgctccaccggtaagacgcccggtccttggtctttagaatacccagttgtaggggtttggcgggaataggcacctttagttgacaattcgtcctagttctttctagaacccgctcttggaatcgccttcacctgttcttggagtattattattgtccgaacggctccttgtcggggtttggggtaggatttagacgcgcaaataaatgtcccgatcacccacgtagtgggacatctgagttgagacccagttgttactaaccttattgtgaattgcctgatctacaagagaggtgagagaccgttgtgtcttgagatcaaagacccaagccttaccctaccctgtgaggagagaagaggggctaggctccctggagttctgaatagcactttgaattgagcagggcacatggtgttggccactgctgtaatcctgcctcttactgaccgctgtcttccttctcctccacaggcggctcctgcacctgctccagctcctgcggctgcaagaactgcaaatgcacctcctgcaagaagagtgagttgggaccctcgggtggtggtgggggaactcctacagagctggctctgagaaacgtctgaggccattcggtttggggcaagaagcaggtcttctgccagacctgtgcgaccggaggactaggaagcctactctgacatcttcctctatctttctttccaggctgctgctcctgctgccccgtgggctgctccaaatgtgcccagggctgtgtctgcaaaggtgcctcggacaagtgcacgtgctgtgcctgaagtgacgaacagtgctgctgccctcaggtgtaaataatttccggaccaactcagagtcttgccgtacacctccacccagtttactaaaccccgttttctaccgagcatgtgaataataaaagcctgtttattctaactctggttttcttggtgtcgtttagaaataagaaactggggcgacacgggttaacttgatagtctggggatctggttttggactcgcccgtgccttttaactcccgcctctggctcccaaagaggggtaataatgtctttgggtaaagccaagttatcccataagctt

SEQ ID NO: 200 - DNA, 4651 bp, Rattus norvegicus
aagatcgctgtgcagtcagccttcagccccaactgcactgtctccacacagctttccttcccactggttacaagcaaattggacaacaaaatctcatgagatatttgtgatttaattttagtcacaaaacatcttcaaaatgacgaggattttgacagcatgcaaagtggtgaagacactgaagagtggctttggtttggccaatgtgacttcgaagcgacagtgggacttctctagacctggcatcaggctcctttctgtgaaggcacagacagcacacattgttctggaagatggaactaagatgaagggctactcctttggccatccctcctcggttgctggcgaagtggtttttaatactggcttaggagggtactcggaagcacttactgatcctgcctacaaggggcagatcctcaccatggccaaccctatcattgggaatggtggggcccctgatacaacggcacgtgatgaactgggactgaataagtacatggagtctgatggaatcaaggtggcgggtctgctggtgctgaattacagtcatgactacaaccactggctggccaccaagagtctgggtcagtggctgcaggaggagaaggtccctgcaatttatggagtggatacaagaatgctgactaaaataattcgggataagggtaccatgcttgggaagattgagtttgagggccagtctgtggactttgtggatcctaataagcagaatttgattgccgaggtttcaaccaaggatgtcaaggtgtttggcaaaggaaaccccacgaaagtggtagccgtggactgtgggataaaaaacaatgtcatccgcctgctagttaagcgaggagcggaagtgcatttggtcccctggaatcatgacttcacccagatggactatgacggacttctgatcgctggaggacctgggaacccagctctggcacagccactaattcagaacgtgaagaagattttggagagtgaccgcaaagagccgttgtttggaatcagtacaggaaacataataacaggattggctgctggcgccaaatcctacaagatgtccatggccaacagaggacagaaccaacctgttttgaatatcacaaacagacaggctttcataactgctcagaatcatggctatgctctggacaacaccctccctgctggctggaaaccactgtttgtcaatgtcaatgaccaaacaaatgaggggattatgcatgagagcaaacccttcttcgctgtgcagttccacccagaggtcagcccggggyywwcmkwywctgagtacctatttgattccttcttctcgctgataaagaagggcaaaggcaccaccattacctcagttctgcccaagccagcattggtggcwtmtygwktmsaggtttcmaaggtccttatcctaggatcaggaggcctgtccattggtcaggcaggtgaatttgattactccggatctcaggctgkawwmkycwtkmaggragaaaacgtcaaaacagtcctgatgaacccgaacattgcatccgtgcagaccaacgaggtgggattgaagcaggcagatgcagtctactttctccctatcaccccccagtttgtcacagaagttatcaaggctgaacggcccgatgggttaattctgggcatgggtggccagacwrytctkmwctgtggwgwgkaactattcaagaggggtgtgctcaaggaatatggtgtgaaggtcttgggaacatcggtcgagtccattatggccacagaagacaggcagcttttctcagacaagctgaatgagatcaacgagaagattgctcctagctttkcrgtgswrwcartrgaggatgccttgaaggcagcagacaccattggctaccctgtgatgattcggtctgcgtatgctctgggtgggttaggctccggcatctgtcccaacaaggagaccttaatggatcywkscacrmaggyatwwgctatgaccaaccagatcctggtggagcggtcagtgacaggttggaaagaaatagaatatgaagttgtccgagatgcggatgataactgtgtcacagtctgtaacatggagaatgttgacgccatgggtgttsacacaggtgakkcagttgttgtggccccggcccagaccctctccaatgcagagttccagatgttgagacgcacttcaatcaatgttgttcgccacttgggcattgtgggtgaatgcaacattcagtttgctcttcaccccacttccatggaatactgtatcattgaagtgaatgccaggctctccaggagttctgccctggcctsbrwkryyacwggstamsmactggcgttcatcgcagcaaagatcgctctaggaatcccacttccagaaatcaagaatgttgtgtctgggaagacctcagcctgcttcgaacctagcctggattacatggtgaccaagattcctcgctgggaccttgaccgttttcatggaacatccagccgaattggtagctcaatgawrwktgtakscgaggtsatggccattggtcgcacctttgaggaaagtttccagaaggctctgaggatgtgccatccatctgtggatgggttcactccccgtctcccaatgaataaggaatggccagcaaacctggatctgaggaaggagctgtctgaaccctccagcacccgcatctmtkcywytgsyaaggymwtrgaaaacaacatgtcccttgacgaaatcgtgaagctcacatccattgacaagtggtttttgtataagatgcgtgacattttaaacatggataagacactgaaaggscttaacagtragwctgttacagaagaaactctgagacaggccaaagagattgggttctcagacaagcagatttcaaaatgtttaggactgaccgaggctcagacaagagagctgagattgaagaaaaacatccacccttgggttaaacagrtwrmkacattggctgcagaatacccatcagtgacaaattacctgtatgttacctacaatggccaggagcacgacatcaaatttgatgaacatggaataatggtgctgggctgtggcccwtrycwcrywggcagcagtgtggaatttgattggtgtgctgtctccagtatccgcacactgcgccaacttggcaagaagacggtggtggtgaattgtaacccggagactgtgagcactgactttgatgagtgtgacaaactctactttgaagagctgtctttggagagaatcctrgmtmkytwcywccaggaggyawrwaatggctgcatcatatcagtcgggggccagattccaaacaacttggcggttccgctatacaagaacggtgtcaagatcatgggtaccagtcctctgcagatcgatagggctgaggatcgctccatcttctcggctgtcttagatgagctgaaggtggcccaggctccttggaaagctgttaacactttggtaasgagagcarcwsgaatttgcaaactctgtgggctatccctgcttactgagaccytycwmystttysagtgggtctgccatgaacgtggtattctctgaggatgagatgaaaaggttccttgaggaggccwctckwgtctskcaggawswcccaktkgtgctgaccaagtttattgagggggctcgggaagtggagatggacgctgwwskcwwmkwwkgacrggtcatstcccatgccatctctgaacatgttgaagatgcaggtgtccactcaggggatgccacactgatgctacctacgcagaccatcagccaaggagccattgaaaaggtsawsrwtkmsamacgaaagattgcaaaggcttttgccatctctgggccattcaatgttcagtttcttgtcaaakgaamtkatstccttaggtgattgagtgcaatctgagagcctctcgatccttcccctttgtctccaagactcttggggtggacttcattgatgtggccaccaaggtgatgatcggagagagtgttgatgagaagcatctacccacactggaacaacccatcatcccctctgactatgttgccattaaggtmmyatgtttkcamtgkccccgactgagggatgctgatcctattctgagatgtgagatggcttamtmctrrasaggtggcgtgttttggtgagggcattcatacagccttcctaaaggcaatgctgtccacagggtttaagatacctcagaagggcattctgattggcatccagsartcattccgtccaagattccttggtgttgctgagcagttaywcwatkwwrrwtkcaagctttttgccacagaagccacatcagactggctcaacgccaacaatgttcctgccaccccagtggcttggccatctcaggaaggacagaatcccagcctywyytyywtcwwbwarrwwgataagarmcgraagcmttgacctagtgattaacctccccaataacaacaccaaatttgtccatgataattatgtgattcggaggacagctgtggacagtggaattgctctgctcaccaatttccaggtgdsywwmctcttttrctgaggctgtgcagaaagctcgtactgtggactccaagagtctgttccactacaggcagtacagcgctggaaaggcagcatag

SEQ ID NO: 201 - DNA, 2284 bp, Rattus norvegicus
ctgcagtcaacggatcttcactgctatgtaagaacatttaagaaataagagctttcatctgtgatttttacatgactctaacacgttataatcaacagatgatgtttgcacatgagaagtgattcaattttggctgaatagaatcagggacaaaaaagacaaataaactctgttaaccttgagctcatgttccatgcttgtatttacacatggcgtaacatcattgcactcatctaatcggtgatggtttaaaagttatatattaatttcttgggtgactgaactttcataaaaaacatgaatatctacaatgaacgacagatawmaaaagcattccatttctgcaagatgtctatgaaacagacttcagtgtttctgttgatacagctcatatgctactttagacctggagcctgtggaaaagtgctagtgtggcccacagaatacagccactggattaatataaagataattctgaatgaacttgcccagagaggtcatgaagtcacggttcttgtatcttcggcttccattctcattgagcctaccaaggaatcttctattaattttgagatttactctgtacctttgagtaaaagtgatcttgaatatagttttgcaaaatggatagatgaatggacacgtgattttgaaacactctcgatttggacatattattcaaaaatgcaaaaagtcttcaatgaatattctgatgtcgttgaaaatttatgcaaagcactcatttggaacaagagtcttatgaaaaaactccaaggatctcaatttgatgtcattctcgcagatgctgtgggtccctgtggtgagctgctagcagaactgcttaagacacctttagtgtacagtctccgcttctgtcctggatacagatgtgaaaagttcagtgggggacttccactgcctccttcctatgtgcctgttgttctttcagaattaagtgaccgcatgacatttgtggaaagagtgaagaatatgttgcagatgctgtattttgacttttggtttcaaccatttaaagagaagtcctggagtcagttttacagtgatgttctaggtaracyswsmacwttmactgagatgatggggaaggcagatatatggctcattcgaaccttctgggacttggaatttccacacccattcttacctaattttgactttgttggaggactacattgcaaaccagccaaaccactgcctagggaaatggaagaatttgttcagagctctggagaacatggtgtagtggtgttttctctgggatcaatggttaaaaacctgactgaagaaaaagccaatgtagttgcttctgctcttgcccaaattccacagaaggttgtatggagatttgatggtaagaaaccagataccttaggatctaacactcggctgtacaagtggatcccccagaatgaccttcttggtcatccaaaaaccaaagcttttgtagctcatggtggaacaaatggcatctatgaggcaatctaccatggcattcctattgttggtattcccttgtttgcagatcaaccggataacattaatcacatggtagccaaaggagctgctgttagagttgacttcagcatactgtcaactacaggccttctcactgccttgaagattgtcatgaatgacccttcctataaggagaatgccatgagattatccagaatccaccatgatcagccagtgaagcccctggaccgagccgtcttctggatcgagtatgtcatgcgtcacaaaggagccaagcacctccgctcaactctgcatgaccttagctggttccagtaccactctctggatgtcattgggttcctattgctctgtgtggtaggtgtggtattcatcatcacaaaattctgcctcttttgttgccgtaagactgctaacatgggaaagaagaagaaagagtagcatcataaaggctgaagcagagccctgagagatgagcctctgccagctgcttccagaggaacctgttgtcatgccagtgccttccctctaaaagaagacagcgttgggacctcattgaacatggctccaatgaattcactatgttctgaagacatgcaagatttcatgccaaatatatattcagtgctaaaaaaacaaaatcctgtgttcagtttagaatgttttgatgtagctgagaagctttgcccaacaacaataactgaagctactgtagttcataaagttcacatggctttatagcctttgcaaaacatatctataaatcaattagtttttgaaaataccc

SEQ ID NO: 202 - DNA, 425 bp, Rattus norvegicus
cagtcagaactcagaatggacatgagggcccatgctcagtttcttgggttattgatgctctgctttgcaggagccagatgcgacattcagatgacccagtctccatcctccatgtctgtgtctctgggagacacagtcactattccttgccgggcaagtcaggacgttgggatttatgtaatctggttccagcagaaaccagggaaatctcctaggcgtttgatttatcttgcaacgaccttggcagatggggtcccatcgaggttcagcggcagtaagtctggatcagattattctctcaccatcagcagcctggagtctgaagatgtggcagattatcactgtctacagtataatgagtatccgtacacgtttggacctgggaccaagctggaactgaaaggggctgatgctgcaccaactgt

SEQ ID NO: 203 - DNA, 956 bp, Rattus norvegicus
ggatcctgaaatataggttaagagcataggaagacttaatacaaataaagtgcatggaaaatgaagtcttactcatgagtacgctagaactccagggaacatactctagaagaaagaactgggtcaggcatgttggagaaacttcaagaaagggacgacatgttggagaagcatgtagacttgatgggaagaagaaagacatcaggggatagatgaaagtctgtgaacataggcggttctaacaccaggccactctgattttgtgcagacaagcccacaggctatggctccagcattcggagggcaccacagacgggcattgtggatgagtgttgcttccggagctgtgatctgaggaggctggagatgtactgtgctccgctgaagcctacaaagtcagctcgttccatccgggcccagcgccacactgacatgcccaagactcagaaggtaagctggtgtgggggaagtacgaccatgcttcagtctctgttgtatgtggtgcaggggaggccaatgggagttctctccgatgtctcctaggtgacaggtcaaaaagttccaatcctattaatagggtggcttatgggtccacccttccaatcactctttactataaattatcttttccactcccctggacaatctgatacttggaagatggtggaaaatcagaactcaagttgccctgtgaaaactcaagttgcccaatgaggccaattggccaaacaggctatcaagtcttagctatcaataaaattgtgatcatgatagaatgtactgccacaggtcaccagaatttggtaagttgacatactctaagatgtagaccatgtacaagtggaatgtttgcactaagtaactgttagacaagcattaacatttgtcataattgtagctaatacaattatgattgaaatacaggattgcatcaaaagttgcaaatcctggaattc

SEQ ID NO: 204 - DNA, 495 bp, Rattus norvegicus
agcgctcttctgtccaccggctgcttgtctgtttgtttatctctatgtccaaatttctgctcctwggacccgayrgraagmggggacgccagacctacackcgstaccagackctggarctggagaaggaattccacttcaaccgctacctgacgcggcgccgmsscrtcgagatcgctcacgcgctctgcctcaccgagcgccagatcaagatctggttccagaatcggcgcatgaagtggaagaaagagcataaagatgagagccaggctcccactgcagttccagaagacgcggtgccctccgtttccacggctgctgacaaggccgatgaggaagaggaggaggaagaggaggaggaagaggaggaagaggagtaaagggccaggcacaagaccctggctacacaggacagttggaaaagcgtctttaagaggctcgttgattttagttacgaaaatggggggaaataaagtgtaaaaaaaaaaaaaaaaa

SEQ ID NO: 205 - DNA, 3461 bp, Rattus norvegicus
caccaggaggaggtgggcgagctgctcggtcagattcagggctgcggtgccgcgcaggcgcaggctcaggccgaggctcgggacgccctcaagtgcgacgtgacgtcggcgctgcgggagatccgcgcgcagctcgaaggacacacggtgcagagtacgctgcagtcagaggagtggttccgagtgagattggaccgactctcagaggcagccaaagtgaacacrgatgctatgcgctctgcccaagaggagataactgagtaccggcggcagctgcaggccaggaccacagagttggaggcactgaaaagcaccaaggagtcactggagaggcagcgctctgagctggaggaccgtcatcaggtagacatggcctcctaccaggatgcaattcagcagctggacaatgagctgagaaacaccaaatgggagatggcckcgyrgctccgagagtaccaggacctgctcaacgtcaagatggccctggatmttgagatcgctgcttacagaaaactcctggaaggcgaagagtgtcgrattggctttggacccaktcccttctctcttactgagggactcccaaaaattccctccaygtccactcacataaaagtcaaaagcgaagagaagataaaagtagtagaaaaatcggagaaggaaaccgtcattgtagaggaacagacagaagagatccaggtgacagaagaagtgacrgaagaggaggacaaagaggcccaaggggaggaagaagaagaggcagaagagggaggagaagaagcagcaactacgtctccccctgcagaagaggctgcatctccagaaaaggaaaycaagtctcctgtgaaagaagaggccaagtccccagctgaggccaagtccccagctgaggccaagtcaccagctgaggccaagtccccagctgaggtcaaatctccagctgtggccaagtcmccagctgaagtcaaatctccagctgaggtcaaatctccagctgaggccaagtcaccagctgaggccaagtcaccagctgaggtcaamtctccagctacagtgaagtctccaggtgaggccaagtccccagctgargccaagtcaccagctgaggtcaaatctccagyggaggccaagtcaccagctgaggccaagtctccagcttcagtgaagtccccaggtgaggccaagtcaccagctgaggccaagtcaccagctgaggtcaartctccagctacagtgaagtccccagttgaggccaagtcaccagctgaggtcaaatctccagktacagtgaagtccccagctgaggccmagtcaccagttgaggtcaaawctccagyttcggtgaagtccccaagtgaagccargtcaccwgctggagccargtcaccarctgaggccaagtcaccakttgkgsccaaatmaccagctgagsccargtcaccagctgrrgccaagyctccagctgaggccargtmwccagctgaggccaagtywccagctgrggccaagtytccarctgrggccmarwmaccagctgaggccaagtcacctgttgaggtaaaatctccagagaaggccaagagccccgtgaaggaaggtgcaaaatccctagctgaggccaagtcccctgagaaggccaagtcccctgtgaaggaagagatcaagcctccagctgaggtgaaatcccccgagaaggccaagagccccatgargraggaggccaagtctcctgagaaggccaagactctggatgtgaagtctccagaagccaagmctccagcgaaggaggaagcaaagcgccccgcagacatcagatcccctgagcaggtcaaaagtcctgccaaggaggaggccaagtcccccgagaaggaagagaccaggactgaaaaggtggctcccaagaaggaagaggtgaagtcccctgtggaggaggtaaaagccaaagaacccccaaagaaggtggaggaggagaagacaccagccacaccaaagacagaggtgaaggagagcaagaaagatgaagctcccaaggaggcccagaagcccaaggcggaggagaaggagcctctcacagaaaagcycaaggactctccgggggaagccaagaaggaagaggctaaagagaagaaggcggcggccccagaggaggagacgcccgccaagttgggcgtgaaggaagaggctaaacccaaagagaaggcagaagacgccaaggccaaagaacctagcaaaccctcagagaaggagaaaccgaagaaggaggaggtgccggcagcaccakagaagaaagacaccaaggaggagaagactacggagtccaagaagcstgaggagaaacccaaaatggagccaaggccaaggaggaggacaagggccttccccaagagcctagcaaacccaagacagaaaaggctgaaaagtcctctagcacagaccaaawagacagccagccctcagagaaggccccagaggacaaggctgccaaggkagacaagtaagaggacgagagggacacccagaatagccaaagaaactcaggacggccccggtactcaagggttggtgtaataaagtttatttcttcctttccctccgtaagaagaaacaccacttagatggcgggcccgccctcaccaaacaggatttctattaggattaagttagcaagagaagatcaaccctgagccctgcctycccaacaccaaagccmtycmcaaggkgrkggacaattatgatagcttatmgtagccgaacgkwgatgtmytgctgaacgctccacgtaaaacgcgtgaytaaaaactgccccccctcctttyyaagkaagtgcattcacttyccgtatgtcctaccgacaggtgaccgcagtaatgaatgagcagytagaaatgcattatgcttgaaatgktgtaacctattcccgaatgccttcytgttttccaaaggagcggtcaggcccttgcccggtacacgctyctggaagagctgcagcaggtgaggcagggcgmtggccgctgaaccaggccagggtgtgctgtccactgaagkccactwtcgaytgcttccgygcaatmmaacccaagtgcttctgdrawmmaaaamaaaamaammmammmmamamaamaaaamaaaaamwwmragggggggcccggccccaaatccccctatagtgaggcgaattaaaattaattgccccggggggtcccccggcccaaattgccatatagggggtgactaccaaaaactgcgccggggtttacacctcttgcctggtgaaaacctgtggtaaaccacataaaacgctttcgcttacaaacccttttctcccgggtgggggaataggaaaagagcacccccaatactcttttccaaaaattgggagaactttgtgggaaagggcaatttttacccaaaattttgtataaatcccgcccattttttttaaaacactcccttttaaacccacg

SEQ ID NO: 206 - DNA, 428 bp, Rattus norvegicus
tgtgaagtcaacattgaagatgttgctgcttctgctacttctggggcctggctatgggcttggagctctcgtccaccaatctcccagaaggaccatctgtaagagtagaacttccctgagaatggagtgtcacactgagggtgttcaggccacttctgtagcctggtatcgtcaattgcctcaagagacctttgacctgatagcactttctactgtgaactctgcaatcaaatatgaaaaaaattttaccaaagagaagttttccatcagtcatccaaatttatccttttcatctatgacaattttaaatgcacatcctgatgacggaggcttatatttctgtggtggtaataacaccgggcagctatactttggtgaaggctcaaagctgacagtgctggaggatctgaaaacggtgactccaccca

SEQ ID NO: 207 - DNA, 2251 bp, Rattus norvegicus
aaaggctattgagggcacagcagcgacccgtcctaagtcgacagacgtcctctttaggtattgcaacaggatctgaagtacgcccgaggatctcagaaaccatgcccaagccagacagcgaacgagggactgccttcattcagacccagcagctccatgcagccatggctgacaccttcctggaacacatgtgccgcctggacattgactccgcacccatcacggcccgcaacactgggatcatctgtaccattggccctgcttcccgatctgtggagatgctgaaggagatgattaagtctgggatgaatgtggctcggctgaatttctctcatggaacccatgagtaccatgcagagactatcaagaatgtccgtgcagccacagaaagctttgcatctgatcccattctctaccgaccygttgcggtggctctggatrcaaagggacctgagatccggactggactcatcaagggcagcggcaccgcagaggtggagctgaagaagggagccacactgaagatcaccctggacaacgcctacatggagaagtgcgacgagaacatcctgtggctggactataagaacatctgcaaggtggtggaggtgggcagcaagatctacgtggacgatgggctcatctccctgcaggtgaaggagaaaggtgctgactacctggtgacagaagtggaaaatggtggctccttgggcagcaagaagggcgtgaacctgcctggtgctgctgtggacctccctgctgtgtcagaaaaggacatccaggacctgaagtttggggtggagcaggacgtggacatggtgtttgcgtctttcatccgcaaggcggctgacgtgcatgaggttaggaaggtcctgggagagaagggcaagaacatcaagatcatcagcaaaatcgagaaccatgaaggtgtccgcaggtttgatgagattttggaggccagcgatggaatcatggtagctcgtggtgacctgggcattgagattccggcagagaaggtcttcctagctcagaagatgatgattggacgatgcaaccgagctgggaagccggtcatctgtgccwcccagatgctggagagcatgatcaagaagccacgccccacccgtgctgaaggcagtgacgtggccaatgcagtcctagatggagctgactgcatcatgctgtccggagaaacagccaaaggggactaccctctggaggctgttcgcatgcagcacctgattgcccgagaggcagaggctgccatctaccacttgcagttattcgaggaactccgccgcctggcgcccattaccagcgaccccacagaasstgccgccgtgggtgccgtggaggcctccttcaagtgctgcagtggggccattatcgtgctcaccaagtctggcaggagtgctcaccaagtggcccggtaccgcccaagggctcctatcattgctgtgacacgcaatccccagacagcccgccaggcccatctgtaccgtggcatcttccctgtgctgtgtaaggatgccgtactggatgcctgggctgaggacgttgatcttsgtgtbaacttgvccatgaatgtkgsmaaggcmcsagsyttytycardamggkagatgtggtcattgtsstgachgkrtsgcgccytggywctgkmttcaccaacaccatgmgtgtagtgchtgtastcwygatgrycytctggagcyycthttctagmmcctgtscyttyccctcccctatmctwtmcattaggccagcaacgcttgtagtgctcactctgggccatagtgtggcgctggtgggctgkgacaccaggraaaattaatgcctctrwaacatgcaatagagmccagctattwttyakggsctacytgagccaggggtgraggargratgcasgahtkgaaaccctctgactttatcacagaaggscrgcakyatytytgkrktctttgctyctgkagaaagttktccagagaattcscagccctrscctggartmaggagacagcaagaacwgaggytgggggcccagggctcccatgtagatgacttytggccctgkccctgacytgctttcccaacagctttggcctcycymctcctygtgcactccactkctgtcmctgcagayrytccactctccacctygtaytctgcagcgtctccaggcctgttgctatagtgcccacctgaatgtcaataaacagcagckgaagaaaaaaaaaaaaaggctattgaggg

SEQ ID NO: 208 - DNA, 378 bp, Rattus norvegicus
ttgtgtggaattgtgagcggataacaatttcacacaggaaacagctatgaccatgattacgaattcccggggatccgtcgacctgcagccaagcttggcactggccgtcgttttacaacgtcgtgactgggaaaaccctggcgttacccaacttaatcgccttgcagcacatccccctttcgccagctggcgtaatagcgaagaggcccgcaccgatcgcccttcccaacagttgcgcagcctgaatggcgaatggcgctttgcctggtttccggcaccagaagcggtgccggaaagctggctggagtgcgatcttcctgaggccgatactgtcgtcgtcccctcaaactggcagatgcacggttacgatgcgcccat

SEQ ID NO: 209 - DNA, 526 bp, Rattus norvegicus
tccaaactcatcaatgtatcttatcatgtctggatccccaggaagctcctctgtgtcctcataaaccctaacctcctctacttgagaggacattccaatcataggctgcccatccaccctctctgtcctcctgttaattaggtcacttaacaaaaaggaaattgggtaggggtttttcacagaccgctttctaagggtaattttaaaatatctgggaagtcccttccactgctgtgttccagaagtgttggtaaacagcccacaaatgtcaacagcagaaacatacaagctgtcagctttgcacaaggacagggaagcctggtatgctgcaatctgtgggattgcaaagatcacaaagtttctactgttggtttatatcaacaaccaggaatggctgtagatttgtataggccagatgattactatgatattttatttcctggagtacaaacctttgttcacagtgttcagtatcttgaccccagacattggggtccaacactttttaatgccatttctcaagctt

SEQ ID NO: 210 - DNA, 3994 bp, Rattus norvegicus
  misc_feature (3456)..(3456): n is a, c, g, or t
  misc_feature (3468)..(3468): n is a, c, g, or t
  misc_feature (3470)..(3470): n is a, c, g, or t
  misc_feature (3495)..(3495): n is a, c, g, or t
agacgcttctgggtcgcgttagggagacgctctggtccggttgtgcgtgagaggaggagagcccagcgccacagcgacccggagagggatggcggccaccgggaccgcggcmgctgcggccaccggcaarcttcktgtcctgctgctgctcgggctcacggcacccgcagcggctctggctggctatatcgaggctctcgcagccaatgctggaacaggctttgcggttgctgaacctcagattgcsatgttctgtgggaagctgaacatgcatgtgaacattcagactgggaagtgggagcctgayccaaccggcaccaagagctgcctgggaacaaaggaggaagttcttcagtactgccaggagatatatccagagctgcagatcacaaatgtgatggaagcmmwcswgccrgtcaatattgatagttggtgccgaagggacaaaaaacagtgcaggagtcacattgttataccattcaagtgtcttgtgggtgaatttgtwagtgatgttctgctagttccagaaaactgccagtttttccaccaagagcggatggaggtgtgtgagaagcatcagcggtggsacacagtcgtcaaggaggcatgtctgactgaggggatgaccttatatagctatggcatgctgctgccctgtggggtagaccagttccatggcactgagtatgtgtgctgccctcagacaaaggttgttgactctgactccactatgtccaaagaagaggaggaagaagaggaagaggatgaagaagaagactatgctcttgataaaagtgaatttcctaccgaagcagatctggaagacttcacagaagcagctgcagatgaggacgaggatgaggaggaggaggaggaggaggaaggggaggaagtggtasamgassgtgattactactatgactcctttaaaggagatgattacaatgaggagaacccaactgaacccagcagcgatggcaccatctcagacaaggagattgctcacgatgttaaagctgtctgctcccaggaggccatgacggggccctgccgggccgtgatgcctcgttggtacttcgacctctccaagggaaagtgcgtacgctttatatatggcggctgcggcggcaacaggaacaattttgagtctgaggattattgtatggctgtgtgtaaaacgatgattcccccgactcccctgccaaccaatgatgtggacgtgtattttgagacgtcggctgatgacaatgagcacgcccgctttcagaaggctaaggagcagttggaaattcggcatcgcagccgaatggacagggtaaaaaaggagtgggaagaagcagaacttcaagccaagaacctccccaaggcagagcgacagaccctcattcagcatttccaagctatggttaaagccttagagaaggaagcagccagtgagaagcagcagcttgtggagacccatttggcccgagtagaagcaatgctgaatgaccgtcggcgcatagctctggaaaactacctggctgccctgcagtctgaccctcctcggccacatcgcattcttcaagctcttcgtcgttacgtccgtgctgagaacaaagatcgcmtscrcmccattcgtcattaccaacatgtgttggctgwtgacccagaaaagrctgcgcagatgaaatcccagstgatgacwcmcstccatgtcaytgaagaaagaaggaaccaaagtctytmtmtrctstayaaagtrccttatgtggctcaagagattcaggaggaaattgatgagctcmttcaggaacagcgagcagatatggrmywskttacctcctccatmtcagagaaccctstggatgtccgggtgakctctgaggaaagtgaggagatcccrccgtwccaccctttccatcccttcccatccttgtctgagaacgaagacactcagccggagttgtaccacccaatgaaaaaarrawmwrraawggcagagcaagatgggggcctgattggtgcagaagaaaaggtgatcaacagtaagaataaaatggatgaaaatatggtcattgacgagactctggatgttaaggaaatgattttcaatgctgagagagttgggggtctggaggaagagccggactctgtggggcctctacgggaggacttcagtttgagcagcagtgcccttattggcttgcwsgwsrtcgcggtggccattgckrcaskcaksgtcatcagcctggtgatgctgaggaagaggcaatacggcaccatcagccatggcattgtggaggttsatccaatgctcaccccagaagagcgtcacttgaacaagatgcagaaccacggctatgaaaacccaacctacaaatacctggagcagatgcagatttaaggacagcagcgtgtgcgacaccctggctgaggctgctgcaggtgggctggaagagcctcagcgtttgtgcttgactgctgaccaccagcggtgccagaggcctcatcctacatcctgctmtcctggattgttaagactataaagtactactgtaggattgcaatttccattcttttaaatgggtttaaaagatgttaatataacaatatatgatatataaaccttaagtgaaaaaaagatctattgcmgmtawmwrawrrawrwarwwttctttttttaaattagaaatgccacttytattgtattgtctcacacatgctctatataaawrrmawwwvwwrawttwwmaawrawaramwawatacacaggctgttcccgttatgtaagtctgttctttaggctcgtttgctgggctggttttgtcgtcatttgttttaatgtataaaggcagtattsscmykwkcaggttgctgagaaatgtaagtggaactsamgwrsattgtatgcagttactgactgttttaggcatagtctccttggaagcctagwgcttccagtgccsggtgtccagtgcctgkcaccaaagcaagggctargtcaccttgagctagctggatgcaaactagatccactgtgytttccttcaaatccagttcttccacagsamccagcccatagttgttctgtgttctwcyacagctgtttacggtagsctcctagscactctcctcagcaagtgcatccaagagtgsamcacccccttctttggackwhtycgkcmcrwgsactgaccctmtgcttgccttsgtacctcayttmmthcrmckywytwyagvsmmtttgmbstcsmskcmragaatwcsgmwmkasrcatggctaargacccaggrgacttcacgggaggcctcattaggtgaaaggacgatgttmtgggctgtacatgaaattgratctgtagacactgtktttccttcactgaydtgkaatgtcacrcagctggagktgatgccacarmccktagwgctytsttgmtgwtdkgtwtttcagggttbtggtaacctgcdamwrndddwddddwrrndnddkkywggthhtktttgtawtkwdnkgtswkttccctcccmyycyccmccatgcctbttcccaytatgcacasatggaaactttacctacaaactccttcgtatgatctgtggagaatgtacagaacttaytacatcaataaaacactttaacttcmmmvrmaaaaaaamaaaaaaamaaactcgaggggggggcccggtaaccaatttcgcctatagtgagtcgtatttcacttcactgggcgcgcgtcttacaacgtcgtgactgtgaaacccctgggttccccacttaatcgcttggcagcaattcccttttggcagctgggtataacaagagccgaccgatcggctccacgtggcccctaagggcatggacggacgggtattggtaaatccgtattggcaccgccctttacacagcgacggaccctataaaacccccgtagtgccctccagaccaaagggccacggactgggggaaaccatgagggaccacagtgcggagaatgtccttccccggtatgg

SEQ ID NO: 211 - DNA, 767 bp, Rattus norvegicus
aaaaatgaatacagttaaatgtattatacataattttggaaccaaagaggccagcggatcagttttaatttttattagacggtgaggccatcttctatgaggtagatgttctaaacagccctttgagtggcctgccagcgattcagggtataaatgattttttttttatwcagttgatgtgtcttctctgtccttatacacccagaaggtrgagtaaaataaatgaytgktggagtggaggtatgtactgtaagtccttcatctttagtttatttaataaagccctccttaggttctgtttcataataacttaaamccaamcaattccccccacagactggctgtcttaagtatttcacattcgtgtacagtttaagacaataaaagrtggagtgccamrrrmwwwmwrmmwwrwwrawrwctggggcaggggaggaggggtttggtccaggtgtccagttccaatgccagaagtccccacagcctgttccctatattctcagagcccttgcctgacacatatgtcacaaagaagatggcagaagaccagcaaaggcaattagcaaattagtgaattacaaatttgtttaccgttccagtccccaactagttatgatctgttgatgttccaaagctggatctcttggcttttcaaaagtaccgtggtacctggtggcaacctcgatgacctgagtttgagcccagggtcgcacgcacgcacgcacgcacgcacgcacgcacgcacgcacgcacgcacgcacgcatgc

SEQ ID NO: 212 - DNA, 895 bp, Rattus norvegicus
gttcataattaccctgtgctaaacaagactgtttcactgtctttcctgtcactcaactctcctctgccaccacctgaaacaaaacacttgagtgggaagtatacatgatttattttaagttgcttgtgagacttttccctaaaacaacaaatgttgttaagtcatcaaattgcctcctctttaatcttagttgtatacattgtcccttcagctataaggagaatgccatgagattatccagaatccaccatgatcagccagtgaagcccctggaccgagccgtcttctggatcgagtatgtcatgcgtcacaaaggagccaagcacctccgctcaactctgcatgaccttagctggttccagtaccactctctggatgtcattgggttcctattgctctgtgtggtaggtgtggtattcatcatcacaaaattctgcctcttttgttgccgtaagactgctaacatgggaaagaagaagaaagagtagcatcataaaggctgaagcagagccctgagagatgagcctctgccagctgcttccagcaggaacctgttgtcatgccagtgccttccctctaaaagaagacagcgttgggacctcattgaacatggctccaatgaattcactatgttctgaagacatgcaagatttcatgccaaatatatattcagtgctaaaaaaacaaaatcctgtgttcagtttagaatgttttgatgtagctgagaagctttgcccaacaacaataactgaagctactgtagttcataaagttcacatggctttatagcctttgcaaaacatatctataaatcaattactttttgaaaatacccagcctgctttgtcttcatttagtagactatttttctctccttctttcttttttcttcttt

SEQ ID NO: 213 - DNA, 363 bp, Rattus norvegicus
cctccttgcccaggagagaactgsgaggacaagagcccaccgggcccggcatccaagagggtgcgcacggcgtacacgagtgctcagctggtagagctggagaaggagttccacttcaaccgctacctgtgccggcsscgccgcgtggagatggctaacctgctgaacctcaccgaacgccagatcaagatctggttccagaaccgtcgcatgaagtacaagaaggaccagaaggccaagggcatcctgcattctcccgcaggccagtccccggagcgcacgccacctcttggaggagcggcggccacgtgcctactccggccagctgccgccgtgccggcctggcctacgacgcacccttcg

SEQ ID NO: 214 - DNA, 1358 bp, Rattus norvegicus
aagcttccgggccgcactccccgcccaccgcgcccgcagcccgcccgccctgccgccgcccccttggccaccgagtcccgccggcgcccggggcattgttttttggagtcctgcgggtggggagggtgcggacagggccggccggcgcagtgcgggtgggggcggaagcgtgggcgcgcgcgtggctcagtgtgcgcgcgggggccggcgcgggtggaggcgcgggggcggtgcctcctgggcccggctccccacgcccgcgctccgtccgcacgtccctgcgatcccgaactccggctcttggcgactgccgagtcgggcccggccctcggcgcgccgggactcggctgtagccgcttggagtgtgcgcgcgggcacgtgtgcgcggccccgagagcgcgcgcgtagagcccccagtgtgtggcggcggcggcgcggtgaggctgaggttcttgtttaccagcattaactcgctgagcggaaaaaaaggaggagggggaaccgaggaggagcgagcgcaccgggcgaactcgagagaggcgagcgacagggaagccgccagcgagcctatcccgcgcgcccggcgctcgcagaccctcggccccgctccttggaccctccacgcctctcccgtgcctgcaagagctccacggcacgcggcgtgctcggctttgaccttcagcgagccggagcccccgcgcacggagtcggcggcgggcgggggccgacgcggggcggcgggassgctgagctgcgcggccgccgctttgtgtgtcctggatttggatttgggaaggagctcgcggcggcggcgctgagggaggaggcggcggcgagcggagcccagaggaggaggaggagccggaggagggggaaccgctcattcatttccactcagcatttctgcccctcgccggcctcgcccgcgcccgggacttcggaccatctcgccaactgcgtcgggctctcccgccgcgtaggctcgggtggtcgtcccctccggatcgggggcgtttgtccccgcctgcggcatttgggctttgctcctctttctgtacattttcctcccctcttctgcatctctgggtttgcaaatggaggccgacgacaccgacagcccgccccggcgcgccccggcttccctactccgccgccccgtgcgcgctgctgccggcgctgaggggccgcccgcgcacctcctgtccagcgtttccgaggatcttcgctcttgtttttggacgagagtgaggatgagttgaagacttttttcttttttttttctttttttttcttttctttctttctttctttttttttttttttgagaaaagggaatttcgtcccaaataaaaggaatg

SEQ ID NO: 215 - DNA, 2539 bp, Rattus norvegicus
  misc_feature (4)..(4): n is a, c, g, or t
  misc_feature (332)..(332): n is a, c, g, or t
  misc_feature (383)..(383): n is a, c, g, or t
  misc_feature (401)..(401): n is a, c, g, or t
  misc_feature (425)..(425): n is a, c, g, or t
  misc_feature (431)..(431): n is a, c, g, or t
  misc_feature (452)..(452): n is a, c, g, or t
  misc_feature (461)..(461): n is a, c, g, or t
  misc_feature (1445)..(1445): n is a, c, g, or t
  misc_feature (2086)..(2086): n is a, c, g, or t
  misc_feature (2089)..(2089): n is a, c, g, or t
tccntccggtgtgtgtgccgccgccgctgttgctgctgctgccgccgctgctgctgctcgcmccgtcgttacaccaacccaaggctctttgtttcctctcttggatctgttgagtttctttgttgaagaasccagcatgggtgcacagttyyccaagaccgcagcgaagggagaakccsccgytgagaggcccggggaggcggctgtggcytcgtcgcctyccaaagcaaatgggcaggagaatgsccacgtaaaagtgaacggggacgbktcgcccgccgccgccgagccgkgcgccaaggaggagbtgcagvccaacgsmagcgccccgncyvcvgmmaagrakgagshwgsrakygbbssykmsscgrscsckgcsrcgnscgayaaggakgvkgcrnmsgyggcccccgasccsgkcdcyncmwcsncbgasamsswrdytgcgsagnccgmsycmnccrmkyccggctccccywmsgcggagrmcgrggscgcgtccgyctcbhscacgtmgwccyccaaggcggaggacgggvccgybccgtctcccmgcagcgagaccccgraaaaaaaaaaraarmrmttttccttcaagaagtcmttcaagytgagcggcttctcmttcaagaagagcamgaargagkccggcgagggcgctgaggcggaaggcgcgaccgcygacggcgmcaaggwcgagrccgcakctgcagccggcggcgwygcggymrcggymccgggggagcakgcggrmggggcgggcgccgagggcgcggagggcggagagtcycgggaggccgakgcggccgakccggagcagccggagcagcctgagcagyccgcggcggawgagccaakggccgabgakccgtckgaggccgtgggggagaaggscgaggagcccgcgccgggcgccaccgyasatgacgcgscckcsgcyscggggcccgagyaggrggcgsscgcsgbcrccgacgagcccgcggygtccgcagctccctccgcgtcaycggagccgcagcccgagtgcastccggaggcgccccccgcgccggtggccgagtaagctccgggcgccctcttgtaattcaagaacttttccccccaagtttgtttgttggaswsgwgscaggtacyggytttggmgaacttgtctacawccagggattgattttaaagattttttttttaatyttacatttttttttmrakcascaaattttgttttcttttaaagcccyctyycccacagatcycwtbtcmaatcattgttaccaccattccgacaggycgakgacggtttakayagcttcctctgccttctwttgtttttgtwtttgtttttwttttcttwacttttaswyhkyttyhtytkscwwcwkkrttwwtgktttttgywtwytttkyatytttattwamwmwwtktwwwytttyttwgbsmrwkntryggasgkmyccrtmtdtgaaggaratggbtgggtcaaaaaggaatmtcaawtgamgtgwtaggggccwctwtgggaaattgaaacaktgcataacattgccaarmtartwtgccastaaaaacgacgskgtaaaggcttaggggkttccttctttcctttttttttttttttarararagttatkacggkgtatwttgkgaggcaggttkacarcacywchcgtkttgratargaaggaammagaaargamttmaaaacvccaatwccywkatttwaammwhrwrmhvahrrtckwmkgmgttcakctaaaccataggaacttcctgcttatctcatgttagctgtaccagtcagtaattatgtagaactacaagttgtataggctttattgtttattgctggtttatgaccttaataaagtgtaattatgtattammarmarrrwrtttttaactgtgattattgtataaaaacaaatcttgatatccttyagmrgcacrwgragtttgcaagtctccamcctgcccatctttttgtaaaactgcagtcatcttggaccttykraacrmrrattttaaacccaaccaagctgtgatacgtggaatggttactgtttatactgtggtahgbyhbbhdbndsndtyytywwwtkywkdktttyytyygatwacagcagacaatgctttcttttccagttgtctttgrgaataaaggaaaaacaaatcttcagatgcagtggttttgcgtagcacctcgtctctcgtgtwttgtaaatactggrggatctttgrccaattkgacatasagctggaatgtaacgttgstwacaaacattgctattcaactcctgcttaaggtgttctaattttctgtgrgcmcmctaaaagcaaaaaataaatgtgaataaratgtraaaaraaararaaaraaaaaaraaaaaaaaaaaasmawwwrmrrmcgcaagcttattccctttagtgagggttaattttagcttggaactggccgtcgttttacaacgtcgtgactgggaaaaccctggcgttacccaacttaatcgccttgcagcacatccccctttcgccagctgg

SEQ ID NO: 216 - DNA, 1814 bp, Rattus norvegicus
cagtgcaagcgcgcaggcgcgaccggggggggggggcgggctgcgaggagaakctcagcgatcctcagttactgmcgcatcctctgccggtcgtcatggctgcctacaagctggtgctgatccggmatggcgagagcgcctggaacctggagaaccgcttcagcggctggtacgatgccgacctgagcccarcgggccacgasgaggcgaagcgcggcgggcaggcgttgcgagatgctggctatgagtttgacatckkcttcacctctgtgcagaagagrgcaatccgcaccctctggacagtcctggatgccattgmccagatgtggttgccagtggtmmrgacctggcgtctcaatgagcgacactatgggggwctaacaggtctcaakaaagcagagactgctgctaagcatggtgaggcacaggtaaagatctggagacgatcttacgatgtcccgccacctscaatggagcctgatcatcccttctacagcaacatcagcaaggaccgcaggtacgcagaccttactgaggaccagctaccctcctgtgagagcctgaaggatactattgccagggcactgcccttctggaatgaagaaattgtyccccagatcaaggaggggaaargggtcttgattsctgcccatggcaacagcctacggggcattgtcaagcatctggagggtctgtcagaagaggccatcatggagctgaacctgccaactggyatmcccatcgtctatgaactggacaagaacttgaagcccatcaagcccatgcagtyyctgggagatgargagacsgtgcgtaaagccatggaagctgtggctgctcagggcaaggtgaagaagtgaaggcgaggaggcggactcctrccctgaacaccctctctccctgcttgttcctgcctcctgcaccctcccctgcacctgccacactgactacatctttaggatcttcagtttaagttgtagctgcagatagggacctgtggctcccattctccttttagtattttatccccggcacccactcccttcatagaatctagtcagaagaagacctctggggtgcaggctcttggtccatatccagggacggctccmtgtwmcaggaragttgagagatagtaatwatakyyyyctwagctctttgkkdactaagggtctgcttaggaagaaggtcgggagggactgtatgtggtatgaccartgaggagaagctgtggtccagttttgtccytggaacctgtcstgcactcttcccacaattaggtaactgggggcctagtcatyccagtgvagagtraaakkamcctcatgccgatwaaaagaccbkacwttctctctgaccywamaggmsvtsstggccstaraaggttsrgaacagtcwtgtcaagtctatgtgttacatttatttttvcaaaartaaagkatmtwwacatatatcvscvcaaaagcmmcragsttgctagtgscarytragmgtcctaagtgstcmccmgaaaaaaagccattcctcakatcaaatgggataamctccttgtacctcwtgctgwgyttsrdycschwtsccttkwttygyaragstgaagccccttgatcatgyccaaggytttgwctttcactgtmtgaatcatgtyccagctgcttgaccctactgtgtgggttcagaactcgyttgggcataacaactaagtctctttccagaycmgtmtaataaaggagtgwtgtgchhwwhwaaaaaaaaaaaaaaaarrmaastykwgssgssgcmmgstwcaaattcmctykagtragggttaattt

SEQ ID NO: 217 - DNA, 1002 bp, Rattus norvegicus
cacgaggatcctgagggagccgcaggagcagccgccgccaccaccgcgactacctcccgagtgtctgcaacctcaggccagcccgccttcctgccagggccttggccgacggattccggccgccctcccgccgcgtccgccctccgcttcctcgtcctgacgtccccctcccgtccggaaagctgcccagccaccagcaaccccccaktgccaccatggcaactrcaccgtacaactactcttacatctttaagtatattattatcggggatatgggagtaggaaaatcttgcttgcttcatcaatttacagaaaaaaagtttatggctgattgtcctcacacaattggtswygartttggtacaagawtaattgaagkwagwggccawaaaatcaaactgcagatttgggatacagcasgacagkagaggttcagagctgttacacggagctactatagaggagctgcargtgcgctcatggtgtatgacatcaccagaagaagtacatataaccacttaagcagctggttgacagatgcawggaacctcaccaacccaaacactgtaataattctcataggaaataaagcagatttsgaagcacagagagatsttacctatgargragccaaacagtttgctgaagaaaacggcttawtgttccttkragcaagtgcaaaaacsggagagaatgtagaagatgcttttcttgaggctkscaagaaaatctatcagaacattcaggatggaagcctggatctraatgctgccgarkctggtgtacaacacaaamcctcagccccgcagggaggacggctwaccagtgaaccccaaccccagagagaaggctgtggctgctagtgacctcttkgctctggtccctcattttgacctttcacctcttgyctgttggaagcagtacttttwactgccttcttgtcttctstacatcttactgggktwwmatyammaaaaraaaammmaaaaaaaaaaaaaaaaa

SEQ ID NO: 218 - DNA, 4777 bp, Rattus norvegicus
gaattccggccttttgtggcagcaaattatagattgattgaggagagttcaggggctgagggctcagacctacccttccctgcccctgtccaccatgaggagaaaccagctgcccataccagtctttcttttactgctcctgcttcttcccagagatgccaccgcagctactggaaaaccacgatatgtggtgctggtcccctcagagctctatgcaggagtccctgaaaaggtctgtgtccacctcaaccacctgaacgagactgtgacactcaacgtaactctagagtatggagtacagtactcaaacctcctcatagaccaggctgtggataaggactcctcctactgcagctctttcacgatctcaaggccgctttcaccctcggctctcattgctgtggagataaaaggaccaacgcaccacttcataaagaagaagtcaatgtggataacaaaagctgagagcccagtctttgtccagacagacaaacccatatacaaacctggacagacagtgaaattccgagttgtctctgtggayatcagttttcgcccggttaatgaaacgttccccgtcgtttatattgagaatcccaagaggaacagaatctttcaatggcaaaatgtcgatctaccaggaggactgcaccagctctctttcccactgtctgttgagccagctctaggcatctacaaggttgtagtgcagaaggactcagggaagaaaatagaacattcctttgaggtgaaggaatatgttttacccaaatttgaggtgcaagtaaaaatgcccaagacgatggctttcctggaagaggaacttgttgtaactgcttgtggcttatacacatacggaaagcctgttcctggtctggtgacaatgaaagtatgcagaaaatatacacagtcctactccaactgccatggccaacactcgaaaagtatctgtgaagaattcagcaaacaggcagatgaaaaaggatgtttcagacaagttgtaaaaaccaaagtgttccagcccagacagaaaggctatgacatgaagatagaggtggaagccaagatcaaagaggacggaacaggaatagaactaactggtactggatcatgtgaaatcgcaaataccttaagcaaactgaaatttactaaagcgaatacattttacaggcctgggctgcctttctttggacaggttcttcttgttgatgagaagggtcaaccaatccccaacaaaaatctaactgtccaagtgaattcagttaggtcccagttcacttttactaccgatgagcatggcttggccaacattctcatcgacaccaccaacttcacgttttcgtttatgggaatcagggtcatctacaagcagaacaacatctgctttgataactggtgggttgatgaatatcacacacaggcagatcattctgcagctcgcatcttttccccaagccggagttatattcaacttgaacttgttcttggtactttggcttgtgggcaaactcaggagattcggatacacttcctcttgaatgaagatgccctgaaagatgcaaaagacttaaccttttactacctgatcaaagcaaggggaagcatctttaactcaggaagccacgtgttwccgcttgaacaaggaaaagtgaaaggagtagtttccttcccaattcgagtggagccaggcatggctcctgtggctaagctgattgtctacactattttacctaatgaagaacttattgctgatgttcagaaattcgacattgaaaagtgttttgccaatacggtgaatttgagtttcccatcagcacagagcctgccagcctctgacacccacctgacggtcaaagccacacctctgtccctgtgtgccctcactgcggtcgaccagagtgtgctgctactgaagcccgaagccaagctctctcctcaatcaatctataatttgctgccacaaaaggctgagcagggggcttacttaggacccctaccgtacaaaggcggtgagaactgcatcaaagcagaagacatcactcacaacggcatcgtgtacacaccaaagcaggatctgaacgacaatgacgcatacagcgttttccagtccataggattaaaaatttttaccaacaccagagtccacaaaccacgctattgtccaatgtatcaagcctatccgcctttgccctacgtaggagagcctcaagccttagctatgtctgcaatcccaggagccggctacagatcaagcaacattaggaccagctcaatgatgatgatgggcgcatcagaagtagctcaggaggtagaagtaagagagacagtgcggaagtacttcccggaaacctggatctgggacatggtgccgctggacttatccggtgacggtgagttgccggtaaaggtccctgacaccatcactgagtggaaggccagtgcattctgcttgtctggaactactggccttggtctctcctccaccatctcccataaagtcttccagcccttcttcctggagctcactctcccctactctgtggttcgaggcgaagcatttatcctcaaagctaccgtactcaactacatgcctcactgcattcggatccatgtgagcctagagatgtctcctgatttcctggcagtccctgtggggagccatgaagattctcattgcatctgtggaaatgaaagaaaaaccgtgtcctgggctgtgaccccaaagtcgctgggggaggtgaacttcacagctactgcagaagctttgcagtctccagaactgtgtggcaataaggtggcagaagtgccagcccttgtacagaaggacactgtagtgaagcccgtaatagtcgagcctgaaggaattgagaaggaacaaacgtacaacacactgttatgcccacaagatgctgagttacaggaaaattggacactggatcttccagccaatgtggttgaaggatctgccagggctacacagtccgttttgggcgatatactaggctctgcgatgcaaaacctccagaatcttctccagatgccctatggctgtggggaacaaaacatggtcctcttcgtccctaacatctacgttctggagtatctcaatgagacacagcagctgacagaggcgatcaagtccaaggccattagctacctcatcagcgggtaccagaggcagctgaactatcagcacagtgacggttcatacagcacattcggggaccgcggtatgaggcacagtcagggaaacacttggctcactgcatttgtgctcaaggccttcgctcaagctcagtcatacatctatatagaaaagacacacatcacaaatgctttcaattggctctcgatgaaacaaagggagaacggttgtttccaacagtctggatccctgctcaacaatgcgatgaagggtggtgtggatgatgaagtgacactctctgcctatatcaccattgctctgctggagatgcccctgcctgtcactcacagtgttgttcgtaatgctctattctgcctggaaacggcctgggcctccatctcaaacagccaagaaagtcatgtctacacaaaagcactgctggcctatgcctttgccctggcaggaaacagagccaagcgaagcgaggtgcttgaatccctaaacaaagacgctgtgaatgaggaggaatcagtgcactggcaacgtcctaagaatgtcgaggaaaatgtccgggaaatgaggtccttctcttataaaccgcgggccccttctgctgaagtggagatgacagcttacgtgcttctcgcctacctcacctctgcatcttcccggcctacgcgagacctttcttcatcggacctgactacagcatccaagattgtgaagtggatcagcaaacaacaaaactcccatggggggttctcctccactcaggatacagtggtggctcttcaagccctctccaaatatggagcagccacttttacgaaaagtaataaagaagtgtcgswcassatcgagtcttcagggaccgtctctgggactctccatgttaacaatggcaatcgcctgctgctgcaggaagtcaggctggcagatctgcccggaaattacatcaccaaagtgtcagggtcaggatgtgtgtacctccagacatctctaaagtacaacatccttccggaggcagaaggagaagcgcccttcactctgaaggtcaacactctccccttaaactttgataaggcagaacatcacagaaagttccagatccacatcaacgtaagctacaktggagaacgacccaactccaacatggtcattgttgatgtgaagatggtgtcaggcttcatacctgtgaagccatccgtgaaaaagctccaagaccagtctaacattcagaggactgaagtgaacaccaaccacgttctaatctacattgaaaagytaaccaatcaaaccatgggtttytccttygcggtggaacaagacattccagtaaagaayttaaaaccagccccmgtaaaagtytacgattattwtgrgacagwtgaattcgccattgaagaatacagtgcccctttcagttytgactytgaacaaggaaatgcttaaaaatrggaacctwtagatttcctcagaaagactccyccamasgtgaagaaccaagacagcaagrtaaatggaaaggaattaaaaacccataaaatttatatgttgaataaagttacgacatttacaaaaaaaaaaaaaaaaaaaaaaaaaagtgtggcgtccgcaagcttattgcccttt

SEQ ID NO: 219 - DNA, 2578 bp, Rattus norvegicus
atggcgaaggctgtgtgatgctcatagggagaagaagatgttgatgtattgattgatgaccagctcccggtataggctgaaggctcaggctgcggggtggggccggtgtggcggggcgccaccgtctcgccctgattcgtgcggggattggacggctgcggcttccttgcctctaaccaatcaccgggctgaacttcctggaggttttggtgcgctccagcgtcgcttgggaggtcggcgagtgcttcgctgtggtgggtgtctgcaggcctccctcggcaccttaccatgaagctccggaaagcttggctgttggtcctgctcttggcgctgacacagctgctggctgctgcgagcgccgaagatgcgcacgaagatgcttcagattcagaaaatcccattgaggatgacgacgaggaggaggaagatgaagaagatgaagatgacttggaagttaaggaagaaaatggtgtttgggtcctaaacgatgaaaacttcgataactttgtggctgacaaagatacagtgctcctggagttctatgcaccgtggtgtggacactgcaagcaatttgctccagaatatgagaaaattgccagtactttgaaggataatgatcctcccattgctgttgcaaagattgacgcgacctcagcatccatgttggccagcaaattcgatgtgagtggctaccccaccatcaagatcctgaagaagggacaggctgttgactatgacggctccaggacccaggaagaaattgttgccaaagtcagagaagtttcccagcctgattggacacctccacctgaagtcactcttacattgactaaagagaactttgacgatgttgtaaataatgcagacatcattttggtggagttctatgccccatggtgcggacactgcaagaaacttgcccctgagtatgagaaggctgccaaggasswsagcaagcgctctcccccaattcccttagccaaagttgatgccaccgaacagacagacctggctaagaggtttgatgtctctggctaccccactttgaaaatattccgcaaaggaaggccttttgactacaatggtccacgagagaaatatggaattgttgactacatggttgagcagtctggacctccttccaaggagattctgaccctgaagcaggtccaggagtttctgaaggatggagatgatgtagtcatccttggagtctttcagggagtcggwgacccaggctacttgcagtatcaggatgctgctaacaccctgagagaagattacaaatttcaccacactttcagcactgaaatagctaagttcctgaaagtctccctggggaaactggtgctgatgcagcctgaraagttccagtccaagtatgagcccaggatgcatgtgatggatgttcagggctccacagaggcatcagccattaaggactatgtggtgaaacatgacttgcccctagtgggccacaggaagacttctaacgatgctaagcggtacagcaagcgccccctggtggttgtatactacagcgtggacttcagctttgattacagaactgctactcagttttggcgtaacaaagtcctagaggtggccaaggacttccctgagtacacattcgccattgctgatgaagaagactatgccacagaggtgaaggacctgggactgagtgagagtggagaggacgtcaatgcagccatcctagatgagagtgggaagaagtttgccatggagccagaggagtttgattcagatgctctccgagaatttgtcatggctttcaaaaaaggaaaactaaagccagttatcaaatcacagccagttcccaagaacaacaagggaccagtcagggtggtagtggggaagacctttgatgccattgtgatggaccccaaaaaggacgtcctcattgaattctatgcaccgtggtgtgggcactgmrrgcagctggagcctgtctacaccagcctaggcaagaagtacaagggccagaaggacttggtcatcgccaagatggatgctactgccaatgacatcaccaacgaccgatacaagswsgagggcttccccaccatctattttgcccccagtggggacaaaaagaacccaattaagtttgagggtggcaacagagatytggagcatttgagcaagtttatcgatgaacatgccacaaagaggagcaggmccaaggaagagctttaaggcctggctgtgtgcasaaggtggagggatcagacactgtagtggacagctttggccmccaagcaagcaagccgtcaytgaatggcaggatcttgaccctttttttgttatattttattaatgccacctcatgctctgatactgatagcatgatgacttgatagtttagatcmgatttttatggaggatacatctatttttmtcattttgggtcttttttttaactayttgctttaatatttcttcaaacaagtaagttttggatcttctgyttaagaatctttttttttttttttwatttaaagtttaaaagtctttgccaaaaaaaaaaaaaaaammgaaaaaaaaaaaaaaaaaa

SEQ ID NO: 220 - DNA, 2648 bp, Rattus norvegicus
catcaataacgaggaccccaagaccctcagcagctcctcgagtgggcactcctacctgcagcaagcaccttactggacacacccccaacgcatggagaagaaactgcacgcggtacctgccgggaacactgtcaaattccgctgtccagctgcagggaaccccatgcccaccatccactggctcaagaacggacaggccttccacggggagaatcgtatcggaggcattcggctgcgtcaccaacactggagcctcgtgatggagagcgtggtgccctcagaccgtggcacgtacacgtgtcttgtggagaactctctgggtagcattcgctacagctatctgctggatgtgctggagcggtccccgcaccggcccatcctgcaggcgggactcccagccaacaccacggctgtggttggcagcaacgtggagctgctgtgcaaggtgtacagtgacgcccagccgcacatccagtggctgaagcacatcgttatcaacggcagcagtctcggcgctgatggtttcccctacgtacaagtcctgaagacaacagacatcaatagctcagaggtggaggtgctgtatctgaggaacgtgtcggctgaggatgcaggggagtacacctgcctggcgggcaactccatcggcctctcctaccagtcagcgtggctcacagtgctacccgcagaggaagaagacctcgcgtggacaacagcaacatcggaggccagatatacagatattatcctatatgtccatggctcactggctttggttttgctcctgctgctggccggggtgtatcaccgacaagcaatccacggccaccactctcgacagcctgtcactgtacagaagctgtcccggttccctttggcccggcagttctccttggagtcgaggtcctctggcaagtcaagtttgtccctggtgcgaggtgtccggctctcctccagtggcccgcccttgctcacgggccttgtgagtctagacctacctctcgatccactttgggagttcccccgggacaggctggtgctcggaaagcccctgggtgagggctgctttgggcaagtggtttgtgcagaagcccttggcatggattcctcccggccagaccaaaccagcatcgtggctgtgaagatgctgaaagacaatgcctccgacaaggatttggcagacctgatctctgagatggagatgatgaagctaatcggaagacacaagaacatcattaacctgctgggtgtctgcactcaggaagggcccctgtatgtgattgtggaatatgcggccaagggaaaccttcgggaattcctccgtgcccggcgtcccccaggccctgatctcagccctgatgggcctcggagcagcgaaggaccgctctccttcccggccctggtctcctgtgcctaccaggtggcccgaggcatgcagtatctggagtctcggaagtgcatccaccgggacctggctgcccgaaacgtgctggtgaccgaggatgacgtgatgaagatcgctgactttggtctggcccgtggtgtccaccacatcgactactataagaaaaccagcaatggccgcctgccagtcaagtggatggctcctgaggcgttgtttgaccgtgtatacacacaccagagtgacgtgtggtccttcgggatcctgctgtgggaaatcttcaccctcgggggctccccataccccggcatcccagtggaggagctgttctcactgctgcgagaggggcacaggatggagcggcccccaaactgcccctcagagctgtatgggctaatgagggagtgttggcacgcagctccttctcagaggccgacttttaagcagctgswsgargctctggacraggtcctgctggctgtctctgaagagtaccttgacctccgcctgacctttggaccctattcccccaacaatggggatgccagcagcacgtgctcctccagcgactcggttttcagccacgaccctttgcccctcgagccaagccccttcccatttcctgaggcgcagaccacatgagcctgggaacgatgttgcatgggctcgtargcccgtggccgtgggactccaacctgtttcatcagcatttgacgttggcactgtcatcaggcctctgactcgaggctactgctggcccagatcctctctctggccctgttttggggaggcccattcttggtcttggggttcacagttgaggccttctgttccaaacttatgttcccrgcwcagagttcaaswmytcgkcwcargrtyaysvtystgmysttggabtcrkcmkyaraggagcgaagyattaaggccttgmcasttwgcctccacccsaggggctctccgggcctgactgcaaatctttggtcytaaacatttctagytccccaaacwacctaraggcctygggasttcactgcaccccmgcccccgcagcccacaagcctcgccwccstggtcyccaactccccaytgcttgttctagyatcytgttgaaggagcctcasctctggtgtccttgagagagrgaagcctgtggaaaagacagaagaacaaggcattttmtmaattawwawwawwwwwwaaawaaaaaaaaaaaaatctagaattctgcagaaggatcccgcgccat

SEQ ID NO: 221 - DNA, 4883 bp, Rattus norvegicus
aggaccagatctctggcggggagtagggtgcaaggcagccaggtctccgatcctttccgcagcatggggaagcacaggctccggagcctggccctgctgccactgctgctgcggctgctgctgctgctgctgcccaccgatgcctcagctccacaaaaaccaatctacatggtgatggttccctccctgctccacgcaggaacccccgagaaggcctgcttcctgttcagccatctaaacgagacagtggctgtgagagtgtccttggagtctgtccatgggaaccaaagcctcttcactgaccttgtagttgacaaggacctattccactgtacctccttcaccgtcccacagtcttcatctgatgagctgatgtttttcactgtccaagtaaaaggagcaactcatgagttcaggaggcagagcacggtgctggttaagaagaaagagagcctggtctttgctcagactgacaagcccatctacaaaccaggacagacagtgagatttcgtgttgtctcattggacgaaagtttccatccccttaatgaattgattcctctactgtacattcaggatcccaaaaacaatcgcattgcacaatggcagaatttcaatttagagggtggcctcaaacagctgtccttccccctctcctcagagcccactcagggctcctacaaggtggtgatacgtacagaatcaggcaggaccgtcgagcaccctttctctgtggaggaattcgtgcttcccaagttcgaagtgagagtgacagttccagaaacaatcaccatcctggaggaagagatgaatgtgtccgtgtgtggaatatacacctatgggaagcctgttccaggacgtgtgactgtaaacatttgcagaaagtacagtaatccttctaactgcttcggcgaagagtccgtggctttctgtgagaaactcagccaacagttagacggccgtggctgcttctcacagctagtgaaaaccaagtccttccagctaaagagacaagagtatgagatgcagctcgatgtacatgccaagatccaagaagaaggaacaggtgtggaagaaactggaaaggggctcactaagatcacaagaaccataaccaaactatcatttgtgaacgtggattcacatttcagacaaggaattcctttcgttggacaggtgctcctggtggatgggagaggcacccctattccgtatgaaacgatcttcattggggcggatgaagcaaacctgtacataaatacaaccactgataagcacggcctggcgaggttctccatcaacaccgatgacatcatgggcacgtccctaactgtcagggccaaatacaaggatagcaacgcctgctatggattcagatggttgacagaagagaatgtagaggcttggcacactgcctacgctgttttctcaccaagcagaagcttcctgcacctggaatccctgcctgataaactgcgctgtgaccaaaccctggaggtccaggcacattacattctaaatggcgaggcmmtgcaggagctgaaggagctcgtcttctactatctgatgatggccaagggaggcatcgtacgggcggggactcacgttctgcccctgaagcagggacaaatgagaggtcacttttccatactcatctcgatggagacagacctggctcccgtggctcgactggtcctctatgccatcctacccaatggagaagtggttggagacactgctaaatatgagattgagaactgcctggctaacaaggtggatttggtcttccgcccgaatagcggtcttccagctacccgtgccctccttagtgtcatggcttctcctcagtccctttgtggcctgcgagctgtggaccaaagcgtgctgctcatgaaacctgagactgagctctccgcatccctgatttatgacctgctaccagtgaaagacctcactggcttccctcagggtgcggatcaacgggaagaagacactaatggctgcgttaagcaaaatgacacttacattaatggaatcctgtactcgccagtgcagaatacaaatgaagaggacatgtacggcttcctaaaggatatgggcttaaaggtatttaccaactcgaacatccgtaaacccaaagtctgcgaacggctcagagacaataaaggaataccagctgcgtaccacctcgtaagccaaagccacatggacgcttttctagagtcttcagagtctcccacagagactaggcgaagctacttccctgagacgtggatctgggacttggtggtggtggactcagcaggagtggctgaagtggaagtgacagtccccgacaccatcactgaatggaaggccggggccttctgcctgtctaatgacactggtctgggcctgtctcctgtggtccaattccaagccttccagcccttcttcgtggagctcacaatgccctactccgtgatccgtggagaagccttcacgctcaaggccactgtgctgaactacctccctacatgcatccgggttgccgtgcagctggaggcctctcccgattttctggctgccccagaggagaaggaacaaaggtctcactgcatctgtatgaaccagcggcacaccgcgtcctgggcagtgatccccaagtcattaggaaatgtgaatttcacagttagtgccgaggcactgaactctaaggagctgtgtgggaatgaggtaccggtggtccctgaacagggcaaaaaagacacgatcatcaagtccctgctggttgaacccgaaggtctagagaacgaagtgacatttaacagtctgctttgtccaatgggtgctgaggtatctgaactgatagccctgaagctgccatcagacgtggtagaggaatctgccagagcctctgtcacagttttgggagatatattgggttctgccatgcagaatacacaggatctcctcaagatgccctatggctgtggagaacagaacatggttctctttgctcctaatatctatgtcctggactatctgaatgaaacacagcagctgacacaggagatcaagaccaaggccattgcctatctcaatacgggctaccaaagacaattaaactacaagcaccgggatggctcctacagcgcctttggggataaacctggcaggaatcatgccaatacctggctcacagcctttgtactgaagagttttgctcaggctcgaaaatatatcttcatcgatgaagtacacatcacccaagccytcttatggctctctcagcagcagaaggacaatggttgtttcaggagctccgggtcactgctcaacaatgccatgaagggaggagtagaagatgaagtcaccttgtctgcctacatcaccatagctctcctggagatgtctcttcctgtcactcatcctgttgtccgcaatgccctcttttgcctggacacagcctggaagtcagcaaggggaggagctggtggcagccatgtctacactaaggcgctgttggcctatgcatttgcccttgctggtaaccaggacacgaagaaggagatcctgaaatcactcgatgaggaggctgtaaaagaagaagattctgtccactggaccagacctcagaaacccagcgtgtcagtgggcctctggtaccaaccccaggctacctcggctgagktrgagmkgmckgcatatgtgctcctggcttatcttaccactgagccagctccaacccaagaggacctaacggctgccatgctcatcgtgaagtggctcacaaagcagcagaattcccacggtggcttctcttccacccaggacactgtagtggctctccacgctttgtccaaataygggtccgccactttcacaagagctaagaaagctgcacaggtsaccatccgttcttcgggcacattttctacmaaattccaagtcaacaacaacamccaattattactccagagagtcacattgccgactgtgcctggggattacaccgtgaaggtgacaggagaaggctgtgtctacctccagacatccttgaaatacagtgttctcccgagarakgaggagttcccyttcgctgtggtggtgcagactctgcctgrsacrwgkraggatcccaaagctcacaccarmttcsrsakhkvaywcracatcasttayastggaakysgyyctgarkccaacatggcaattgckgamgkgmwgatgktgtccggcttcatccccttgaaaccaacagtgaaaatkcktgmamgakctgtgcatgtgasccgaacagaagtcagcaataaccatgtcttgatttacmtggataaggtgtcaaatcagacggtgaacttgtccttcamggttcagcaagatattccaataagrgacctgaagccagccgtagtgaaagtctmcgattactwtgagaaagatgagtttgcagttgcwwaataywkckcycccwsyascacagattwtggaaatgcctsakgacgcwrtgaataagaagtgtttcgccagagccctgacctcakgacttcccaagaaaaacagtgtatttgtatttccagagatttgatcaataaaccatttttttcwtawhwammmawmammawwmmmwmawwaawwmagtcatcatttttttacattttcatgcttccacatctagtactcaataaaaactgatgaaaatcaggaatggaaggaattttagaataccaaaaggtattggtttcagtgggatttatggatgggggatgggtcaaaaagtattggatcacagctcagagagagtaaagcatgttcagttatagagatacctcaaggaagagccaaagagtgaatgcttatgagccaataaagactgacttgaccaaaaaaaaaaaaaaaaa

SEQ ID NO: 222 - DNA, 5637 bp, Rattus norvegicus
ttcgggagcgctcgcccggcgggaggaggaggaagaaggatcgcggctcgggctggtctggccacctcgccccgcgcgccccgcccctgcgcgcactccctcgccggcgagctactttcggacaaggaaagtgagggcggccccgggtgacagcgcggcggtgccagtcccgggaagccgcgtctgttcgcgtgtcgcccgtcgcactgtccagaccccgccatggcttcgaccaccacctgcacccggttcaccgacgagtatcagctcttcgaggagctcggaaagggggcattctcagtggtgagaagatgcatgaaaatccctactggacaagagtatgctgccaaaattatcaacaccaaaaagctttctgctagggatcatcagaaactggaaagggaagctagaatctgccgtctcttgaagcaccccaatattgtgagacttcatgacagcatatccgaagagggcttccattacttggtgtttgacttagttactggtggcgaactctttgaagacatagtggcaagagaatattacagtgaggctgatgccagtcattgtatacaacagattctagagagtgtaaatcattgtcacctaaatggcatagttcacagggacctgaagcctgagaatttgcttttagctagcaaatccaaaggagcagctgtgaaactggcagacttcggcttagccatagaagttcaaggcgaccagcaggcgtggtttggttttgctggcacacctgggtatctttctccagaagtcctacgtaaagatccttatggaaaaccagtggacatgtgggcatgtggcgtcatcctctacatcttgctggtgggatacccacccttctgggatgaagatcagcatagactgtatcagcagatcaaggctggagcgtacgattttccatcaccagaatgggacacagtgacacctgaagccaaagacctcatcaacaaaatgctgaccatcaaccctgccaaacgcatcacagcctctgaggccctgaaacacccatggatctgtcaacgttctactgttgcctccatgatgcacaggcaggagactgtagactgcttgaagaaatttaatgctcgacggaaattgaagggtgccatcttgacaactatgctggctacgagaaatttttcagcagccaagagtttgttgaagaaaccggatggggtaaagataaacaacaaagccaacgtggtaaccagccccaaagaaaatattcctaccccggcgctggagccccaaactactgtaatccacaaccctgatggaaacaaggagtcaactgagagctcaaataccaccattgaggatgaagacgtgaaagcacgaaagcaagagatcatcaaagtcactgagcagctgattgaagctatcaacaatggggacttcgaggcttacacgaaaatctgtgatccaggcctcactgcctttgaacccgaagcattgggcaacttagtggaagggatggactttcacagattctactttgaaaatgctttgcccaaaatcaataaaccaatccacactatcatcctgaaccctcacgtacacctggtaggggatgatgcagcctgcatagcatacattcggctcacacagtacatggatggaaatggaatgccaaagacaatgcagtcagaagagactcgagtgtggcaccgccgtgatgggaagtggcagaatattcactttcatcgttcggggtccccaacagtccccatcaasymasycwryatkccamrtsggaaagaaaacttctcaggaggcacctctttgtggcaaaacatctgaaaaccattcacatttgggtcttctaattgtcaacagtgccacgtcttcattctgtcctcaaggcacctggcggggtgatcctgggacatcckctcctcttcatkcatgtttctgagtgcatgaagttgtgaaggttctacgtgtaatgcatatgtgacacgtcatcttaccatgtgacacgccatcttaccatgtattccttcctgtacattgtttacactccagctactggacggatgttccatgcaaacgtcagttactgctggcaaactaaagagggagctccgacaagaaaactccgcaatactccaagttcagctgatccatcaggtttctctgtggatgccaagattcaaaagacttcataaaattactgttcaatgaatgacagtgtgtaagaggaaaggaaatctttcaagaatgctgccattaatctatttgggcttctcattgggattttggggttgattttttttttcattttttaakryaaatatatatatatatatatatgccttcagttcctggtgtgatcctggtagaaatgaatggatgccttttctctgaaagtgttggtgttggataaatggatggctatgtgagccaagtcctgggtgattgtaggagcaagaatcgtttgctgttctaccatcaaagccatgttgatttgggtcgagctctgtatactggaaaaattcacatcattttctagtttgattgctttcagataggcacagttctggtgaatgcttggcactgatcttggtttttctttcctaaatctgtgttctgttttcattatatactatttgctcctttcctttgtatttgttttcttttcccactcttttctttatctttctctctcccacyytcktkcytttttatgttttcctttctatagctgatagtgtgtaaaaacmgtrmcawttssryaygargttaaaataaaaatcaaggtcttctagaagctaaaactagcacttccggtctctcacggggctgtggagttgttagaagatttaaataaatacttaaataagagaggaatgaattcagcttaggttaccacttgtgcataggtatccttgctctgttgaaagtgttggaattgttgagacttaagctaacagcagtaagagcctgcttacacagtcctggttctccccaactagatattgaagaccaagtggagcctgaccagggttgcatgcagagcacttgttttggaccttccagactaggaggcatttactgcctcactttcactagctagccacaggaagagtgttctccatcctcctagaggttgaacttgaccttcgtgactagtgcagttctagcttctctcttgagtcacagtagcatcctgatgccaggagttaggcttttgtccagattaaaacaacgaggmrrmsgmamwrcyyywkttttctttccgtttcccatttcttctttgtcgattcggtccctgggagactgtttctccgcgctgaactgctttatggtgcatggaatctccatcagcgtacttcyaccctagccactcacactccttagaagctgatttttaaagcagaagcaaggaagcaaaagtaaaacactcccttcccctctttttcctcatttcaccttttggtgttgattgctaatcactttagatatattgttgctagtgaatgtatgatagatsggyygaagcttttctgataattagcacatgatttaaaacaatwtatatttaaaacaaatwtatacagtacatgtattgagccgtgttaacctgccaatgagatctgtgaaaaacgtaatggcctcacttttccctktgaatttcktttacctttmtgtgaagcagctstgcgtggcatacatgtatttaaaaacmcaaatartggtvgaatgggttttttttwacacttttaacttagcatgtggtgttgaagtattaccatagatccagtttgtcttstgcactaagatgtgaggmamkmgtgatttgttctctccagcacagtggaattacmccttcatcatcttytattgttttgaaaacactgcagtttaccatgggacactgtatataattcttgccgtaatggtaaatgacraattgatatatttaagagttaataaatttgtgatttctgctrmmarmrwrwmmwwmwwwahhtctcmrataccctatgtgtggtgccggccacagccgaggacattatgtcctgccctggtctccttcaatagacatcttgcagtctgtgatcatggcaagcaatttgttctctctgcacataacagtgctgtcttttcacaaaaaaaaaaaaaattagctaaaaggaaagtagttagcagctgactatcctaaaagattttagacatgctgcttctgtccatctcttacaggactgctaaaatgtcccactcactcctaatacaaatctgtcagtcatctccagtatctagcagtcaccctagctgctatgaccccagaactacagattgctaaggtgtccatgagttaaagcaccacctactatttcttatatccattcatgtgacttactttcttacctagaacggtcttcctttgttggattaaaccaatctttgactcattcactggggtccaaagtagtgttgcacctcctccagcgaatttcctctgcagcttctaggttttatttgctctgtcatgacttgcatggtagtctgtattctctgttcctgatgctatccacattattttgacaatatatttttgtattatctttactgtagtaggaaagtctgtagagataagaactgcacattcatggttgtacccttaccaccaaaccagaacaagaaagaggctgttaataaactgctttttaaaatttwwwawwarawawawwwmtttacttacatttcaaatgttattccccttcctagtttcctgtccataagcccccattccctcccttcccctccccatgcaggtattccccctatacatcctccgtatttcccccccattcccctgccctaggggtccaaccttggcaaaaccaagggcttccccttccactggtgccccaacaaggctattctctgctacatatgtggttagagccctgggtcagtccatgtataatcttttggtagtgaataaactggttttgaaccatattgtccaaggcaacctctaggtgagatcacacagtcctgagttgaatgttgggctctgtcatcattattttgatgttctaaataagtcatttcccttgaacttcactttccaagattataaaatgagtataagtatgtaaattaaattataatatcctaaggattagaaaaacaggcataaaatccctggaataccatttttggtattaagtggacatcattgggcatgttggtatatggctatgatctcggcaggctaatgtgaactagatagaagaccccatctcaacaaatgcataaataaactcctgctactcatggagccctactattcttgtatcgttccctgtttaagatcaggagggtgtgcaacctttgctttaccaggggttgctctcttcattgcaaaggatgtattgcattccactgtctcagcaagaagttgggagccagaaggaggtggccgtgtccctgaaaatgcaaaagaagatggagtacattctggggaaattttcaaaaatgtcaagtttgagtagctaaaactttgaatttctatgtaaatcaaagaattctatataatgtgaggataaatgtagaagacacaacctttgagtcatttcattaaataaaatcttactgactttg

SEQ ID NO: 223 - DNA, 1083 bp, Rattus norvegicus
atggagtcggccgacttctacgaggcggagccgcggcccccgatgagcagccacctccagagccccccgcacgcgcccagcaacsccgcctttggctttccccggggcgcgggccccgcgccgcccccagccccacctgccgccccggagccgctgggcggcatctgcgagcacgagacgtctatagacatcagcgcmtacatcgacccggccgccttcaacgacgagttcctggccgacctcttccagcacagccggcagcaggagaaggccaaggcggcggcgggccccgcgggtggmggcggtgactttgamtacccgggcgccccggcgggccccggcggtgcggtmatgtccgcgggggcgcacggaccccctmccgghtacggctgtgcggcggccggctacctggacggcaggctggagcccctgtacgagcgmgtcggggcgcccgcgctgckgccgctggtgatcaagcaggagccccgcgaggaggacgaggcgaagcagctggcgctggccggcctcttcccctatcagcccccgccgccgccgccgccaccgcacccgcacgcgtctcccgcgcacttggccgcccctcacttgcagttccagatcgcacactgcggccagaccaccatgcacctgcagcctggccaccctacgccgccgccgacgcccgtgcccagccctcatcccgcgcctgcaatgggtgctgcgggcctgccgggccccgggggctcgctcaagggcttggctggtccgcaccccgacctccgcaccggcggcggcggcggcggcggggccggcgcgggcaaggccaagaagtcggtggataagaacagcaacgagtaccgggtrcggcgggaacgcaacaacatcgcggtgcgcaagagccgagataaagccaaacagcgcaacgtggagacgcagcagaaggtgttggagttgaccagtgacaatgaccgcctgcgcaagcgggtggaacagctgagccgtgaactggacacgctgcggggtatcttccgccagctgcctgagagctccttggtcaaggccatgggcaactgcgcgtgaaagctt

SEQ ID NO: 224 - DNA, 1696 bp, Rattus norvegicus
atgctggcctcaggactccttctggtggcctcagtggccttcctcagtgtcctggtcttgatgtctgtctggaagcagaggaagctctcagggaagctgcctcctggacccaccccattgcccttcatcgggaactacctccagctgaacacagagaaaatgtacagctctctcatgaagatcagccaacgttacggtcctgtattcaccatccacctgggacctcgccgagttgtggtgctgtgcggacaggaggcagtcaaggaggctctggtggaccaagctgaggaattcagtggtcggggagagcaggccaccttcgackggcttttcaaaggctatggcgtagccttcagcagcggggagcgagccaaacagctaaggcgcttctccatcgccacgctgcgggacttcggcgtgggcaagcgtggcatcgaggagcgtatccaagaggaggcgggctttctcatcgagtcatttcgaaagacgaacggtgccctcattgaccccaccttctatctgagccggacagtctccaatgtcattagctcaatagtcttcggggaccgcttcgactatgaggacaaagagttcctgtcactgcttcgaatgatgctgggaagcttccagttcacagctacctccacggggcagctctatgagatgttctcttctgtgatgaaacacctgccaggcccccagcaacaggcctttaaggagctgcaggggctggaggacttcataaccaagaaggtggaacagaatcagcgcacgctggatcccaattccccaagggacttcatcgactctttcctcatccgaatgctggaggaaaagaagaaccccaatactgagttctacatgaagaacttggtgctgactaccctaaatctcttctttgccggcacagagaccgtcagcaccaccctgcgttacggctttctgttgctcatgaagcacccggatattgaggctaaggtycacgaggagattgaccgggtgawtggcaggaaccggcaggccaagtatgaggaccgaatgaagatgccctacacggaggctgtgatccacgagatccagagatttgcagacatgatccccatgggcctggctcgcagggtcaccaaggacaccaagtttcgagagttcctcctccccaagggtactgaagtatttcctatgctgggctctgtactgaaagaccctaagttcttctccaaccccaacgacttcaacccaaagcacttcctagatgacaagggacagtttaagaagagtgatgcctttgtgcccttttccattggaaaacggtattgtttcggggaaggactggcaaggatggaactctttctcttcctcacaaacatcatgcagaacttctgcttcaaatccccacaggcaccccaggacatcgatgtgtctcctagacttgtgggctttgccacaatcccaccaaactacactatgagtttcttgtcccgttgagccagcattgcgtgagagtaaagggaagaatgggggttgaaacttagaaagggtcggatgtactgaagaaacagaggaaaaagagtagacctgctgaagatatatatttcaaaggtagagccagagaagggggaaatatctactatgctgtgaataggaataataaaataataaaagtagatattatttatggcaaaaaaaaaaaaaaaaa

SEQ ID NO: 225 - DNA, 1035 bp, Rattus norvegicus
atggtctgcgccaggcaccagcccggcgggctctgcctcctgctgctgctactctgccaattcatggaagaccgcwsykcmcaggctgggaattgctggctccgccaagccaagaacggccgctgccaggtcctgtataagacagaactgagcaaggaagagtgttgcagcaccggccggytgagcacctcgtggaccgaggaggatgtgaacgacaatactctcttcaagtggatgattttcaacgggggcgcccccaactgcawcycytgtaaagrwrsgystsmkmatgtggactgtggccccgggaaaaagtgccgaatgaacaagaagaacaaaccccgctgcgtctgtgccccakactgttccaacatcacctggaagggtccagtgtrtrggctcgatgggaaaacctaccgcmwcgwrystgcgctcctcaaggccagatgtaaagagcagccggaactggaagtccagtaccagggcaaatgtaaaarkasktscassgatgttttctgtccaggcagctccacttgtgtggtggatcagaccaataatgcctactgtgtgacctgtaatcggatttgcccggaaccctcatcttcagagcagtccctttgcgggaacgatggtgtgacttactccagtgcctgccacctgagaaaggccacctgcttgctgggcagatccattggattagcctatgagggaaagtgtatcaaagcaaagtcttgtgaagacatccagtgcggtggtggaaaaaaatgcctatgggatttcaaggttggcagaggtcgctgctctytytkcgatgakctgwgcccggacagtwagtmggatgagcccgtctrtgccagcracaatgccacgtacgccagcgagtgkkccatgaaggaagctgyctgctcctccggcgkastgcttgaagtraagcastccggatcttgcaactshawstbkgwwdaamckgagsmakwgrmkswwsagramkwycwgsavtacagcttccctatctcttccactctagagtggtaa

SEQ ID NO: 226 - DNA, 3313 bp, Rattus norvegicus
gcttttctggttcttgttgtcccggagcgttatgtcatgcccagaccagcagagggctccatgaggagttatagaagatgccccgtgtctctgctcctctggtgctgcttcctgcttggctcttgatggtggcctgtagcccacactccctgaggatcgctgctatcttggatgaccccatggagtgcagcagaggggaacggctctccatcaccctggccaagaaccgcatcaaccgcgcaccagagaggctgggcaaggcmaaagtcgaagtggacatctttgagcttctcagagacagcgagtacgaaactgcagaaaccatgtgtcagatcctccccaagggagtggtcgctgtcctgggaccgtcgtccagcccagcctccagctccatcatcagcaacatctgtggagagaaggaggtccctcatttcaaagtggccccagaggagtttgtcaggttccaactccagagattcaccaccctgaaccttcaccccagcaacaccgacatcagygtggctgtggctgggatcctgaacttcttcaactgcaccaccgcctgcctcatctgtgccaaagcagaatgccttttaaacctggagaagctgctccggcaattccttatctccaaggacacactgtcggtccggatgctggatgacacacgggaccccactccgctcctcaaggagatccgggatgacaagacagctactatcatcatccatgccaacgcctccatgtcgcacaccatcctcctgaaggcagctgaactggggatggtgtcagcctattacacctacatcttcaccaatctggagttctccctccagagaatggacagccttgtggatgatagagtcaacatcttaggattttccattttcaaccaatcccatgctttcttccaagagttctcccagagcctcaaccaatcctggcaggagaactgtgaccacgtgcccttcaccggccctgcgttgtcctcagccctactgtttgacgctgtctacgctgtggtgacagcggtacaggaactgaaccggagccaggaaattggcgtgaagcccctgtcctgtggctcggcccagatctggcagcatggcaccagcctcatgaactacctgcgcatggtagaattggaaggtcttaccggccacattgaattcaacagcaaaggccagaggtccaactatgccttgaaaatcttacagttcaccaggaatgggtttcggcagattggccagtggcatgtggcagagggcctcagcatggacagccgcctctacgcctccaacatctctgacagtctcttcaacaccaccctggtcgtcaccaccatcctggaaaacccatacctaatgctgaaggggaaccaccaggacatggaaggcaatgaccggtacgagggattctgcgtggacatgctcaaggagttggctgagatcctacggttcaactacaagatccgcctcgttggggatggtgtttacggcgtacctgaggccaacggcacctggacgggcatggttggggagctgatcgctcggaaagcagatctggctgtggcgggcctcaccatcacagctgaacgtgagaaagtgattgatttctccaagccgttcatgacgctgggaattagtattctttacagagttcatatgggacgcagaccgggctatttctcctytctggaccccttttctccaggagtctggctcttcatgcttctagcttatctggctgtcagctgtgtcctcttcctggtggctcggttaactccttatgagtggtacagtccacatccttgtgcacagggccggtgtaatctcctggtcaaccagtactctctgggcaacagcctctggtttccagtgggaggcttcatgcagcaaggctccaccatcgccccgcgggctttgtccacacgctgcgtcagtggtgtctggtgggccttcacgttgatcatcatctcatcgtacacagccaacctggcagccttcctgacggtgcagcgcatggaagtgcccatcgagtctgtggatgacctggctgaccagaccgccattgagtatggcacgattcacggaggctccagcatgaccttcttccaaaattcccgctaccagacctaccagcgcatgtggaattacatgtactccaagcagcccagygtgtttgtgaagagcacagaggagggaattgccagggtgttgaattccaactacgccttcctgctggagtccaccatgaacgagtactaccggcagaggaactgcaacctcactcagattgggggcctgctggacaccaagggctatgggattggcatgccagtcggctcagtgttccgggatgagttcgacctggccattctccagctgcaggagaacaaccgcctggagattctgaagcggaagtggtgggaagggggaaaatgtcccaaggaggaggaccacagagccaaaggcctgggaatggagaatattggtggaatctttgtggttcttatttgtggcttaatagtggccatttttatggctatgctggagtttttatggactctcagacactcagaagcatcagaggtgtctgtgtgtcaggagatgatgactgagctgcgcagcatcatcctgtgccaggacaatatccatccccggaggcggcgctctggaggcctgccaccccagcccccggtcctggaggagcgccggcccaggggtacagcgacgctcagcaatggcaagctatgtggcgccggggagccggaccaactggcgcagagactggctcaggaggccgccctggtggcccgaggctgcacgcacatccgcgtgtgcccggagtgccgscgcttccasggcctgcgggctcgaccgtcgccagcgcgcagcgaggagagcctggagtgggacaagaccaccaacagcagcgagcctgagtagtggcggcgaaggaccgtggagccaggcggggaggcgggagggctaatgttacaacctccttctctccgattgaagattcagtgactttacaaaghsactgatgscccasckrgggcggatcccgccctatctgagacttgcaaacacgtggcagagacattgtccctcttgggcacaaggaccyatctcctccagasggtctttccctcacattcaaaaacatggattctgggtagtggggccctgctgagagagcagtccaagaaattgatggtrtcatcagttggattaccccctaggaaggggccattgtaccctgggtctagttcttacaggaaaaaaaaaattaaactcaacmsksrwgg

SEQ ID NO: 227 - DNA, 1046 bp, Rattus norvegicus
agctcattctgtctcgagcccaccaggaacgaaagtcaactccatctgcccttcaggaacagctatgaagtttctctccgcaagagacttccagccagttgccttcttgggactgatgttgttgacagccactgccttccctacttcacaagtccggagaggagacttcacagaggataccacccacaacagaccagtatataccacttcacaagtcggaggcttaattacatatgttctcagggagatcttggaaatgagaaaagagttgtgcaatggcaattctgattgtatgaacagcgatgatgcactgtcagaaaacaatctgaaacttccagaaatacaaagaaatgatggatgcttccaaactggatataaccaggaaatttgcctattgaaaatctgctctggtcttctggagttccgtttctacctggagtttgtgaagaacaacttacaagataacaagaaagacaaagccagagtcattcagagcaatactgaaaccctagttcatatcttcaaacaagagataaaagactcatataaaatagtccttcctaccccaacttccaatgctctcctaatggagaagttagagtcacagaaggagtggctaaggaccaagaccatccaactcatcttgaaagcacttgaagaatttctaaaggtcactatgaggtctactcggcaaacctagtgtgctatgcctaagcatatcagtttgtggacattcctcactgtggtcagaaaatatatcctgtcgatgggtatctaaattatgttgttctctacgaagaactggcaatatgaatgttgaaacactattttaattatttttaatttattgataatttaaataagtaaactataagttaatttatgattgatatttatactttttatgaagtgtcacttgaaatattatgttatagttttgaaaagataatataaaaatctatttgatatgaatattctcttacctagccagatggtttcttgcaatatataagtttacctcaatgaattgctaatttaaatttttt

SEQ ID NO: 228 - DNA, 1788 bp, Rattus norvegicus
gaattcctgccaagcgctgaatgccatcttccgccagcatgagccatcactcgtcgggcctccggtccagcatcagctccacctcataccgccggaccttcgggccaccgccctcactgtcccccggggctttctcctactcatccagctctcgcttctccagcagccgcctgctgggctcggggtccccgagctcctcggcgcggctgggcagcttccgtgcccctcgagcgggggccctgcgcttgccctcggagcgcctcgacttctccatggccgaggccctcaaccaggagttcctggccactcggagcaacgagaagcaagagctacaggagctcaacgaccgcttcgccaacttcatcgagaaggtgcgcttcctggagcagcagaacgcagccctgcgcggggagctgagccaggcgcggggccaggagccggcgcgcgccgaccagctgtgccagcaggagctgcgcgagctgcggcgcgaactggagctgctgggccgggagcgcgaccgggtgcaggtcgagcgcgacgggctggcggaggacctgggggcgctcaagcagaggttagaagaagaaactcgcaagcgggaggatgcggagcacaacctggtgctcttccgtaaggacgtggacgacgccacgctgtcccgcctagaactagagcgcaagatcgaatctytgatggacgaaattgagttcctcaagaagctacacgaagaggagcttcgagacctgcaggtgagcgtggagagccagcagstsswgcargtgkmggyagmgrcammagtgaagccagagctgaccgcggcgctgagggacatccgtgcacagtatgagaacatcgcggcgaagaatctgcaggaggcagaggagtggtataagtcaaaatacgctgacctgtscgwtgstgccaaccgcaaccatgaggccctacgtyaggccaagcmggakatgaacgagtyccgacgtcagatccagagtctgacgtgcgaagtggacgggcttygtggcacgaacgaggcactgctcaracagttgckggasytggaggagcarktygccctggaggctggagggtacsaagcargcgcagcacggctkgaggaagagcttcgacagctkaaggaakagatggcgaggcacctgcgagagtaccaggagctyctcaacgtymagatggmcctggacatckwkatagccacctacmgrwagcywctggraggggaagagagccsgatctcartgsccgktcattyctttgcttycctaardttaaagacgactgtkcctkakgtggmgcctycccakgacagmcacarycggaakatggttytgatcargactatygagactysggatggggagaaggkggtgacarartctyavaakgagcagsmcagtgractkkrcmagkcttctattyacarstacygaggsctyagctkgwtytctgargctgactkragcccgttcctwagctcgaacsctyccttksaccaktytkswacsasycybbytcaghrtgtgsaccctyctagmcgagctycwgvccgatcctgargstggacctctyccyswtgcawtgatgtgacccatagctttyctgtsctykbragargcgwtgaararamccmrgacagcagatctgstcaagahtgaccccatggactgtggggtgggccagagtgtgagattcactctgagtcaaawaaaatcgstaccsagarraamwmwrwddaaaaaaaaamaawaaaammmmmwrrmmwhmwmwmwwrmw

SEQ ID NO: 229 - DNA, 8553 bp, Rattus norvegicus
accccctgtctttgcttttcctctttagtaaggatattattgcacatgtgagatttttacttcctactgtaggctgaattctagaaacctgcactggagactgctacattcaacacgcacatggattctgtgctatgattaccattccttttatttcagcactttcttacgcgaggagctaaacagtgactaaagaagcaggatgaaaagatggcacggtcagtgctggtacctccaggacctgacagcttccgcttctttaccagggaatcccttgctgctatcgaacagcgcattgcagaagagaaagctaagagacccaaacaggaacgcaaggacgaagacgatgaaaatggcccaaagccaaatagtgacttggaagcaggaaaatcccttccttttatttatggagacattcctccagagatggtgtcagaaccactggaggacctggacccctactatatcaataagaaaacctttatagtattgaataaggggaaagcaatctcgcggttcagcgccacctctgccctgtacattttaactcccttcaaccccattagaaaattagctattaagattttggtacattctttattcaatgtgcttatcatgtgcacaattcttaccaactgtgtgtttatgaccatgagtaaccctccagactggacaaagaatgtggagtatacttttacaggaatttatacttttgaatcacttattaaaatccttgcaaggggcttttgtctagaagatttcacatttctacggratccctggaattggttggatttcacagtcattacttttgcrtatgtracagartttgtrracctrggcaatgtytcagckctkmgaackttcagagtyytsmgagcwttgaaaacwatwtcwgtmattccaggcctgaagacyatcgtgggggccctgatccagtcagtgaagaagctctctgacgtcatgatcctcaccgtgttctgtctcagtgtctttgctctaatcgggctgcagctcttcatgggcaacctgaggaataaatgcttgcagtggcccccagacaattctacctttgaaataaatatcacttccttctttaataactcattggattggaatggtactgccttcaataggacggtgaacatgtttaactgggacgaatatattgaagataaaagtcacttttattttttggaaggacaaaacgatgctctgctttgtgggaacagctcggatgctggacagtgtccagaaggatacatctgtgtgaaggctgggagaaaccccaactacggctacacaagttttgacaccttcagctgggccttcttgtccttatttcgtctcatgactcaagacttctgggaaaacctttatcagctgaccttgcgtgctgccgggaaaacatacatgatattttttgtgctggtcattttcttgggctcattctacctgataaatttgatcctggctgtggtggccatggcctacgaggaacagaaccaggccacactggaggaggctgaacagaaggaggcagagtttcagcagatgctggagcaactgaagaagcagcaggaggaagctcaggcagcagctgcagcagcgtccgcagaatccagagacttcagcggggcaskcgkgataggtgttttctcggagagttcgtcagtagcctcaaagttaagttccaaaagtgaaaaggagttgaaaaacagaagaaagaaaaagaaacagaaagaacaggctggggaggaagagaaggaagacgcggtgcggaaatctgcctctgaggacagcatacgaaagaaaggcttccagttttccctggaaggaagtagattgacctacgagaagagattttcctctccgcaccagtctctcttgagcatccgaggctccctattttctccaagacgcaacagtagagcaagccttttcaacttcaaaggtcgagtgaaggatattggttccgaaaatgactttgcagacgatgaacacagcacatttgaggacaacgacagcagaagagactctctatttgtaccacacagacatggagaaaggcgtcctagcaatgtcagccaggccagccgtgcctcccgggggatacccactctacccatgaatgggaagatgcacagtgcagtggactgcaacggtgtggtgtccctggttggaggcccctctgcgctcacatcgcctgtggggcagctgctgccggagggcacaactactgagacagaaataaggaagaggagatccagttcttaccacgtctctatggacttgttggaagacccttcaaggcaaagggcaatgagtatggccagtattttgacgaacactatggaagaacttgaagaatccagacagaaatgcccaccctgctggtataaatttgctaatatgtgcctgatttgggactgttgtaagccatggctaaaggtaaaacacgttgtcaatctggtagtgatggatccatttgttgacctggccatcaccatctgcattgtgttaaatacgctcttcatggccatggagcactaccccatgactgagcagttcagcagtgtgctgtctgttgggaatttggtcttcactgggatcttcacggcagaaatgtttctcaagataatagccatggatccatattattacttccaagaaggctggaatatctttgatggctttatagtgagccttagtttaatggaactcggcttggcgaatgtggaaggattgtcagttctccgatcattccggctgcttagagtcttcaagttggcaaagtcctggcccacactgaacatgctcattaagatcatcggcaactcggtgggtgcactgggcaacctgaccctggtgctggccatcatcgtcttcatttttgccgtggtcggcatgcagctgtttggaaagagctacaaggagtgtgtctgtaagatttccaatgattgtgagctcccgcgctggcacatgcacsacttcttccactccttcctgatcgtgtttcgagtsctgtgtggggagtggatagagaccatgtgggactgcatggaggtcgcgggccagaccatgtgccttactgtcttcatgatggtcatggtgattgggaaccttgttgtcctgaacctcttcttggccttgctcctcagttctttcagctcagacaacctggctgccacagatgacgataacgaaatgaacaacctccagatagccgtgggaaggatgcagaagggaattgattttgttaaaaggaagatacgtgaattcattcagaaagcctttgtcagaaagcagaaagctttagatgaaatcaaaccgctggaagatctgaataacaagaaagacagttgtatctccaaccacacgaccatagaaataggcaaggacctcaattacctcaaagatggaaacgggacgaccagtggcataggcagcagtgtggagaagtatgtggtagatgagagtgattacatgtcgttcataaacaaccccagcctcaccgtgactgtgcccatcgcccttggagagtctgactttgaaaacttaaacacggaagaattcagtagtgagtcagatatggaagaaagcaaggagaaattgaatgcaactagctcatctgagggcagtacggttgatataggcrctscggcagagggagagcagccagaggccgaaccggaagaatcgcttgaaccggaagcgtgtttcacagaagactgtgtgagaaagttcaagtgttgtcagataagcatagaagagggcaaaggcaagctctggtggaacttgaggaaaacgtgctacaagatagtagagcataactggtttgaaaccttcatcgtttttatgattctgctcagcagtggtgctctggcctttgaagacatttatattgagcagcgaaagaccatcaagaccatgctggagtatgctgacaaggttttcacttatatcttcatcctggagatgcttctaaagtgggtggcctatggtttccaaatgtatttcaccaatgcctggtgctggctggacttcctgatcgttgatgtctccttggttagcttaactgcaaatgccttgggctattcggaacttggtgccatcaagtccctccgaacgttaagagctctgagacctctacgagccttatcccgatttgaaggaatgagggttgttgtaaacgctctcttaggcgccatcccctccataatgaacgtacttctggtctgcctgatcttttggctaatattcagtatcatgggggtgaatctctttgctggcaagttctaccattgcatcaactacaccacgggggaaatgtttgatgtgagcgtggtcaacaactacagtgaatgccaagctctcattgagagcaatcagacggccaggtggaagaacgtgaaggtcaacttcgataacgtgggactcggatacctttctctgctccaagtagccacctttaaaggatggatggatatcatgtatgcagctgttgactcaagaaatgtagaactgcagcccaaatacgaagacaatctctacatgtacctttactttgtcatcttcatcatcttcggctcattcttcaccctgaacctgttcattggtgtcatcatagacaacttcaaccagcagaagaagaagtttggaggtcaagacatctttatgacagaagaacagaagaaatactacaatgcaatgaagaagctcggctccaagaaaccgcagaagcccattcctcggcctgcaaacaaatttcaagggatggtctttgattttgtaaccaaacaagtctttgacatcagcatcatgatcctcatctgcctcaacatggtgaccatgatggtggaaacggacgaccagagtcaggagatgaccaacatcctgtactggatcaacctggtgttcattgtcctgttcacgggcgagtgtgtgctgaagctcatctccctccgccattattatttcaccatcggctggaatatttttgattttgtggtagtcatcctctccattgtaggaatgtttctcgcggagctgatagagaagtatttcgtgtcccctaccctgttccgagtcatccgcctggccaggattggacgaatcctacgcctgatcaaaggcgccaaggggatccgcactctgctctttgctctgatgatgtcccttcctgcgctgttcaacatcggcctcctgcttttcctggtcatgttcatctacgccatctttgggatgtccaactttgcctacgttaagagggaagttggaattgatgacatgttcaactttgagacttttggcaacagcatgatctgcctgttccaaatcaccacctctgccggctgggacggactgctggcccctatactaaatagcggacctcctgactgtgaccctgaaaaagatcaccctggaagctcggtgaagggggactgtgggaacccatctgtggggattttcttttttgtcagctacatcatcatatccttcctggtggtggtgaacatgtacatcgctgtcatcctggagaacttcagcgtcgccaccgaagaaagtgcagagcctctgagtgaggacgactttgagatgttctacgaggtctgggagaagttcgaccctgacgccactcagttcatagagttctgcaagctttctgactttgcagctgccctggatcctcccctcctcatcgcaaagccaaacaaagtccagctcattgccatggacctgcccatggtgagtggagaccgcatccactgcctggacatcttgtttgcttttacaaagcgggtcctgggygagagtggagagatggacgctcttcgaatccagatggaagaaaggttcatggcttccaacccctccaaggtctcttatgarcccattaccaccaccctgaaacggaaacaagaggaggtgtctgctattgtcatccagcgagcatacaggcggtatctcctgaagcagaamsttaagaaartttcgtytwtctwtaaaaaagmcaaasgtaaagaagacgrgggaacrcccwtcaaagaagacatcmtcacmghtaaaytgaacgagaattcaactccagagargactgatgtgwcaccttccacaacttytccaccttcmtacgatagcgtgacgaaaccggagaaggaaaaatttgaaaaggacaamtcagaaaaagaggmcaaagggaaagatwtcagggaaagtwaaaarwaaaaaaawaaaatawtaataataataamraaaawwaaaaattaaaaaaaaaraawawwmmatttcgtgatcaactgtttacagcctgtgttggtgatgtatctgtgactccctcaggaggtccatgccaaactgactgtttctctaagtgtatacttaaggtcagtgcctataacaagacaggacctcgggtcagcacactgggattcaccaaaccagacaaagagcaccgacgggaggcttctatgttcacaaccagctgacactgctgaagagcggagagcaatggctactcagactagaagaacatggaaacggggaggaaagttaaatttttatgtaaatttaacatgtgacacttgatagcggtaactgtcaccactgtttgtgttttaactgccacacctgccatatttttacaaaatgtgtgctgtgactttatcactttttttttttgattcacgggttgtttactcttatatgtgactatttttgtaaacgggtttatgttcggggagagggattacggaggggattcgacgtttctctatgtataacgagatctattttcaacgaaggtaatgctgcagctctcattcacacacgacgatatcccatcacaccaggaaagagcttacttctcatttcaggatgtttttagattttttgaggtgcttaaatagctattcatatttttaaggtgtttcatccagaggaattttaatgtgcctgtaaatgttccatagaaccacaaccatcaaaaagagttgttttatttttacatagttcattatatgtacatgtatatatgtctatatgtatatggccgtgtatatacatatatatgtatacacacatgcatacatatgcacacacagaccatcacatgctcagagtcctgacagcatgactataacatttttttaataagtgtcctttggtaaaaaaaaatatatatacatatatatatatatctcctatcagtcctttctaagaaacccaaactaccaaaaaccacccccacggccactttctgaagttggttctgcttttttttccctgcagtattgtttagccatcttctgctcttggtaaggttgacatagtgtatgtcaattaaaaaacaacaacagcaacaaagtctgctttgtaaatagtaattttacccagtggtgcatgtttgagcaaatgaaaatgatttaagcacagtatttactgcatcaaatatgtaccacagttaagtatagtttgcaagctttcaacaggcgacatggtgtcactgggtcccttagagtttgaagctgtcaccgctgcatgtctctcttgctgatgccgctgtatcttaacccttctgctgttcagaagtctaacagggaagccatacgtcggtggcgaagtgaagcaaatcggtccaccaggaactcactcttcgtgacatgagccatgggttgcggtaaacgggaaggagatccttgttcttggttctcccaaaccttaatggaacagccggtgagatgtctgacagtgtaagctgcttagatctgttaaaagtatgtgcttcgagttttctaaggaaatatacatattgtaaaaaagggggggctcattttattttatttcaaagccttttgtacataaaatgggaaattaaaagtatcttcaggttgacgtcacagttctaccgttagtttctgttccccggcactttttaatcaaggcacttcgtcacggaagagataaggcctaagaggcagtgtagggctctggctgtcgttgttggtactgtggacttgcgcgtatttccacttgaaacaattctcattccaagtctaatgtccatttgctttcaatagtgatgccttatcattgacaagagatttcaaggggagcagatgacactcttggcattgcctgagtaggatgtcctcacctagtgtttctcctctactcatccatcttttttaatgttcgtttacacagatagatagatggatagatagaatcttactcatccacatggcaccagagctgtttcaggtatgattcgggaaccaagcgctctctctctctctctctctctctctctctctctctctctctctctctctctctctctgttttccacaaaaccagttagtgaaatgatatcgccaattacagccaaacactttgtttcacagacaaccttcaatgtagattctttatactaaagctgttgacttgtagcgtgttcatgaatgcatgcaggaaaatgctattaccatacagagctaccggtaagccacattacgatcaagccaaaagaataaagatttttttttttgcttt

SEQ ID NO: 230 - DNA, 2559 bp, Rattus norvegicus
  misc_feature (845)..(845): n is a, c, g, or t
  misc_feature (1153)..(1153): n is a, c, g, or t
  misc_feature (2053)..(2053): n is a, c, g, or t
tccayawtyckgcagmscttcagaccgccagaactcttctgctgmctgcccaastgcctrcmtgcctgtgccgagagttcccarcaycatgagggcctggatcttctttctcctttgcctgrccgggagggmcctggcagcvcctcaracggaagctgcagmagagatggtggcggmggaaaccgtggtggaggakrcaggkttacctgtsggyrcsarsccagtccaggtggaaatgggaragtttgargraggtgcmsasgaaactsycgaggaggtgktggctgaaaacccctgccagaaccatcaytghaaacatggcaaggtgtgtgagctggacgagagcaacaccsccatgtgtgtktgcmaggrscccascagskgssmasctccmwttggsrrgtttgaaaaggkgkgcagsratgacaacaagaccttcgactckkcckrsmacttctttgsgaccaagtgcaccctggagggcaccaagaagggcmacaagctccacytggactacatcggacsatgcaaatacattgccccctgcctggattctgagctgaccgaattccctctgcgcatgcgtgactggctcaaaaacgtcctggtcaccttgtacgagagagakgmggscvrcaacctcctcactgagaagcagaarctgcgtgtraagaagatccaygagaacgagaagcgcmtggaggytgragaccascyygtgragytgytggcccgagactttgagmagaactacaacatgtacatcttccctgyccamtggcarttygscmmghkggatcagcacccgattgwtgggtmcytgtccmacacggagytggccccantgsgcgytcccytcattcmcatgraacatwgcaccamtcgsttctttraracctgtgacbtrgacahtgamargyacakkgccbtggaggaatggvccgvytghttysscatcaaggagcaggacatmamcarggatbtggwratbtaagttcamgcctcctgcagcagtyctgractctctccccvtgatgtccccacccacttccahtaccccbttgtttaaaatgwttggatggwtggctgwtctgcctggkgataargwgctaacatagatttrrcygwwtmyakwaamrrkgmthmmmmrranvmarvamhwmrrrammvavrarrmamgaawccagwtcccaagysrcmgcattttcccacgtwactcgactctgaggccatagcctatccacagcctcctcgtcccctgcaccgcccagtgtctcactggytgtgttggaaacgggaattgcataagcttgscttcctcaagcaagaaatatctctagctttcatttccattttgastcttarcactcacccagactctgtgchtatttcatttggkgggggrtktkrgmtyccykgggtcttcccctggtagtttggaggtaggcagagggaagtyacrgrcacagvtwcrrmacwkgggcaaggacgctgtgagsscagtcagawccagatggcaagtcttggtagcctaggtcaacgactgacrgaryrakscagagctstgwtgcacaaaacagactcccagcagcccgggacsttgctgtstcctccactcttcaggcagttycttyccatgtttggctgttggtkyyaawwttsgksmrcsarggggaggcatgggcagaccaatacctcactagggattctcttactmaactsmtatrgggctttcaggctcytrmtgggagctbtaggcwctggghtacaggaamgtgmgrcycaagwggadgwsaragamgvytkkaacgtabvgagaktgrrtcataawgyyycaagmatscccccsccmcmtytccccaccvtktgscabttgaaacttahtaatcaagagaaactyccwasccaacggaaggaatggtcgratcycacaggctgagaattkkttccccyccamgcatttcatgaaaaagctsmktbtcattavcsatgcgaactytcmcagtgwtstgaagagcktgacagatytytcraaataaaargtawtgryttndmawwrvvhawmhhdvvwrwwrvhmwmmwwwwrmmwmawmmaccatccccttcccacaaaaacctccacgggcgggcatcggaacccaaattcgcccctatagtgagctcgaatttacaatttcacttggcccgacgttttaaacaacgttcgttgactctggaaaaacctttgccgttaccccacacttacatccctcttgccacaacattcccccttatccccagcttgccgaaaaagccgaaaagttcccgcacccgacgcccctttccaacagtttgcccaccctgaatgccaaatgcccaaattaaacccgtaaaaattttgttaacaaattccgttaaattttttgttaaatcacccccattttttcacccaatggtcccaaaatgtgaaaaatccctttttaactcctcacgaataccacccgcaacagctttcacgctttctctcccactctcgtaaccataagctcccctttttcacgaccttagatcctcccaccc

SEQ ID NO: 231 - DNA, 2286 bp, Rattus norvegicus
  misc_feature (239)..(239): n is a, c, g, or t
  misc_feature (2101)..(2101): n is a, c, g, or t
ccagattcgacgagcccaagatcatatcggatcgccggttggatcgatgcacggatcgcaggctcccttggaggaggggatatagccccttcacccgaaagtcttgkmrmgakscgtksskcmygasrggatggsttccsttsgcckgwwcmksctytgcctsgywdkwckgayrwykgcgtytgaagctggccbtgggggtgctkgmgaatccaagtgtchtytgwtggtcaaagtcntggatgctgtccraggcagccmtgytgtyratgtssccstgaaagtsttcaaaargactgcagacggaagctgggasccgtttgcytytgggaagaccrccgagtctggagagctgcacgggctcacmacagatgagaagttcacgkaaggggtgwacagggtmgaactggacaccaaatsrtamtggaaggctmttggcatttccccattccatgaatacgcagaggtggttttcacagccaatgactvtggtcatcgccastacaccatygcagcchtgctcagccygtactcywacagcaccactgctgtcgtcagtaacccccagaamtgagggacccagcccasgaggwscargatcttgccaaagcagtagcttcccatttgtactgaaacagtgttyttgctctataaaccgtgttagcaacycgggaagatgccgtgaaacgttcttaktaaaccaccttkrktycrkkcrmmmmwmmwmmwrmmmrmmawrrmwgcrhstcgmgcaccscrmgctctgacggctgccgctcccgggtccgggaaagccaaactgacgcaccccgggaaggcgatcctagcaggcggcctggctggaggcatcgaaatctgcatcaccttcccgaccgaatacgtgaagactcaactacagctagatgaacgcgcgaacccaccgcggtaccggggcattggggactgcgtgcggcaaactgtccgcagccatggcgtcctgggcctgtaccgcggcctcagctccttgctctacggctccatccccaaggcggctgtcaggtttgggatgttcgagttcctcagcaaccacatgcgggatgcccaaggtagactggacagcaggagaggactgctgtgcggtctgggtgccggcgtggcagaggcagtggtagtcgtgtgccccatggagaccgtgaaggtgaaattcatccatgaccagacttcctccaatccaaagtaccgaggatttttccatggggttagagagattgttcgggaacaagggctaaaggggacataccaaggcctcacagctactgtactgaagcagggctcaaaccaagccatccgattcttcgtcatgacctccctacgcaactggtaccaaggagacaaccccaacaagcctatgaacccactgatcaccggggtctttggagctgtcgcaggtgcagccagtgtctttgggaacacacccttggatgtgatcaagaccaggatgcagggcctggaggcacacaaataccggaacaccctggactgtggagtgcagatcctgaagaatgaggggcccaaggcattctacaagggcaccgttccccggctgggccgagtctgcctggacgtggccatcgtattcgtcatctatgatgaagtggtgaagctgctcaataaagtgtggaagacggactaaccctggagggtgcaatggggcgtcccagctcctccaggccacctactcttgacgattccagtgcagtagtgccaaaaggycmcttmmtttgkccctcaagkycwgtsgscwsgwgkgtcwtagtgactgtcatgtgttccttagtactgtactcccatgtggtstatgtgtaacactactatygkmwctgwgkccagcctgvccgtggctgggtgtctctttggcctgtgaaracgtgctcacttacccatgtgcttgcttgtgagccatgtgcctgtttcatgttctatgtcatgtgaccmtgtgccccrsywcswggggtgcctatgtgccmtggtccatggccttggasccatggtcaggtcacagtccggtgcctymcaccccctatggcaagggcgccctgccctggcmtaccacagctgccwntggghttcggyytgrmttcacsgcattmcaggggctatagscccccvtgyttytcccgccattggcmttaaatggccctsgggccytccctytgcccggaacagggtggcaccagccactytcaggrccmcyttgccaaggagaataaaccggatcctgttgcmvwwwaaaaaaaaaaaaaaaaa

SEQ ID NO: 232 - DNA, 2645 bp, Rattus norvegicus
aaacaagcaggtcaacaaccccttgttgcaatgccccagctaggtacctgcttggacatggagcagagtcctgtttgttttctgggaagagggcaaacaagaggtgactgcaggaatccaaacagagatccaagtggtgaggcagggagagcataggcaggagaagtcagagactggaggctgctaaaagcagcttctgagttggtttcccattcttggcaaaacaattcctccattccagagggaacctttaatcatgaagctaattactatcctgctcctctgctccaggctcctgccaagtttagcgcaggaagaagatgcccaggaaatggactgcaatgatgagagtctttttcaggctgtggatactgctctgaagaaatataatgctgggttaaaaagtggcaaccagtttgtgttgtaccaagtgactgagggcactaagaaggatggctctaaaacattttattccttcaagtatcaaatcaaggagggaaactgctctgttcagagtggcttcgcctggcaggactgcgacttcaaggacgctgaggaagccgctactggtgaatgcacagcaactttggagaagagaagaaataataaattctccatagccacccagatctgcaatattactccgggtaagggtcccatagtgacaaacgagtaccactgtctggggtgtatgcaccctatctcggtggatagcccagagttggggcctgttctgaaacacgctgtggagcatttcaacaacaacacgaagcacacccacctctttgctctcggagaagtaaagagtgctgacagacaggtggtagctggcatgaattatcaaattatctactccattgtgcaaacaaattgttcaaaggaggattttccttccctccatgaagactgcgtgccccttcccagtggtgatgatggtgaatgtaagggtaatgccttcgtggatattcataaaacaattgccggcttctcagacagctgtgaattttatccaggagatgatttgttcgaactacttcctgaggattgccctggctgccccagaaacatacctgtagacagcccagagctgaaggaggcacttggtcattccattgcacaacttaatgcagagaataaccatactttctatttcaagattgacaccgtgaaaaaggcaacatcacaggtggttgctggaacaaaatatgtgattgagttcatagccagagaaaccaaatgttccaaggaaagtaacgcagaactgacagcagattgtgagaccaaacgcctcggtcaaagcctcaactgcaatgctaacgtgtacatgagaccttgggagaacaaagtcgtcccgactgtcaaatgcaaagtactagacatgacatcagtgataagaaggcctccaggattttcacctttccgggcacctcgagtgaaaaagcctaaagaaagtacaactgtaagtccatcctacattgccagggtgcaagaagagagggatccaggaaatgaacaaggacccatccatgggcatggctggttgcatgcaaagcaaataaagaataagaatcaccaaggtcataagcatgggcatggtattggccatggacaccagaaaccacatggccttggtcatggacatcaacttaaacttgatgatcttaaacagcaaagggaagacggctatgaccatagacatccagtgggacatggtcatggtcagaggcatggtcatggtcatggtcatggtcacggtcgtgataaacacacaaataaagacaaaaacaatgtcaagcacactgaccagagaagagcacctttgacaagctcttctgaagacaatactacatctacacagatacaggggaggacagagggcttcaccttgaaccctcccctagctcagccagctgttatctctcgtggttttcaggactcaggtttcactgaaggtgtgatagctaccacatcaccatatgacacggagacccatgatgatttgatccctgatatccatgtacaaccagatagcctttcatttaagctgatatctgactttccagaagcaacttcccacaagtgtcctgggcgcccatggaagccagttagtaggaaggatccaaccatagaaacaacagaattttctgattttgatctcctcgatgctctttcttaacttatacagcgtaggaatctttacaaatgctttcccagcctctttttctactgcccaaacacaaatattgtgacataagtcatcaagccatgaggctcagaacagcctgtcagtaggactttataaatccctgtggactgataataaaactgccatccttctgaattccttctgagcctgcctcacacgctctctgaaccaatacaggaagaagcctaccagaatccactgctcagataatgaaggctcctaaactcatgtgagtacaagggcagactcttaaaggcaggggcaggcccagcgcctgagcgtcaggcagaagcttcatccgtgacaccatagcccggcaaagacccggagtggaaggaccagaagactcctgggatgtgtgcagcatggaagcatgtttcttcatcacctgatcctgggtgaaataaagttcagactcgacgaaaaaaaaaaaaaaaaa

SEQ ID NO: 233 - DNA, 2305 bp, Rattus norvegicus
tttttttttttttttttgcctcagacgctagctgtagctggcaggcggttgtacgtgctccagagtcttcattacccgccgatccagtcgtcttcgcgtgggttccgctaagctcttctgagctgctcgctctctacacacgccgtcgccgtaatccgccatcatggtgaaactcgcaaaggccggcaaaacccacggagagtccaagaaaatggctcctcctccaaaggaggtggaagaagatagtgaggatgaagaaatgtcagaagatgaagatgacagcagtggagaagaggaggttgtcatccctcagaagaaaggcaaaaaggctaccacaactccagcaaagaaggtggttgtttcacaaacaaaaaaggytgcrsytcsyrcmscagctaagaaagcagctgttaccccaggcaaaaaggcagcagccacaccagccaagaaagctgttacaccagccaaagtagttccaacacctggtaaaaagggagctgcacaagcaaaagcattggtaccaactcctggtaaaaagggagctgtcactccagccaagggggctaagaatggtaagaatgccaagaaggaagacagcgatgaggatgaagatgaagaggatgaagatgacagcgatgaggatgaagatgaagaggatgaatttgagccaccggtagtaaaaggagtgaaaccagcaaaagcagctcctgctgctcctgcctcagaggatgaggatgaggaagatgatgatgatgaagatgatgatgatgatgatgaagaggaggaggaggaagatgactctgaggaagaagttatggagmtcryrccakcsrmasgaragaaaactcctgcaaaagttgttcctgtgaaagccaagagtgtggccgaggaggaggaagatgatgaggatgatgaagatgaagaggaggatgaagatgaagaagatgaagaggacgatgaagatgaggatgaggaagaagaggaagaacctgttaaagcagcacctggaaaacggaagaaggagatgaccaagcagaaagaagcccctgaagccaagaaacagaaaatagaaggctcagaaccaactayaccwttcaacctgttcattggaaaccttaatccaaacaagtctgttgctgaattaaaagttgccatcagtgaactttktgctaaaaatgatcttgctgctgtggatgtcagaactggtacaaataggaaatttgsktatgttgattytgagtctgctgaagacctagaaaaggccctggrgctcactggtttaaaagtgtttggcaatgaaattaaactagaaaaaccaaaaggaagagatagtaagaaagttcgagctgcaagaacacttttagccaaaaacctctctttcaacatcactgaggatgaattaaaagaagtgtttgaagatgctgtggagatcagattagtcagccaggatgggagaagtaaagggattgcttatattgaatttaagtctgaggctgatgcagagaaaaacttggaagaaaagcagggggcagaaattgatggacggtctgtttcactctactacactggagagaaaggacaaaggcaagagagaactggaaagaatagcacttggagtggtgaatcaaagactttggttttaagtaacytttcctacagtgcaacagaagaaacacttcaggaagtattcgagaaagcaacctttattaaagtgccccagaacccacatggcaaatctaaagggtatgcatttatagaatttscttcatttgaagatgctaaagaagctttaaattcctgtaataaaatggaaattrrgggcagamcaatcaggctggagttkcaaggacccaggggrtcacctaatgcgagaagtcagccatccaaaactctgtttgtcaaaggtctgtctgaggataccactgaagagaccttaaaagaatcatttgagggctctgttcgtgcaagaatagtaactgatcgggaaactggttcttctaaagggtttggttttgtagactttaatagtgaggaagatgccaaagctgccaaggaggccatggaagatggagaaattgatggaaacaaagttaccttggactgggccaaacctaagggtgaaggtggctttggtggtcgaggtggaggcagaggaggtttcggaggcagaggtggtggcagaggcggaagaggcggatttggcggaagaggccggggagggtttggaggcagaggaggcttccgaggcggcagaggaggcgggggagacttcaagccacaaggaaagaagacgaagtttgaatag

SEQ ID NO: 234 - DNA, 1792 bp, Rattus norvegicus
caaaagctggagctccaccgcggtggcggccgctctagaactagtggatcccccgggctgcaggaattcggcacgagccgcgccagccgrgcacgagtctmcacgcaccggagcatccagagagtcgccgmgcgccgacggagcggacatgggcagagcgatggwggtcaggctagggctggggttgmtgcttctggcactgctcctacccacgcagatttattgcaaccaaacatcggkkgcrccattttccgggaaccmgagkatctytgctgccccaaatccaactaatgytaccaccagatctkggtgtagytccctgcagtccacagmcggkctcctggccctytytctctctctcctacatytctactgktagagactcaggccaagaaacgtcyctacttycccatctagacccaccccgaatgssaaccamaagtccaatgtgagtgaccaggaagagacaggtccacatcaaatcggctgttaccattamctcaacagaaaacaytgagrwtccgaaattcgactggbttaaaggacgsgtgaagggtttkagagctgagagatgccawtatgggatctgctggagttttatgtccgagatgaagacaagsatccaaaattgacgtgatttgctcgaaatgtggcttaagaaatgtggacacttaaaactctcactcgaaatcgggcgtaggtttgatgtakagggwgaaggatggggtgtggratggaggtccattattttcattggttccttcgacctataaggccataatgcagttaggtggtattcaaaagcttctctgatgctatttctgtgtatgttggaaggaactaccaggtgttattttaaatccccgatgtgttgttttgttactactaatttaataggctaaactctaggtgaagtcccacgtcgttgacctctagttcttctctccggaacagaacgttttacaccctccttctgtggctttaggtcacccacccccaaatccagccacccctgagtaaatctgatttcaaaagtcacaacggcaaagcatttcccagtgtcttttctcactcaccacgggtactaagttcacttaggtgagctggttctccagagagcagaattctgttgatctcggctaatctccaaacgctgcgttttattttggcatatgtcgagggcttttcatgatttaaagcgtggtctgttagcaaggccaaaattatgagtcttgaaattctacaggcaaatatgcaacccagcatttgggatgtgaggactggaagctctcacagaattacacaaagtcttttatacaatttctgtaaatacttttttttttttaaagagaaaaacaaaaccatggatcggaataaccacgtttggaatactttggttatcagttcatatttttagatagtttgacattggtcctgtgcctgagagggggtttggttctacagtaagtttttttttcccccaatttccttgatacacacataccttctaaaacacagacatttcctcaaaaaaaaaaaaaaattccttttgttcgcatggtcacacactgatgcttgccattctgggatctaatacggtcacagtagtcttgataaccagaatcatttttttctccgtctttagaaacctacccgggaacaaggagacctcacagacccgaagctactgtgtgtgtgaatgaacactccccttgcctcatacccgaatgctgtacatctatttgattgtatattgtgtttgtgtattgtaaataaaagaaagaaatggctg

SEQ ID NO: 235 - DNA, 9136 bp, Rattus norvegicus
  misc_feature (9093)..(9093): n is a, c, g, or t
  misc_feature (9106)..(9108): n is a, c, g, or t
  misc_feature (9110)..(9110): n is a, c, g, or t
cacgaggaaggcaaacatgaactcccacttttatcagaagattactcctgtacccaggacccacaattggtccttcttccagcaggcagctcctggagggacgcacgtggagtgaaggaatggaatatccgtctagctagctagatcatttgatcaaccctggtgtcacagtcccggattgtcttcccgcccagtcacctcttcttgatttcttgacaacagtagacatctagggagctctgggctattcagtatagcgaataatcaatttctctctctctctctctcctctttctccctccagctcccgttgcagcttcgactcgctgttgcggcgcgatcgwgwcccaggcgcggctcggaacggccagccgccgtgagccccacgccacacgcgatgcgggccgttctgccgggacccgtgcctccggggccgcgcgtcgcgctcctgctgccgctcctgctgctrmtrmkcktggcggvmgcggkctccgcgcaggsccaggccgtggacttggacgccttgtgcagttacacatgggaagctgttgattccaaaaataatgcagyttataaaatcaacccctgtggacatgtggataatcccaggygtgggccgwcaagtgctgtctgtatgtgtgacctaaagtcagaaaactgccggtcagwgggtgactcacttttgagaagttcagccwaatcactcctggaatttaacaccactackggctgccagccttcagagcacagaatccagactagcattacatttctgtgtgggaagaccctgggaactcctgawtttgtaactgccacagactgtgtgcattacttcgaatggaggastwcyscwgcstgcaagaaagacatatttaaagctgataaggaggtgccatgctatgtatttgatgacamgttacagaagcatgatttgawcccactgatcaagctgaatggcggctacctggtggatgactctgacgctgacgcayctctgttcatcaatgtgtgtagagacatagactcccttcgggaccccagcacacagctgagagtctgccctgctggcactgctgcctgtctgctgaaggggaaccakgcatttgatgttggccggcccaaggaggggctgaagctattgagcaaggacaggctcgttctgacttatgttaaggaagaaggagaaaagccagacttctgtaatggtcacagccctgcagtgacagtaacatttgtgtgcccatctgagcggagagagggcaccattcctaaactcactgccaactgtcgctatgaagttgagtggatcactgagtatgccagccacagagattacttggagagtgaaacctgctccctcagcagtgagcagcatgatattgctattgaccttagtcccttggcccagcatgaagaagggtccccctatgtagctgatggaggagaatataggttttttatgaatgtctgtggggacacaaaggtctcactctgtaacaaagaggctgctgtttgtcaagagaaaaaggtggattccactcaagtcaaaatagcaggaagacaccagaaccagacactccggtactcagatggagatctcaccctaatctattctggaggtgatgagtgtagttccggcttccagcggatgagtgtcataaactttgagtgcaacaaaaccgcaggtcaagatgggagaggagagcctgtgttcacaatcgaggtggactgcacatacttcttcacgtgggacactaaatatgcctgtgtaaaagagaaggaagatctcctctgcggggccatcgacggcaagaaacgttacgacctgtctgtgctggctcgtcactcagaatcagaacagaattgggaagcagtggatggcagccaggctgagtcagaaaagaggaatttcttcatcaatgtctgtcaccgggtgctgcaggcgggaaaggccaagaactgtcctgaaggtgctgccgtgtgtgctgtggataagagtggaagtaaaaatctaggaaaatttgtctcttctcctacaaaagagaaaggacacattcagctctcttactctgatggcgatgactgtggtaatgataagaaaataacaactaacatcacatttgtgtgcaaaccaggtgatctggaaagtgctccagtgctgagagctgcagggcccgatggctgctcctatgagtttgagtggcacacagctgctgcctgtgtcctgtcgcagacggagggagaaaactgcactgtccttgatgctcaggcagggttttcttttgatttgtcactcctcacaaagaagaatggtgcatataaagttgagacagacaagtatgacttctacataaatgtttgtggccctgtatccgtgaacctgtgtcagtcaaactcaggagcctgccaggtagcaaaaagtggtaagtcttggaacttggggctgagtaatactaagcttacgtactatgatgggatgatccagctgagctacaggaatggcacgctgtataacaatgaaaagcacacaccgagatccacactgattaccttcctctgtgaccgtgatgctggagtgggcttcccagaatatcaggaagaggacaactctacctacaacttccggtggtacaccagttatgcttgcccggaagagcccctggagtgcatggtgacagacccctccatgatggagcaatatgacctctccagtctagtgaagtttgaaggtggccgtggaggaaactggtatgccatggaaaactcccgagaacatttcacacggaggaaatactacctcaacgtgtgccggcctctaaatcctgtgccaggctgtgatcgatatgcatctgcttgccagagtaaatacgaaaacaatgagggctccttggcagagactgtggccatcagtaacttgggagttgcaaagacaggccctgtggtggaggagagcggcagcctcctcttagagtatgtgaacggctctgcgtgcaccaccagtgatggccggctaaccacctacagcaccaggatccatcttgtgtgtggtcgaggaactatgaattcccatcccatattcactttcaactgggaatgtgtggtcagtttcttgtggaacacggaggctgcctgccccatccagacgatcacagattcagaccaggcttgctctataagggaccccaacagcggatttgtgtttaatctgagcccacttaactattctcaaggacacatggtcttaggcattgggaagacttttgtgttcaatatctgtggtacaatgcctgcctgtggaacggttgcagggaagccagcccttggctgtgaggcagaaactaagatcaaagacattaaggatctgaagccagaaaggccagtcgggatggagaagagcctccagttgtctgccgaggggttcctcactctgacctacaaaggctcttctccttctgacagaggcacagccttcatcatccgtttcatttgcaatggtgacatttacccagggacccccaagttcctgcatcaggacattgactctgcacgagggatccggaacaccttctttgagtttgaaactgcattggcttgtattccttctgtagtggattgtcaagtgactgacccagctgggaacgagtacgacctgagtgccctgagcatggtcaggaagccgtggactgctgtggacacgtctgtgcatgggaagaagaggcgcttctatctgagcgtgtgcaccccactgccttacattcctggctgcgatggcattgcaatggggtcctgcatggtgtcagaagacaaaagtcagaacttgggtgtggtgcagatcagtcctcaagctactggaaacggatctctcagcatcctgtatgtgaatggggataggtgtggaaaccagcgctactccaccaggatagtgttcgaatgtgcccagacgtcgggctcacctatgttccagctcctgaacaactgtgagtatgtgtttgtgtggcgaacagtggaggcctgccctgtggtcagagaggaaggagacaactgccaggtgaaagaccccagacacggcaatttgtatgacctgaagcccctggccctcaatgacaccatcatcagtgctggcgagtacacctactacttccgggtctgtggaaagctgtccttagatgtgtgctctgcccatgatgggtccaaggcagtctcatcatgccaggaaaagaaaggaccacaaggattccagaaagtggcagggctccttaatcagaagctgactttcgaaaatggactgttgaaaatgaactacagtgggggggacacctgccataaggtgtatcagcgctccacaaccatctatttctactgtgaccggacgactcagaagccagtgtttctgaaggaaactttggactgctcctatttgtttgagtggcgaacacagtatgcctgcccacctttcaatgtgacagagtgctctatccaggatgaggctggcaactccattgacctctcctcactgtcaagatacagtgacaactgggaggctgtgaccaggacaggggccactgagcattacctcatcaacgtatgcaagtctctgtctccacaggctggcacagatccatgccctccagaggcagctgtttgtctgctggatggctccaagcctgtgaacctcggcagggtgagggatggtcctcagtggacagctggtgtgactgtcctgaagtatgtggatggtgacttgtgccccgacaaaattcggaaaaggtcaaccattattcgcttcacctgcagtgacagccaagtgaactccaggcctctgttcatcagtgctgtacaggactgtgagtacacattttcctggcccacacctgctgcctgtcctgtgaagagcaacatacacgatgactgccaagtcaccaaccccagcacaggccacctgtttgacctgagctccctaagtggcaaagctggcatcacagcctcctacagcgagaaggggatggtcttcatgagcatctgtgaggagaatgtgaactgtagccctggrgtaggggcctgctttggacasaccaggatcagtgtgggccaggccagcaagaggctgagctacaaggatcaggtcttgcagctggtgtatgaraatgggtccccatgcccctccaagtsaggcctgaggtacaagagtgtcatcakcttcktgtgccggccggaggctggacccaccaacaggcccatgctcatctycttggacaagcagtcgtgtacactcttcttctsctggmacacgyycctggcctgtgagcaggcgacggaatgcaccstgcggaatggaagctcgattattgacctgwcacctctsatccaccgcactgstkstyatsaagcatacgatgagagtgaggacgacacctctgataccacccctgacttctacatcaacatctgtcagccactgaatcccatgcatggagtgccctgccctgcaggcgcctcagtatgcaaagtccccgtggacgggccccctatagatattgggagagtcacaggccctccaatattcaatcccgtggccaatgaggtctacctgaactttgagagcagcactccttgcttagcggacaaatatatgaactacacctcactaattgcgtttcactgcaggagagggatcagcatgggaactcctaagctgataaggaacaatgactgtgactttgtgtttgagtgggagactccgattgtctgtcctgacgaagtgaagacacagggctgtgctgtaacagatgagcagctgctctatagcttcaacctgacgagcctttccacaagcactttcaaagtcactcgggacgctcacacatacagtataggggtgtgcacaacggcagctgacttagaccaggaaggctgcaaggacggcggggtctgtctgctctctgggagcaaaggagcttcttttgggcgcctagcgtcgatgcagctggattacaggcaccaggatgaagcagtcatcctgagttatgtgaacggtgatccttgccctccagaaacggaagatggcgagccctgtgtcttccccttcatttacaaaggggagacctatgacgaatgtgtattagagggacgagcgaaactgtggtgtagcaaaactgcgaattacgatcgtgaccacgagtggggcttctgcagaccgagcaacagtcaccggatgtctgcgatcatatttacttgtgatgagaacgaagatattgggaggccagaagtgttcagtgaagatcgtgggtgtgaggtgacatttgagtggaaaacaaaagttgtctgccctccgaagaagatggagtgcaagtttgttcagaagcataaaacctatgacttgcgattgctctcatccctcacggggtcctgggattttgtgcatgaaggaaactcgtactttatcaatctgtgccaaagagtatataaaggtcccctggactgctctgagagagccagcatttgcaagaagagtgccactggtcaagtccaggttttggggcttgttcatactcaaaaactggaagtcatagatgaaacagtccttgtcacttactcaaaaggccattcttgtggtgggaataagactgcatcctcagtgatcgagttgacctgtgcaaagactgtgggcaggcctgcattcaagaggtttgatattgmcagctgcacctactacttttactggtactcamgggctgcctgtgctgtgagacctcaggaggtgaacatggtgaatggaactcttaccaaccctgtgactggcaagagcttcagcctcggggaaatttattttaagctgttcagcgcctctggggacatgagaagcaatggggacaactatctgtatgagatccagctctcctctatctccagctcttctaaccctgcgtgctccggtgccaacatctgccaggtgaagcccaatgaccagcacttcagcaggaaagtgggcacctctgacatgaccaagtactacgtccaagacggtgatctggatgtggtgtttacctcttcctccacgtgtggcaaagataagaccaagtctgtgtcttccaccatcttcttccactgtgaccctctgctgaaggacggggtccccgagttcagccacgagactgctgactgccagtaccttttctcctggtacacttcagctgtgtgtcctctgggtgtggactttgatgatgagaatgctgtgccagagtataaagggctctcagagcggagtcaggccgttggggcagtcctcagtctcctcctggtggcactgactggctgtctgctggccttgctgcttcataagaaggagagaagggaaactgtgataaacaagctgaccaattgctgcagaaggagctcgggggtgtcctataagtactcaaaggtcagcaaggaggaggagacagatgagaatgagacagaatggctgatggaagagatccaggtgccagccsccagactaggcaaggacgggcaggagaacggccacattaccaccaagacggtgaaagcagaagctctcacttccctgcatggggatgaccaagacagtgaggatgaggtcctgaccatcccagaggtgaaagttcacacaggcagaggagccgaggtggaaagctcacagyccctgagaaatccccagcgcaaggtcctgaaggaaagggagggggagaggatggggctggtccgcggtgagaaggccagaagaggraagttcagacccggacagcgcaagccaacaacccctgccaagctggtgtccttccatgatgacagtgacgaggacctcctacacatctgactccgtggtgcctacaggagaaggtggcaccatggacagccaagcatctccrrccrarkaagacttcagctcgatgatgcgtctgtcattttgcctttaacaaaactgcttcaaagggaagtttctgtaatgggggagaggatgggggaggtgggcmccactcttccatgatcgtttacagtcagtggaacaaggtgttgcttgaatcggccaaagggcgctacttggtgcccagggttttgccccaagtcctcacttacgatcatagctgctgtgtgcttccaacaggtgcccaggccacatgcatctcacaacagagggctgtgtttgaaaaaaacccttgctgctttagaccctatagggtgaccatttatatttttagcattgtaattctctccccstatttaktgactktgacaaktastactcaggtttgcgaaaaarraaaaaaaaaaaaaammcagtttcttctgccagcaagggcataaggtgaagctggcattatgctggagccttgtacgtggctcctgagctggtccttgatgcacactttagtgagctgcagtattctattcttcgctttgcgttttgtaagggcacacatacatgcacaggtccccgagtgcytcggtttgggaaggcccgcctgcyccgtsccctacctcgtctytatagctgcagctctttscacgaatcyttctgggtgkcrckwktgcccgctggtgagcsccarcagctcacccagaggtgggtgtttgtgcatscgatggagtaraggctcttgkaragragccgcacttcaggtttgggctgtaggtctcatctcttcaggttctcaatgccacctttactgtgyttttwkyttttwykkyamgggggaaatgtttatcacccattcrrcmkrbdmgargmmwtaawtwgyryaggstgaytkasagasayygtkaaatmmkgtsgvyswgtstwgtgtgtggscttgtgcagggcagtgtcccgggatgraaggccaggcccggkscackrgvtgtggactcctttcctgatgtgttcaatgacttctcacattatagagttgtawataggtggtatttayatacccagaagcaaagtaccccgcagaatttcttggwttawgcctgattttgctagcttatttgatttcacattgagtgtatttttaaaaattgatttttttcttcaytttttartcaactttactgwaayatgaagtattcamttkcmrtaaaaataaattnttwamwavhhhvnnnmnraaaaaaawaaaaagttgtgcggccg

SEQ ID NO: 236 - DNA, 2935 bp, Rattus norvegicus
ctaggtcagcatggattcctggttcattcttatcctgtttggcagtggtctaatacacattagtgccaacaacactactacagtttcaccttctttaggaactacaagattaattaaaacatcaacaacagaatcggctaaggaagagaataaaacttcaaattcaacctcttcagtaatttctctttctgtgacaccaacattcagcccaaatctaactctggaacccacctatgtgactactgttaattcttcacactctgacaatgggaccaagagagcagccagcacggaatctggaggcactaccatttcaccaaacggaacatacggaacatggcttactgataaccagttcacggatgccagaacagaaccytgggaggggaattccagcastgcagcaaccactccagaaaccttcccccmtgcagatgagacaccaatcattgcggtgatggtggccctgtcctctctgctagtaattststttattattmtmgtkcygwaywygkyaagskkyamgaratacaagcaagctgggagccattccaattctttccgcctgtcaaatggccgcacagaggatgtggagccccaaagtgtaccacttmtggccaggtccccgagcaccaacagraagtwcccaccactgcctgtggacaagctggaagaggagattaaccggagaatggctgatgacaataagctcttcagagaggaattcaacgccctccctgcctgtccaatccaggccacctgtgaggctgcctccaaggaaraaaamaarraaaaaaaccgatatgtaaacmtcctgccttatgaccactccagagtgcacctgacrcctgtkgaaggggttccagattctgattacatcaacgcctcattcattaatggctaccaggaaaagaacaaattcattgctgcacaaggaccaaaagaagaaacggtgaatgatttctggagaatgatatgggaacagaacacagccaccattgtcatggtgaccaacctgaaggagagaaaggagtgtaaatgtgcccagtattggccagaccaaggctgctggmcmtatgggaatgtccgtgtgtctgtcgaggatgtgactgttctggtggactacacagtacggaaattctgcatccagcaggtgggcgacgtcaccaacaggaagccacagcgcctcatcactcagttccatttcaccagctggccagactttggggtgccttttaccccaattggcatgctcaagttcctcaagaaggtgaaagcctgtaaccctcagtatgcaggggctatcgtggtccactgcagtgcaggtgtagggcgcactggcacctttgttgtcatcgatgccatgctggacatgatgcattcggagcgcaaagtggatgtatatgggtttgtgagccggatccgggcccagcgctgccagatggtccagacagacatgcagtacgtcttcatataccaggcccttctggagcattatctatatggcgacacagagctggaagtgacttccctagacacccacctgcaaaaaatttataacaagatcccaggaactagcaacaatggactagaggaggaatttaagaaattaacttcaatcaaaatccaaaatgacaagatgcgtackggwwaccttccagccaacatgaagaagaaccgagttttacagatcattccatatgaatttaacagagtgatcattccagtcaaacggggcgaagagaacacagactatgtgaacgcatccttcattgatssstaccggcagaaagattcctacatcgccagccagggccctcttctccacacaactgaggacttctggcgaatgatctgggaatggaagtcctgctccattgtaatgctaacagaactggaagaaagaggccaggagaagtgtgcccagtactggccatctgatggcctggtgtcctatggagacatcacagttgagctgaagaaggaggaggaatgtgagagctacactgtccgagacctcctggtcaccaacaccagggagaacaagagtcsgcagatccggcagttccacttccacggctggcctgaggtgggcatccccagcgatgggaagggtatgatcaacatcatygcagcagtgcagaagcagcagcagcagtcagggaaccatcccatcactgtgcactgcagtgccsgggcaggacggacagggaccttttgtgcyttgagcacagtcctggagygcgtgaaagcagaaggaattttggatgtcttccaaactgtcaagassctgcggctgcagaggccacacatggtccagayaytggaacagtatgaattctgctacaaggtggtacaggagtacatcgatgccttctcagattatgccaacttcaagtgacaggggasaaggcccacagacaggagaattgcctttaatattttgtaatatctgtttttgttaatatacccaaaattgtatatatcttataactgttttrgaaatggcacataggcttctattacctattaggtggagattttgtatgtaaatgtgttagcactatagtccttttccagtgttttattggggaattaaatagtgygatatttgagttgawwwaawraarwmmwwagcctggaaattgggccagattattctttgcttcaaatgtctttttctaaagaagacaaacataagagtcattccaggtaactcggtgccaactaaaacaaagcacaaagttctcggagctcttgaggaaatggttgtctcacgtccccaggccggcctcttcccttccctgtccctctccagtgcaccctcatctcccaccaatatcagccacctcaggagtggggaataatgagaccagagcagcatccctggcaccacactaggaatcatcaggtaataaacactcttgattcccgg

SEQ ID NO: 237 - DNA, 833 bp, Rattus norvegicus
ccaaagggtagcaaatacatgcaaccttttattagccagagatacccagtaggtacttcttttttcagagcagatggcctagctctaacttcatgaatgacagagttgagaactaatttataatgggtaatgcatggcgaaagtttcaatttggtaagggatgaattatgggttctgggtaacccaaataaacaaaaagtggactacattaccacaaaaaaagtactgaatatgccagaatctagtacaggtgcctgtccccagtgtccgtaaagcttaggacaggcagatgcccccatttccttgtctctgaacaagctgtgtgtctgcagtttctgtggagtcagtggtccgggtgctggcttctttccaaagtatkstatccctytgkstttsayrtccamwyagaatggaaacgatccccaaactgatggccgctgttgttctgttgactgtgtgtttggaaggctgctccagccagcactggtcctatgggttgcgccctksrkgkwwgagaaatactgaacacttgsttkattctttccaagagatgggcaaggaggaggatcaaatggcagaaccccagaacttcgaatgcactgtccactggccccgttcacctcttagggatctgcgaggagctctggaacgtctgattgaagaggaagctgggcagaagaagatgtaatgcactggcccagaaggatccacaacatccgagtgtgacattgacgctgagatccatgacctgttacagctctgtaattgtgtgggcttccgcatttctatacccagcagcgtagatttcataataaagtaatgtgttgtggatc

SEQ ID NO: 238 - DNA, 1980 bp, Rattus norvegicus
ccctccttattccggtttggaatgtggctaatgaaagcccagtaggaggatttctggggcaaacaggtggaccaggatcctggttctcaggcacggaatggctattgtgagagcgccaccagcaggaccatcgcagatcttggttatggctgctcacgcaagaggctgttgatgtagaccccctttcccgtagatgagaaatcacacgagcagtggtatttatgagcctccatttcttatactactgcagtgaaccaaccttggatgtgaaaattgccttttgtcaggtgtgtgttccttacaggtaaaacaaagggattcgacaaacacgtggatgtgtcttctgttgtcaaacattacaacatgagcaaaagcaaggtagataaccagttctacagtgtggaagtgggagactcaaccttcacagttctaaagcgctaccagaacctgaagccgatcggctctggggctcagggaatagtttgtgctgcgtatgacgctgtcctcgacagaaatgtggccattaagaagctcagcagacccttccagaaccaaactcatgccaagagggcttaccgggagctggtcctcatgaagtgtgtgaaccataaaaacattattagcttattaaatgtctttacaccccagaaaacactggaggagttccaagatgtttacttagtgatggaactgatggacgccaacttgtgtcaggtgattcagatggagctggaccacgagcggatgtcgtacttgctgtaccagatgctgtcggcgatcaaacacctccactccgctgggatcatccacagggacttaaaacccagtaacatcgtagtcaagtctgattgcacactgaaaatcctggactttggactggccaggacagcgggcacaagcttcatgatgactccgtatgtggtgacgagatattacagagcccccgaggtcatcctgggcatgggctacaaggagaacgtggacatatggtctgtgggctgcatcatgggagaaatggttcgtcacaaaatcctctttcccggaagggactatattgaccagtggaacaaagtcatagagcagctaggaactccgtgtccagaattcatgaagaaattgcagcccaccgtcagaaactacgtggagaaccggcccaagtatgcaggcctcaccttccccaagctctttccagattccctcttcccagcggattccgagcacaataaacttaaagccagccaagccagggacttgttgtcaaagatgttagtgattgacccagcgaagaggatatcggtggatgacgcattgcagcatccgtacatcaacgtttggtacgaccctgctgaagtggaggcgcctccgcctcagatatatgacaagcaattggatgaaagggagcacaccatcgaagaatggaaagaactcatctacaaggaagtaatgaactcagaagagaagactaagaacggcgtagtcaaaggccagccctcaccttcaggtgcagcagtgaacagcagtgagagtctccctccatcctcatctgtcaacgacatctcctccatgtccaccgaccagaccctcgcatccgacactgacagcagcctggaagcctcggcgggaccgctgggttgttgcaggtgactagccgcctgcctgcgaaacccagcgttcttcaggagatgacgccatgatagaacacagcgcacatgcacacacacagagcttgtacacacacacacacacacacacasrcgcacgcacgcacgcacgcaagcacgcacgcacgcacaaatgcactcacgcaatgtcaagaaaaaaaaaagtagcgagagagagcgagagagccaacgtaaaactaagttaaatctttctgcgtgcttctccagagttctgtatcgcagctgagctgaaatgtatacttaacttctagtcgcgctcgctcgactttggtctccctccggcagtgcttactacaca

SEQ ID NO: 239 - DNA, 6050 bp, Rattus norvegicus
  misc_feature (1281)..(1306): n is a, c, g, or t
  misc_feature (2367)..(2439): n is a, c, g, or t
  misc_feature (3805)..(3840): n is a, c, g, or t
  misc_feature (4223)..(4242): n is a, c, g, or t
  misc_feature (5099)..(5155): n is a, c, g, or t
  misc_feature (5816)..(5816): n is a, c, g, or t
tgcccagaaccacatagctcactacccacatggagtcctggcggaagctatgtcggttacacactaccatgagtaccacaaaaaggacagcggggaggcgcgggcacggagcaggacggcgggacggccggccctccgggscggmrccmrcgarygcssykgsscgkcggccccgrkcmggykcygrscsywgcagcatgtcatggtttagcggcctcctggttcccaaagtggatgaacggaaaacagcctggggcgaacgcaatggacagaagcgcccacgccaggcgacccgagcccgtggcttctgcgcgccccgctacatgagctgcctcaagaatgtggagccacccagccccactcctgcagctcgcactcggtgcccctggcaggatgaagccttcatcaggagggctggcccgggaaggggtgtgragctggggctgcggtcagtggccttgggttttgatgacactgaggtgaccacaccgatggggacagctgaagtggcacccgacacatcgcctcgaagcggtccgtcctgctggcaccggctagcgcaggtgttccagtctaagcagttccsstccgccaagctggagcgtctgtaccagcggtacttcttccagatgaaccagagcagcctcacgctgctcatggcggtgcttgtgctcctcatggctgtactgttgaccttccacgccgcgcctgccctgcctcagcctgcttatgtggccctgctgacctgtgcctccgtcctttttgtggtactcatggtagtgtgtaaccgacatagcttccgccaggactccatgtgggtagtgagctatgtggttctgggcatcctagcagccgtgcaagtcgggggtgccctggcagccaacccacgcagcccctcagcaggcctttggtgccccgtgttcttcgtctacatcacctacacacttcttcccattcgtatgcgagcggccgtgctcagtggcctgggtctttccaccctgcatttgattttggcctggcatctcaacaatggtgaccccttcctttggaagcagctcggtgctaacgtggtgctcttcctgtgcaccaatgccatcggtgtctgcacgcactaccccgctgaagtgtctcagcgccaagcctttcaggagacccgtggttacatccaggcccggctgcacttgcagcatgagaatcgacagcaggaacggctgctgctgtcggtgttgccccagcatgttgccatggaaatgaaagaggatatcaacacaaaaaaggaannnnnnnnnnnnnnnnnnnnnnnnnnccagaagcatgacaatgtcagcatcctgtttgccgacatcgagggcttcaccagcctggcctcccagtgcactgcccaggaactggtcatgaccttgaatgagctctttgcccggttcgacaagctggctgcggagaatcactgtctgaggatcaagatcttaggagactgttactactgtgtgtcggggctgccggaggcccgggcagaccatgcccactgctgtgtggagatgggggtagacatgatcgaggccatctcgctggtgcgtgaggtaacgggtgtaaatgtgaacatgcgcgtgggcatccacagcgggcgtgtacactgcggtgtccttggtctgcggaaatggcagtttgatgtctggtccaacgatgtgaccctggccaaccacatggaggcggggggccgggcsggccgcatccacatcactcgggccacactgcagtacctgaacggggactatgaggtggagccaggccgtggcggtgagcgcaacgsstacctcaaggagcagtgcattgagaccttcctcatactaggagccagccagaaacggaaagaggagaaggccatgctggtcaagctgcagcggacgcgggccaactccatggaaggactgatgccccgctgggttcctgaccgtgccttctcccggaccaaggactctaaggcattccgacagatgggcatcgatgactctagcaaagagaaccggggtgcccaagatgctctgaaccctgaggatgaggtggacgagtttctgggccgagccatcgatgcccgaagcatcgaccagctgcgtaaggaccatgtgcgccggttcctgctcaccttccagagggaggatctcgagaagaagtattcacggaaagtagaccctcgtttcggagcctacgtcgcctgtgccctcctggttttctgcttcatctgtttcatccagttcctcgtattcccacactccgccctgatactcgggatttatgccgggatcttccttttgctgctggtcaccgtgctcatctgtgctgtgtgctcctgtgggtctttcttccccnnnnnnnnnnnnnnnnnnnnnnnnnnnnnnnnnnnnnnnnnnnnnnnnnnnnnnnnnnnnnnnnnnnnnnnnnttctgcttgtgttcatctctgccattgccaacatgttcacctgcagtcacaccccactgaggacctgtgcggcccggatgctgaacttaacaccgtccgatgtcaccgcctgycacctacgacagmtcaattactctctgggactggaagctcccctgtgtgagggcacmgcacccacctgcagyttccctgagtactttgtcgggagtgtgctgytgagtctcttggccagctccgtcttcctccacatcagcagcattggcaagctagttatgacctttgtcttggggttcatctacttgcttctgcttttgctgggtcccccagccaccatctttgacaactatgatctactgcttagcgtccatggcttggcttcctccaatgagaccttcgatgggctggactgcccagccgtagggagggtagcgctcaaatacatgacccctgtgattctcctcgtgttcgccctggcactgtatctacacgcacaacaggtggaatctaccgcccgcctggacttcctgtggaaactgcaggccacaggggagaaggaggagatggaggagttgcaggcctacaaccggcggctgctgcataacatccttcccaaggacgtggctgcccacttcctggcccgggagcgccgcaacgacgagctgtactaccaatcctgcgagtgcgtggctgtcatgtttgcctccatcgccaacttctctgagttctatgtggaactggaggcgaacaatgagggcgtggagtgcctgcgactgctcaatgagatcatcgcggactttgatgagatcatcagtgaggagaggttccggcagctggagaagatcaagaccatcggtagcacttacatggccgcctccgggctaaatgccagcacctatgaccaggtcggccgctcgcacatcaccgccctggcagactacgccatgcggcttatggagcaaatgaaacacatcaacgaacactctttcaacaacttccagatgaagatcgggttgaacatgggtccggttgtagcaggtgtcattggggcccggaagccacagtatgacatctggggaaacacggtgaatgtttccagccgtatggacagcacaggagttcctgaccgaatacaggtgaccacggatctctaccaggttctagctgccaagggctaccaactggagtgtcgaggggtggtcaaggtgaagggaaagggggagatgaccacctacttcctcaatgggggccccagcagttagcagagsscassagtggaaattcaaccaaagggaccaaggtgggcactgagtggacttttctgctcactggatggagctgtggcagggrgctctgagccttcaggtcnnnnnnnnnnnnnnnnnnnnnnnnnnnnnnnnnnnngcttggaccatatccgtctgccttcagagcagcaaaggaagggacgccgagaggattattatccaagtgactttcttaatcagagtaaggctgtttgcttttttttccccccctttggacgcagctgagagcagagcctcctgtttgagagtaaaatggcaacttactctgcctactgtttccctgtctgggcgacaggctcagggctgggacctttctttccctatttttcctgggactatttttgtacaagastggggcaggcatgaggaatgcttgccttcactggcctgtgtcagcagcatttgtcttgggcactcccagtaccagccaagtctccttcctagcacaacaaggcagaggaaggaggtgctgtgggaccnnnnnnnnnnnnnnnnnnnngggaatgtttccatttgccaaatcctagtcccgtgatctgtccccagaggggaacaaagggacctctgacagtgaaaatttagcctcaattcctgcatgctccagggaaaggggcatctggcctcactggtactgtgaaagtgaccagccagggtgcaagcctgggtgtgaggtcatcagaagaacaggaactggatgttcacctgcaggtgccgaagagtgcacgcagccagggaggaggaggaggaggaggaggagggagaggaggccacattgacctgaggccccagtgtgcccagggtcagctctcttgacccatgtgctcacttgctgtctgctggcagggggcatgggtcatctctaccccttgtattgccaaatagcgaagggtcagggttccaagaaagataatcctgaccctaaacttggcctcctaagtctggcactagggaggccctgtgtgtgtgtgtgtctgtctttctgtctttctgtctgtctgtctgtctgtctgtctgtctgtctgaggtctccatgtgtccttatgctccagctcctcagctctccactggggactgcctctcccccatgggcctctgtcttctggtgttaaggcggggtttcctatgccaagggatggagagtaatttccaggttgcacaggagtgggatggggtttggtagcaaaatgagagtggtctggggagaggagtcccttttgtgccaaatccctaagtgccatttgagggggggggcacatatgcagtatgactgtccccctgcctagggtggggacccaagcacctgcttaatctctagtgttcctcggacttgaactgttggaggtttgtgggtagagnnnnnnnnnnnnnnnnnnnnnnnnnnnnnnnnnnnnnnnnnnnnnnnnnnnnnnnnngactsrsgwggtgtgggtcccctctcakaggacccagattttggtactaaggggacggagcctaggaacttggaacttggttgtcccaagcctttctgcctgaatctagcatgactagactctagtcctggctcccaatcctcgtgaggcccgcaagggttgtactctgtcctgtcttacccttgtagcctccttgactctggtctgaattagcctggtgccttgatttctctgcacctatttaagccagaggcgtttcgcctcgattttgwccagcgattgctttgtcttagatgctgacaggaaaggcagaggagtttcakgatgtatgggaggrmcaggccagtacttttgcctttccttaagcctttgccaccagttctctgcadaggcctggtttcgggsytgrgactactttcctgggactctccatgtsccactcgatggaccactrggcgcttaattagccaaggcagaagagaggaggattatctggtccaggcagaaratcaccysmccgkcwcsmssagccatattmtatccctggttaggaagggactactcgatbccgatgggstgsgystgaggtgtatawaccaaagcagggagacctcgrctytgggaactttgtctgcttcttaccaggtgggaggggsttgtntacaccytggytccckgcacsasagtrmyrgsswgtcrwgyccwctgrsytmccgtwscmyswctcctcaycarytgrtggaggagwsagggtacgggaggccatgggytctggttttataatgtaaccaywgtrggagtgggggagggcgacgtaccatgtatttcagtgaaatatttaatatatttaaatatcaataaaatcaaactctttgtdaaaaaaaaaaaaaaaaaa

SEQ ID NO: 240 - DNA, 2106 bp, Rattus norvegicus
gccgtgctgccgctccagcgacatgtgcggcgggcggggaggcatctggctggctctggccgcggcgctgctgcacgtgtccctgcaaggcgagttccagaggaggctgtacaaggagctggtcaagaactacaacccgctggagaggccggtggccaacgactcgcagccgctcaccgtgtacttctccctgagtctcctgcagatcatggatgtggatgagaagaaccaagttttaaccaccaacatttggctacaaatgtcttggacagatcactatttgcagtggaacatgtctgagtaccccggagtgaagaatgttcgttttccagatggccagatttggaaaccagacattctcctctataacagtgctgatgagcgctttgatgccacgttccacaccaatgttttggtgaatgcatctgggcattgccagtatctccctccaggcatattcaagagctcctgctacattgacgttcgctggttcccttttgatgtgcagcagtgcaaactgaagtttgggtcctggtcctatggagggtggtcactggacctgcaaatgcaagaggcagatatcagcagctatatccccaacggagaatgggatctcatgggaatccctggcaaaaggaatgagaagttctatgagtgctgcaaagagccatacccagatgtcacctacacagtaaccatgcgccgtaggacactctactatggcctcaatctgctcatcccttgtgtactcatttcagccctggctctgctggtattcttgctgcctgcagactctggagagaaaatctctcttggaataactgtcttactttctctgactgtcttcatgctgcttgtggctgagatcatgccagcaacatctgattctgtgcccttgatagcacaatacttcgccagcaccatgatcatcgtgggcctctctgtagtggtgacagtgattgtgctgagatatcaccaccatgaccctgatggtggcaaaatgcctaagtggaccagaatcattctcctgaactggtgtgcatggtttctgcgcatgaagaggcccggagaggacaaggtgcggccagcttgtcagcacaagcctcggcgctgcagcctggccagtgtggagctgagtgcaggtgctgggccacccaccagcaatggcaacctgctctacattggcttccgaggcctggagggcatgcactgtgccccaactccagactctggggtcgtatgtggccgtttggcctgctccccaacacatgatgagcacctcatgcacggtgcacacccctctgatggggaccccgacctggccaagatcctggaggaggtccgctacatcgccaaccgcttccgctgccaggacgagagtgaggtgatctgcagtgaatggaagtttgcagcctgcgtggtggaccgcttgtgcctcatggccttttcggtctttaccatcatctgtaccatcggcatcctcatgtcagctccaaactttgtggaggctgtgtccaaagactttgcttaatgttatcaagtaggaaatgcgcagataagaagagaatctggagggtgagaattggggtcctaactccacagtgtgataaatggaagaactctgaggtatccctgtagctgtcaatcttgagacttagttttctggttactttaactgaaaagatctcagcagccttctgtttattcttctctcccttatcactggcatagccttgtactcagcaggggcactacgtggtcgtttgtytgctctggacagccctataggatagatcttagtggctcttgcagcccagtaaaagcctgtcctgttggtggtgcatggaaacatgccccagtcctgggctcacaagaattcgctgtctgcctttgctatgcgcagacccaggctgaaaccaatgcagagcagtccccactggatccaccgcagcaactgccatgaaaaaggaaggcaaatacaaattcaaactgcaaacttctctgctagtttctctgctagttttcctgtgattcaacttacatttctgtctgtttatctgtctgtctatctatctatctatctatctatctatctatctatctatc

SEQ ID NO: 241 - DNA, 4924 bp, Rattus norvegicus
gagagctgtctcccctttgctcgctctctctgcttccttgagttagttctccaaggtgttaccggggttcgggtgctcttggaccgaatggaactttttgctgcctcgtcttgctgctgattgtgtccctggacaagaaaaaaaggcttcgcaggcaaaagaggcgcaggggaggtggagaaagaggtggaggaagaggacgaggaggaagaggaggaggaagcctaaggggctcggcgcgggtgtgtgcatgtgtgcatgcgtgtgtgagtgcatgtgtgtgagtgccaccgctgcccaggacccccggccccgaaggtgttggctgaaatatggagaatagtcttggatgtgtctgggtacccaagctggcttttgtactcttcggagcttccttgctcagcgcgcatcttcaagtcacgggtttccaaattaaacctttcacgtcacttcattttgtgtctgaaccttctgatgctgtcacaatgcggggaggaaacgtcctgctcaactgctctgcagagtctgaccgcggagtcccagtcatcaagtggaagaaagatggccttatcctggccttgggaatggatgacagaaagcagcaacttcctaatgggtctctgttgatacaaaacatacttcattccagacaccataaaccggatgaaggactttaccaatgcgaggcatccttaggagactctggytsaawtatyakyckkwcmgywrwmkttmtsstmkyaggaccactgaggttcctctcccagacagaatctatcacagccttcatgggagatacagtgttacttaagtgtgaagtcattggggaccccatgccaacaatacactggcagaagaatcaacaagacctcamcccrawcccrggagactcgcgtgtggtcgtcttgccctccggagcattgcagatcagccgacttcaaccaggagacagtggagtctaccgatgctcagctcggaatccagccagcacaagaacaggaaatgaagccgaagtcaggattttatcagacccaggcctgcataggcagctgtattttctgcagagaccatccaatgtgatagccattgaagggaaagatgctgtcctggagtgttgtgtttctggctatcctccaccaagtttcacctggttacggggcgaggaggtcatccaactcaggtctaaaaagtattcgttgttgggtgggagcaatttgctcatctctaatgtgacagatgatgacagtgggacctatacgtgcgttgtcacatataagaatgagaatattastsmctctkymkwgytywckgtcttggttccgccatggtttttaaatcacccttccaacctctatgcctatgaaagcatggacattgagtttgaatgtgcagtgtccgggaagcctgtgcccactgtgaattggatgaagaatggagatgtggtgrtwmytagtgattactttcagatagtgggaggaagcaacttacgratccttggggtggtgaaatcagatgaaggcttttatcaatgtgtggctgaaaatgaggctggcaatgcccaaagtagtgcccagctgattgtccccaagcckgymakmccawgctccagcatcctcccttctgctcccagagatgtggtccctgtcttggtttctagtcgctttgtccgtttgagctggcgtccacctgccgaagccaaaggaaacattcaaacattcacagtctttttctccagagagggtgacaacagggagcgagctttgaatacaacccagcctgggtcccttcagcttactgtgggaaacttgaaaccagaagccatgtataccttcagagttgttgcctacaatgagtggggaccaggggagagctctcaacccatcaaggtggccactcagcctgagttgcaagttccagggccagtagaaaacctgcacgctgtatctgcctctcctacctcaattcttattacatgggaaccccctgcctatgcaaatggtccggttcaaggttacagattgttttgcactgaggtgtctacaggaaaagaacagaatatagaggttgatggactatcttataaactggaaggcctgaaaaaattcacggaatatactcttcgattccttgcttataatcgttatggtccgggagtgtctaccgatgacataacagtcgttacactttcagatgtgccaagtgctccacctcagaacgtctctctggaagtggttaattcaaggagtatcaaagtaagctggctccctcctccatcgggaacacaaaatggatttattactggctataaaattcgacacagaaagactacccgcaggggtgagatggaaacactggaacccaataacctctggtacctcttcacaggattggagaaggggagtcagtacagtttccaagtgtcagccatgactgtcaatggcactggaccaccttctaactggtacacagcagaaaccccagagaacgacttagacgagtctcaagttcctgaccagccaagttctctccatgtgaggccccagacaaactgcatcatcatgagttggactccacctctcaacccaaacatcgtggtgagaggctatattatcggatatggtgttggcagcccttatgccgagacagtgcgtgtagacagtaagcagcggtactattccatcgagaggctggagtcgagttctcattatgtaatctccttaaaagctttcaacaatgctggagaaggtgtccctctctacgaaagtgccactacccgttccataacagaccccactgaccccgttgattattatcctttgcttgatgatttccccacctcgggcccagatgtctccacccccatgctcccaccagtaggtgtgcaggctgtggctcttacccacgaggctgtgagggtcagctgggcagacaactctgtcccgaagaaccagaagacatccgacgttcggctttacacggttcggtggaggaccagcttttccgccagtgccaagtacaagtcagaagacacaacgtctctcagctacacagcgactggcctcaagccaaataccatgtatgagttctcagtcatggtgacaaagaacagaaggtcaagcacgtggagcatgactgcacacgccaccacctacgaagctgccccaacttctgctcccaaggatttgacagtcattactcgtgaggggaagcctcgtgctgtcattgtgagctggcagcctcccttggaagccaatgggaaaatcaccgcttacatcttgttttataccttggacaagaatatacccatcgatgactggattatggagactatcagcggtgaccggcttacccatcagatcatggatctgagcctggacactatgtattactttcgaattcaagcacggaacgctaaaggcgtggggcccctctcggatcccatcctcttcaggactttgaaagtggaacaccctgacaaaatggctaatgaccaaggtcgtcatggagatggaggttattggccagttgatactaacttgattgatagaagcactctcaacgaaccacccattggacaaatgcaccccccacatggcagtgtaactcctcaaaagaacagtaacctgcttgtcataaccgtggtcaccgtgggcgttctcaccgtgttggttgtggtcattgtagcagtgatttgtacccggcgctcttcagcccagcaaaggaagaaacgggccacgcacagtgcgagcaagaggaagggcagtcagaaggacctccggcctccggatctttggatacatcatgaagaaatggaaatgaaaaatatcgagaagccggcaggaaccgaccctgcaggaagaggctcccccatccagagttgccaagacctcacaccagtcagccacagccagtcagaaagccagatgggaagcaaaagtgcctcccattcaggtcaagataccgaggaggcagggagctccatgtctactctagaaaggtcccttgcagcacggcgggccacgaggaccaagctcatgattcccatggaggcccagtccaataatcctgctgtcgtgagtgccatccctgtaccaaccctagaaagtgcccagtatccaggaatcctcccgtctcccacatgtggatatccgcatccacagttcactctccggccagtaccattcccaacactgtctgtggaccgaggtttcggagcaggaagaactgtgagtgaaggaccaacagcacaacaacaacccatgctgcccccagctcagcctgaacatcccagcagcgaagaagcccccagcagaaccatccctacagcctgtgtgcggccaactcacccactccgaagttttgcaaaccctttgctacctccacctatgagtgcaatagaaccaaaagtcccttacacaccgcttttgtcgcagccaggacccacccttcccaagactcatgttaaaacggcctcccttgggctagcaggaaaggcaaggtcccctttgcttcccgtatctgtgccaacagcccctgaagtgtctgaagagagtcacaagccaacagaggatccagccagtgtatatgaacaggatgacttgagcgaacaaatggcgagtttggaagggctaatgaagcaactcaatgccatcacgggctccgccttttgacatgcattgccaaaccgttgagatcttctgggaactttacagcataccaattatccataaacagcacacctgtgtccaaaaactctaaaccagtgtacaggtccaccatctggaccatccagttaagaaacatctgaagcacttcagaagaaatctgtaacccatcctagatggacatcaggaatcaaagcaaagatggtcatgaggtcccgaagatgcatcttaactacaaagtcaaggtgaagtgcctgcag

SEQ ID NO: 242 - DNA, 2035 bp, Rattus norvegicus
  misc_feature (1226)..(1226): n is a, c, g, or t
gcgggccgcggagggggcggggctccaccaccacctcagctgcggacggaggcgagatggcggccactgagggggtcggggaatctgcgccaggcggtgagccgggacagccagagcagccgccgcccccgcctcctccgccgccagcacagcagccgcaggaagaagagatggcggccgaggccggggaagcagcggcgtcccctatggacgacgggtttctgagcctggactcgcccacctatgtcttgtacagggacagggcagagtgggctgacatagacccagtgccccagaatgatggccccagtccagtggtccagatcatctacagtgaaaagtttagagacgtctatgattacttccgagctgttctgcagcgcgatgaaagaagcgaacgagcctttaagctcactcgagatgctattgagttaaacgcagccaactatacggtgtggcattttcggagagttctcttgaggtcgcttcagaaggatctgcaagaagaaatgaactacatcatcgcaataattgaggaacagcccaaaaactatcaagtttggcaccataggagagtattagtggagtggctgaaagatccttctcaagagctcgagttcatcgccgatatccttaatcaggatgcaaagaattaccatgcctggcagcatcgacagtgggtcattcaggagtttcgactttgggataatgagctgcagtatgtggaccagcttctcaaagaggatgtgagaaataactctgtgtggaaccaaagacacttygtcatttctaataccactggctacagtgatcgcgctgtgttggagakwkwwktyywwtwtwytstrgaaatgatsawwtyabkrsmamacmwtkmkwktgcrtgkarytrsttgamagkgatttwgcaggaccgtggtctttccagataccctaatctattaaaccagktgcttgatttayaaccaagtyacagctccccctacctaattgcctttcttgtggatatctatgaagacatgctggaaaaccagtgtgacaacaaggaggacattcttamtaaagcactagagttatgtgagatwytagctaaagaaaaggacactmtwagaaaggaatattggagatatawtggacggkccyyccmgagtaaacmcagcagagaawgtgacataccggcgagtgyatagcagcaagagcggstggaagamgtggacaatgctttntamgscctcttattcgggagkrtagagcggttaraghrktcrkcwcrwgvytskgmrckarssktgtycargtgctgyttytaacaagaaytaaggrtgamwmmwrwrwhwramrctgttcagactagytaagagtcgatttcctaaagcaaggtcattggaggggagggtgaagaaaactttcccgtaaaggaactactgcttttgtagtcttcccaacatttaadccaatcctgtagamtymgcatytcctgaaagacatgktgcacgkctgtgtgytgggcgtgkmtaagggcarctgtgtcatgggtytgcmgtcatgggaacctcggagcgctgcccgggaytgcattgwtgattagggytgytggcctcacccacaggatcttgstatcactgtarccaaytaatgccaaaagaaaggttytwtaataaaatcacwtkathtacwammraaaaaaaaaaaaaaaaactcgctcgtgccgaattcggcacgagcctgtcctcagtgatggccatgtagccgaggacaccagggtgaagtacattggctttgcaggtagctcctgatctcccaggcacccctcctacctgtgtggctgatctgatcttgcttgttccatacatacacaattagtttagaggtagccaccacgatggactatgtcatttgtggtgagagccaaaacgacacagacttctagaagattgtgctacatcttgatccatggtttgatgcaattgagggacggttcacctgttaatgaggatcttgggagctccgactaccttgggtttgtacaatttgg

SEQ ID NO: 243 - DNA, 1529 bp, Rattus norvegicus
ttggctktgcmgtctcstgcsgmawkcrktcwcgagsaagcctcagcawsstwrgcyttgcagtcyystgmggcmagcattctcswggmwgmmwkcsarggaccaactacaaccatgagactggcagwggttwgcytttgcctgwtcggccttgcctcctgtstyccggtgaaagtggctgagttwggmrgstcrsrggagaaggcgcattacagcaaacactcagatgctgtagccacttggctgaagcctgacccatctcagaagcagaatcttctagccccacagaattctgtgtcctctgaagaaacggatgactttaagcaagaaactcttccaagcaactscaatgaaagccatgaccacatggacgatgatgacgacgacgatgacgayggagaccatgcagagagcgaggattctgtgaactcggatgaatctgacgaatctcaccattccgatgaatctgatgagtccttyactgycagcacacaagcagacgttttgactccaatcgcccccacagtcgatgtccctkrsggmmrarskgatagcttggcttayggactgaggtcaaagtccaggagtttycctgwttctgatgaacagtatyccgatgccmcagatgaggacctyacctyccgcatgaaragmcasgagtccgatgaggctmtcaaggtcawycmagttgcchagcgkctgagcgtgcccwykgakcargamagcaacsggaagamcagccatgagtcawgtsrgctggatgaaccaagcgtggaaacacacagcskgsagcagkymarggrgkmkaarcagaggssyrgccacgagagcactgagcaswcgrrkgcgatcgatagtgccgagaagccsgatgcaatcgatagtgcrgagmsgwcsgatgctatcgacagtcaggcgagktccwaagccarsytggracatcagagccmcgagtttcacakbcatgaggacaagctagtcctagaccctaagagtaaggaagatrataggtrtytgaaattccgcatttytcaygawyymgrgagttcatcttctgaggtcaattaaagaagaggcaaarccmmagttccttactktgctktaaataaahcmaaaagtaaatycmmhcaagcaggaatwctamctgcktgtttctcagttcagtgsatacatgtatgtgsagaaagaaatagatagtgttttkgsccbtgagcttagttcgttgtttcatgcasacmccmctgtamcctagaagtttcagcattkygcttctgttctttctgtgcaaraaatgcaaatggccmctscattttwatgattgctattcttttatgaataaaatgtatgkaraggcaggcaaacttacmggamcagsaaaattwaaagagramctrtwatarkctgtgkcmctatamtctyytgstyttataawyagkgkawahtttgktgkgmwtawttwtgkkggtgtgaataaakcttgkatcttgvadrdaaarawaaaaaaaaaaaaaamwmraaaaaaaaaaaaa

SEQ ID NO: 244 - DNA, 1239 bp, Rattus norvegicus
  misc_feature (988)..(988): n is a, c, g, or t
tccaccgcgcccaccatgtgtgaagaagagaccaccgcccttgtgtgtgacaatgggtctggcctgtgcaaggcaggctttgcaggagacgacgctcccagggctgtctttccctccattgtgggccgccctcggcatcagggcgtgatggtgggaatgggccagaaagacagctatgtgggggacgaagcccagagcaagcgtgggatcctgaccctcaaataccccattgagcacggcatcatcacgaactgggatgacatggagaagatctggcaccactccttctacaacgagctgcgagtagcaccagaagagcacccgaccctgctcacagaggcccccctaaaccctaaagccaacagggagaagatgacccagatcatgttcgaaaccttcaatgttcctgccatgtatgttgccattcaagctgtgctctcgctctatgcatctggccgcaccacaggcatcgtcctggattcaggggatggcgtcacccacaatgtccccatctacgagggctatgcactgccccatgccatcatgcgtcttgacctggctggacgggatctcacagactacctcatgaarattctcacagaaagaggctattcctttgtgaccacagctgagagagaaattgtgcgagacatcaaggagaagctgtgctacgtagccctggattttgagaatgagatggccacggcggcttcgtmttmttcybtggagaagagctacgagttgcctgatsggcagrksakcacsmttgrcmmtgmkcrcwkmsgcysscmskarrccctgttccagccttcsttcattggcatggagtcagctggaattcatgagacaacatacawttccatcatgaagtgtgacattgrcatccgmrrggatttstatgctarcaatgtcctctytgggggcastaccatgtacyctgggattkctgacasgatgmagaaggagatcacagyyttggctcccagcnccwtgaagatcaagatcatcgctcctccggagcggaagtactcagthtggaytggaggmtccatchtggyttctytyhccwcyttccagcaaatgtggrtcarmaadmmaragtwtgatgaagcgkggccmtccaktswccacaggaaatgcttbtaaagtcacagggcmttbtbtggggrymmmwrmaaravtgctgtcaccrgtcacagatcadtaaarccttcargcmwwaaaaaaaaaaaaaaaaaa

SEQ ID NO: 245 - DNA, 4864 bp, Rattus norvegicus
cagggcgccgctgggctgccgggtctcctgcctcctcctcctgctcckagagcctcctgcatgagggcgcggtagagacccggacccgctccgkkctctgccgcctcgccgagcttcgcccgggccaaggctctgcsaggcctcgcggtgagccatgatycgcctcggggctccccagtcgctggtgctgctgacgctgctcatcgccacggtcctacaatgtcagggccaggatgcccgaaaattaggrccaaaggggcagaaaggagaacctggagatatcaaagatatcataggacctaaaggacctcctggccctcagggacctgccggtgaacaaggaccmagaggtgaccgtggtgacaagggagagaggggtgcacctggaccccgtggcagagatggagaacctggtacccctggaaatcctggtccccctggccctccaggcccccctggtccccctggccttggtggaggaaactttgcrgcccagatggctggaggatttgaysagaaggctggtggtgcccagatgggagtcatgcaaggccccatgggccccatgggacctcgtggacccccaggccccgccggtgcccccggccctcaaggatttcaaggcaatcctggtgaacctggcgagcctggtgtctctggtcccattggtccccgaggtcctccaggtcctgctggaaaacctggtgatgatggtgaagctggaaagcccggaaaggccggagaaagaggcctccctggtcctcagggtgctcgtggattcccgggaacccccggtcttcctggtgtcaagggtcacagaggttacccaggcctcgatggtgctaagggagaagctggtgctccaggtgtgaagggtgagagcggttcccctggtgagaacggatccccaggcccaatgggtccccgtggcctgcctggcgagagaggacggactggccctgctggtgctgctggtgctcgaggcaacgacggccagccaggccctgctggacctccgggtcctgttggtcctgcaggtggtcctggcttccttggtgctcctggtgccaagggcgaagctggtcccactggtgcccgtggtcctgaaggtgctcaaggttctcgtggcgaacccggcaatcccggatcccccgggcccgcaggcgcttctggtaacccagggactgatggtattcccggagccaaaggatctgctggcgctcctggaattgctggtgcccctggcttccctgggccccgtggccctcccggtcctcaaggtgcaactggtcctctgggccccaaaggtcagacgggtgagcccggcatcgctggcttcaaaggtgaacaaggccccaagggagagactggacctgctgggccccagggagcccctggccctgctggtgaagaaggaaaacgaggtgctcgaggagagcccggtggcgctggacctatcggcccccctggagagagaggtgctcctggcaaccgcggtttcccaggtcaagatggtctggcaggtcccaagggtgcccctggagagcgagggcctagtggcctggctggtcctaagggtgccaatggtgacccgggtcgtcctggagaacctggtcttcctggagccaggggtcttactggccgccctggtgatgctggtcctcaaggcaaagttggtccttctggagcccctggagaagacggtcgccctggtcctcctggtcctcagggagctcgtgggcagcctggcgtcatgggtttccctggccccaaaggagccaatggcgagcctggcaaagctggtgagaaaggactggctggtgctcctggtctgagaggtcttcctggcaaagatggtgagacaggagccgcaggaccccccggccccagcggacctgctggtgaacgaggcgagcagggtgctcctgggccatcagggttccagggacttcctggccctcctggtcccccgggtgaaggtggaaagcaaggtgaccagggtattcctggtgaagctggagcccctggcctcgttggtccccggggtgaacgaggtttcccaggtgaacgtggctctcccggtgctcagggcctccagggtccccgaggcctccctggcactcctggtactgatggtcccaaaggtgcggctggcccagatggtccccctggggctcagggccctccaggtctacagggaatgcctggtgagaggggagcagctggtattgctggacccaagggagacagaggtgatgttggcgagaaaggcccagagggagctcctggaaaagatggtggccgaggtcttactgggcccatcgggcccccaggaccagcaggtgccaatggcgagaagggagaagtcggacctcctggtccttcaggaagtactggagctcgaggcgccccgggtgagcgcggagagactgggccacctggacctgctggattcgctggccctcctggtgctgatggccagcctggtgccaagggcgatcaaggagaagctggacagaaaggtgacgctggtgcccctggcccacaaggcccctcaggagctcccgggccacagggtcctactggagtgactggtcctaagggagcccggggcgcccaaggcccaccgggagccaccggattccctggagctgctggccgagttggacccccaggttctaatggcaaccctgggcccgccggtccccctggtcctgctggaaaagatggtcccaaaggtgctcgaggagacactggtgcccctggcagagctggtgaccctggacttcaaggacccgcaggagctcctggagagaaaggcgaacctggagatgacggtccctctggttctgatggtcccccaggtccccaggggctggctggtcaaaggggcattgttggtctgcctggtcagcgtggtgagagaggattcccaggccttcccggcccatcgggtgagcccggcaagcagggtgcacctggtgcatctggagacagaggtcctcctggtcctgtggggcctcctggcttgacaggacctgcaggtgaacctggacgagagggcagccctggtgctgatggaccccctggcagagatggtgcggctggagtcaagggtgatcgtggtgagactggtgcacttggtgctcctggagctcctgggcccccaggctctcctggtcctgctggcccaactggcaaacaaggagacagaggagaggctggtgcacaaggtcctatgggcccctcaggacctgctggagcccgtggaattgctggccctcaaggcccccgaggtgacaaaggagaagctggagagcctggcgagagaggactgaaggggcaccgaggtttcactggactgcagggtctgcctggccccccgggtccttctggagatcagggtacttctggccctgctggtccttccggccctagaggtccacctggccctgttggtccctctggcaaagatggctctaatggaatccctggccccatcgggcctccaggtccccgtggacgctcaggagaaactggccctgctggtcctcctggaaatcctggtccccctggccctccgggtcctcctggtcctggcatcgacatgtcagcctttgctggcttaggacagagagagaagggccccgatcccctgcagtacatgcgggccgacgaggcagacagtaccttgagacagcatgacgtcgaggtggacgccacgctcaagtcgctgaacaaccagatcgagagcatccgcagccctgatggctcccgcaagaatcccgctcgcacctgccaggacctgaaactctgccacccagagtggaagagcggagactactggattgatcccaaccagggctgcaccttggacgccatgaaagtcttctgcaacatggagactggcgagtcttgcgtctaccccaacccagcgactgtgcctcggaagaactggtggagcagcaagagcaaggagaagaagcacatctggtttggagagaccatgaacggcggcttccacttcagctacggcgacggcaacctggctcccaacaccgctaacgtccagatgactttcctccgtctactgtccactgagggctcccagaacatcacctaccacwgkaagaacagcattgcctacctggacgaagcagccggcaacctcaagaaggccttgctcatccagggctccaatgatgtggagatgagggccgagggcaacagcaggttcacgtacactgccctgaaggatggctgsacgaaacacaccsgtaagtggggcwwgaccatcatcgagtaccgatcacagaagacctcacgccttcccattgttgacattgcacccatggacatcggrgggcctgatcaggaatttggtgtggacatagggcctgtctgtttcttgtaaaaccctcaaccccaaaacaacacaatccattgcgaacccaaaggacccmrryackwkstrrmcgcagtcactctaggatctgcactgaatggctgacctgacctgatattcaactatcctaacctcacagtccggaccattctcccctttytaagagacctgaactgggcagactgcaaaataaaatctcgaagttctayttatttattgtcttcctgtaagacctttgggtcaaggcggagacaggaactatytggtgtgagtcagacgccccccgagtgactgytcccagcccagccagaagacccctacaggtgctgggcrcaggaactgtrtgtcctacacaatggtgctattytgtgtcaaacacctctgtattttttaaaacaccaattgatattaaaaaccaaaaaaaaaaaaawmawwggaaaggaaaaaaaaaaaaaaaaa

SEQ ID NO: 246 - DNA, 3673 bp, Rattus norvegicus
agctcgctctcccggggcagtggtgtggatgcaccggagttcgggcgckgscgcargttgggtcggaactgaacccctgaaagcgggtccgcctcccgccctcgcgcccgcccggatctgagtcgctggcggcggtgggcggcagagcgacggggagtctgctctcaccctggatggagctgaactttgagtggccagaggagcgcagtcgcccggggatcgctgcacgctgagctctctccccgagaccgggcggcggctttggattttgggggggcggggaccagctgcgcggcggcaccatgttcctagccactctgtacttcgcgctgccactcctggatttgctgatgtccgccgaggtgagtggtggagaccgtctggactgtgtgaaagccagcgatcagtgcctgaaggaacagagctgcagcaccaagtaccgcacactaaggcagtgcgtggcgggcaaggaaaccaacttcagcctgacatccggccttgaggccaaggatgagtgccgtagcgccatggaggccttgaagcagaagtctctgtacaactgccgctgcaagcggggcatgaagaaagagaagaattgtctgcgtatctactggagcatgtaccagagcctgcagggaaatgacctcctggaagattccccgtatgagccggttaacagcaggttgtcagatatattccgggcagtcccgttcatatcagatgttttccagcaagtggaacacatttccaaagggaacaactgcctggacgcagccaaggcctgcaacctggacgacacctgtaagaagtacaggtcggcctacatcaccccctgcaccaccagcatgtccaacgaggtctgcaaccgccgtaagtgccacaaggccctcaggcagttcttcgacaaggttccggccaagcacagctacgggatgctcttctgctcctgccgggacatcgcctgcaccgagcggcggcgacagactatcgtccccgtgtgctcctatgaagaacgagagaggcccaactgcctgagtctgcaagactcctgcaagaccaattacatctgcagatctcgccttgcagatttttttaccaactgccagccagagtcaaggtctgtcagcaactgtcttaaggagaactacgcagactgcctcctggcctactcgggactgattggcacagtcatgactcccaactacgtagactccagcagcctcagcgtggcaccatggtgtgactgcagcaacagcggcaatgacctggaagactgcttgaaatttctgaatttttttaaggacaatacttgtctcaaaaatgcaattcaagcctttggcaatggctcagatgtgaccatgtggcagccagcccctccagtccagrccascactgysaccastrscacwgccytccrggtcaagaacaagcctctggggccagcagggtctgagaatgagatccccacacacgttttaccaccctgtgcgaatttgcaggctcagaagctgaaatccaatgtgtcgggtagcacacacctctgtctttctgatagtgatttcggaaaggatggtctcgctggtgcctccagccacataaccacaaaatcaawggctgctcctcccagctgcagtctgagctcactgccggtgctgatgctcaccgcccttgctgccctgttatctgtatcgttggcagaaacgtcgtagctgcatccgggaaaacagtatgaaaaramaaaararaamcaagtattctgtccctgtcctcttgtatatctgaaaatccagttttaaaagctccgttgagaagcagtttcacccaactggaactctttccttgtttttaagaaagcttgtggccctcaggggcttctgttgaagaactgctacagggctaattccaaacccataaggctctggggcgtggtgcggcttaaggggaccatttgcaccatgtaaagcaagctgggcttatcatgtgtttgatggtgaggatggtagtggtgatgatgatggtaattttaacagcttgaaccctgttctctctactggttaggaacaggagatactattgataaagattcttycatgtcttamwmarmarmawwrmmwtctgaagacaggcccgcagcctmrtgtgaatgacaagtggaggttggcctcaagagtggacttggcagactctwccttgtagtaatgttcacctttccgtgtatggtctccacagagtgtttatgtatttacagactgttctgtgatcccccaacaacaacaaccacaaattccttggtcacctccaaatgtaaccggtcctttagcccagtagaggagggtgggtgtggccctggcacagctcccggattgttgatgggcactctcctgagctttgcttgagtgagaagctgaatgtagctgaaaatcaactcttcttacacttcttactgcttcgttcacttacgaggtcacatatagaacaaacatcaccaactattagcttaccgttagcttcccaactattagctttctatgttttgaaagcagtgttgctgaccccatgttttaatgatggtttaatacatgcagccctttcctctcatcggtaacactagctccaacatcaacttcatgcatgtggctctcaaaagcaggccccaagaagcccagttctttaggagaaagctgcgtcctgtttctgtggacaggcaggaggaaacagagcagcctgcccgtggtgtctttatctgttttgaaatcaaggctgcctgtgtgtaaggaatggttcaattcttataaagggtgccactgttgatrccacaactggcagttggtctagctccaggacaccggtttccatgttgcctggcagagacagctttgattgggactggctggccacaagggatgggatgaagatgtgctgccctctctttcaaagttgagccctgccagggcacatagaagcatctttgctcctgaccacaacgtagaacagcttggattcaaggtcatcaagcgtctcctgtacattgctctgtgacckwsrtaacagactgtcccgcacaaaaggaacggcagtttatggatctagagtgggagcacagggtctggaaaggtgaaccgattggcaaaatacacagaacaggagggagagtctcaagccgagacatcttgcttactagccacacvcmatctcctggagccctcctcctgacctgggcagacccttaggtgtatatctaaagacctcktcaatgttcagsttcagaatctgtraatggttgcgtcctggcacccmttcytgaaaactgaacawasgagaggwhatctttcctccaytgagccmtgaaagtatgamtggcttctcaccytcccacagagcagggagcyctggtgcacacagtctcctgatatcctccstgctcwwtgaggtytsccktgggagaaamtgattcacctcgggaggrgacgctttsgtgtctgaagtacdtttatatcgaaatghtaatgawtacccatgtaaaatactcawtwgcmacstttcttccmttcacaatgttktcgaggggaatrcatccaacayccaagtgtacctgrtcagtgsgaakttccatgaagactcatacmttgamtaaacatattcghtgtgccgaaavmrrmmrmaaaaaaaaaaa

SEQ ID NO: 247 - DNA, 8318 bp, Rattus norvegicus
atactggctcaacctcgggagctcacactcaggcwsgmkggccatggggcsgmgrgtcycagctctgagacagctgctggtgctggyagtgctgctgctkaagccttcacarctgcartcscgagagctgtcagggtcgcgctgccccgagmcctgcractgcgcaccggatggcgccctgcgctgycytggycctcgagccggcctcgccagactatctctcacctatctccctgtcaaagtaattccatcacaagctttcaggggacttaatgaggtcgtaaaaattgaaatctctcagagtgattccctggaaaggatagaagctaatgcctttgacaacctcctcaatttgtctgaactactgatccagaacaccaaaaacctgctatacattgaacctggkgcttttacaaacctccctcggttaaaatacctgagcatctgtaacacaggcatccgaacccttccagatgttacgaagatctcctcctctgaatttaatttcattctggaaatctgtgataacttacacataaccaccatacccgggaatgctttccaagggatgaataacgagtctgtcacactaaaactgtatggaaatggatttgaagaagtacaaagccatgcattcaatgggacgactctaatctcgctggagctaaaagaaaacatctacctggagaagatgcacagtggagccttccagggggccacggggcccagcatcctggatatttcttccaccaaattgcaggccctgccgagccacgggctggagtccattcagacgctcatcgccctgtcttcctactcactgaaaacactgccctccaaaraaaaawwmamrarcctcctggtcgccacgctgacctaccccagccactgctgcgccttcagkamytykyckmwkwmagaacagaatttttcattttccatttttkaawacttmkccarwcratgsgaamkcwyagttmswmaagcmratwwygwswyrcrkktattcmsmcayctttgaggagaatgaactcagtggctgggattatgattatggcttctgttcacccaagacactccaatgtgctccagaaccagatgctttcaacccctgtgaagatattatgggctatgccttccttagggtcctgatttggctgattaatatactagccatctttggcaacctgacagtcctctttgttctcctgaccagtcgttataaactgacagtgccccgcttcctcatgtgtaatctctcctttgcagacttttgcatggggctctacctgctgctcattgcctccgtggactcccaaacaaaaggccagtactataaccacgccatagactggcagacagggagtggctgcggtgcagctggcttctttactgtgtttgccagtgaactctctgtctacaccctgacggttatcaccctggaaaggtggcacaccatcacctatgctgtacagctagaccaaaagctaagactgaggcatgccatcccaattatgctcggaggatggctcttttctacgctgatcgccacgatgccccttgtgggtatcagcaattacatgaaggtcagcatctgcctccccatggatgtggaatccactctgtcccaagtctacatattatccatcttaatcctcaacgtggtggccttcgtcgtcatctgtgcttgctacattaggatctactttgcagttcaaaatccagagctgacagctcctaacaaggacacaaaaattgctaagaagatggccatcctcatcttcacagacttcacgtgcatggcgcccatctctttctttgccatctcggctgccttcaaagtgccccttatcactgtcaccaactcgaaaatcttactggtccttttttatcctgtcaattcttgtgccaatccatttctgtatgcgatcttcacgaaggcgtttcagagagatttccttctgctgctgagccgattcggctgctgtaaacgccgggcggagctttacagaaggaaggaattttctgcatatacttccaactgcaaaaatggcttcccaggagcaagtaagccgtcccaggctaccctgaagttgtccacagtgcactgtcaacagcccataccaccgagagcgttaactcactagcattacaaaattgtgcctaaatatgttttttaaaaagtgttttagaaaaatatttatccttaggcacttcaggagaattgtacctgcttcagaggacggsctataacacttggtcacataagtttcaggaaggtttagaaatttttatagtaatttaggcataataattttttgttgaatctaatactaaggaaatctaagttgtcatttttcacgtctctgacatttttcatttcaatcttgtgatttacattgtaatctccaaatatattacttcatagcagattgaaaatttaaactggtctttgtcctcagatagtttgataaatatattcaagagatgcactgtgcagtgtgactgctagccttgcatggtaaatagaagtttcttagccatattccaagtgcttcacatgtcacactaggaggcacagatgcaaactgtttacatcagtgaattctattagccagctctattctagagacttctatttcccattgacactctgcttaactttccatctgaaggcacatgctgcatayttgtttggcttacagatcatgagtacctcatggccaggagcccatctcagcccatcttgttcctcrtctatctcaggatcttggaaatgctacacagcaagcatgcctagccagttaaactccctaaatctacacaggaaaatatttctaccaccttagcatattgttttcgatgattacatgctttctgtattttgccctcctcctagtatcccttcccagagttcttcaccccacgccccctcctctttgcctctgagagggtacccctcccccgggaatatccccttccctggggcatcaagtctctgtaagattaggcacatctcctcccactgagaccagacagggcagtcctctgctctatgtgctgggggcctcggaccagcccatgtgtgctctttggttgatggcttcgtctcyrsgagstcccaggtgtcagggttagttgacactgttgttcttcctgtggggttgccatcccttgagttccttcagtccttcccctaactctcccatggggtgctattcgctcacattattctgtcctttgcagtttattgggaaatacagccagtgtttgccagaagcacttgttcctacagttgactcctgaaggacaagcagccgatgggtctaattgcagagctctcgttggctcctttgcctttttgattgaaagttcattacatatgcagcatctcagtgagtgtattacataatctcaccaactgaatctcagaaaaccctacagttcagatgtcatcaatcttatataagaaaaaacccatcaccgtttttgaaagtactgaaaactagtaaaagattcactctcagacctcactcacaaagcctagcctctttaatgattctcatactgaaaaaaaaawwmwwwwstgagkkrckywrgmttrwwatacaccaaaaatagactacactgatctcaaacaaataattattggagaggtaggttttgttatttaaaagcttatatacattcaatgttccttaagtttttccaatattttttttaaatttagagaataaagtttttccaatattttattatgaacattttcaaatatacagaaatgttgaagaaactatgtagtgaacacctatatatcaccacttacagcaagcaatattttattaaattgactttcatatattactatgcaattatctgttatttatgttgatcaatatgtcttatattttgatattttaaagtaatttacaggtataggtcttacacaagtgtatacactgtatgtgcccatgtatatgaactttagtactcatattcaccaagtataatatataatatttatttacattttaggtataatttacatgaaaaggaatgagcaaatcttaaatgtgccacttgagttttgagaacagcatgcacctatgtgagccacactgtgtcaggatttagtacagttacagttagagagcttctcattgctcatgatggctggtattcttcacagactagagtttcctgtcctagwtggcataagtgcccactcytaagctagcaytgagagaactgtagaatctgtcctcagacytactcattcattyttstgctagtttcttcatgaagcaaatggactcagtgacccttbycaaagccattcctttccactgccatgatggcgcccttctytaatggattacacttcttaagagatctcttctgtgtgaaataaagaacattgtagggctctggcgcctggtgctcttcacagagatctctggtcgggctaggagctcaggttcgggggaggggggaagaactcagggagaggggactgcttctgctgccccccctaccggtacttttcctttgtgccgctgccacttgggttgcttggcgaggtctgagccagcaggggactaacaagctggccaagggtataggggagcttctggcagcaagatctcttcctgaagagcagatctcttcctgaagagcagatctcttcctgaagcggtggtgttacagctcttatgacagaagctctcagacgatggaatattccctgcgcacctttaattctgaacataatagttaaataggtttttggatgggtcagtgtcygacagcaggtattcctattggtttggcctgagagcttaggaagacctcatctacatattcagggcgtggacctttctctatgactgatctgtcttgagcctatgtgacctgtggtcacatcctcacctgtggaggaggggcttggggcactgcttttatgagactggtctgtctcaaaacctctctacaggggtttgtggggggctacagctagtgacaccctgatctgagaggctgggaatgtgcctgccatcccttttagggtcccccagggattcaacctgtctcgaccaggaatcagggtacctttcactgcctgtcaccccacagaatatgataaatgtgtaacctaccacagactctctttacagacctctttrgcckrsrcatctgtgtgctgcatgtgtactacatgcatgatgcctggagcccacagatgccctggaattggaaagttgtgagcactgtgtgcgagtgctagaaatcaaaccgtgctccttcsggagagtaattggtgctcttaaccwcggagcaattkccgcatctmctttagacttcttgagcatttttctataccactttttcccttttctagaaaagaaatagggatattagttagcaatacaaacccattcttatttcacctatgttaggaasataracwattttcttttaacacatctgtttttcaacctgcttcatttttataactgaaatataaaactgcctttgttaagaagtatttcatgttcaaaatatctagaatgtgtgttactattctgtataatctctaatggctaaatcataaatgctaaataaatccaaatctctttcttgtattttctcaccatgttagatagtattgtaagtcaactgcaaaatgccttaaaaagattaatcaacctggaataaatcctctaaacttataaaaaataactttaaacattggtttttggttcttggcttaccacatttgttatawagggcttgcttttacttttcttaatgkrctaagtccaaatataaattaagamccttycccacaaagtttttcaattactaggctcatataagaaataatcttttctggcctggggagatgactcagttgataaagtgcttgccataccarcatgaggacctgagttcagaactccagcacccacataaaaacaggaagtagaaatgtgcatctgtaatcccagcattgattaaragatgtggacagagacaaatttctstagctyattgatccaccagcctwgcagaatygakaractccagattcaatgagagmccttgcttcagaaactaaggtgagagaaatcaagkaagacactcaatgctaacatctgacttccattcaggcacttgtatatatgstcagytgttcttccctccccccactctytctgtctctctcatatatmccatakgcatgaaaattttcgtcaaaatgggtggtcaattmcstacggtcamccagccttaaaatattagatgaaaamcctccagaaataagcaattgtcacagttttggttgactactttcctgcrtggtacaataaaatcatatcrccacaatcagtcacacgaggactcaaccatggttttatccagcgtatctatactgtactatctatcactaagcagttgccttggttatcagtttctctgtcacaatatcacatccaaatgaccttcgttttacttagtgccaagacaacgtgtaactctgctggtgcaaaagtggctctaacacagcagtgaactcctcctctgtgtagtattgaacacatgtagagagaggcactgtcatgacttcaagcacacaccgtggtcttgagatgcagtatccctgaataaggatgacttactgcatttccaagtaatatttttccctgtgagttatagtatataggcttcctgtttgtagtttggatttctagttataaatcacggtgttcccagttgacctagaaaatatttacatgggaaactgtgtgacattaacctgctggagtatgagttaaaataaaagtcctgctgaatcccctccccaataccatagctggctgttgctcttctctccaaacttcccagttccttcacagaacttaaatggcaaactgagatgtcagttaagattagaaatctggtgctctataaagtctgtgctgtgcaaaggactgtttgctcgtcttcagcaccaatgcaggccctctgtacactgactaaaacaagcaaaagaagaccaggcaaggtcagttacttggtccctaagagactaattctgtgcaatttcaacaagatcttggctctcagggaagtaaacagtgcatttgatagcactatcagacatgagcagaagaaaggtttgcaaagttctccaagtaaactggcaccaaagatgtagaatactcccacagacatccaacaccgcaaacgcacaagagacactttctccattataaaagggcagatgacaacatctattaaggtattgtccatagacttaaaaactcacattatggtactttgctacaaaatgcagtaagaaatatgtacttgactatgtggcataaggagttaaaggggaatacctgagcagggaggatgggaattggagatgggaggacagagaaagaggaaagacgaacagaggggagaaataacaggagcaaccttttaaaagtcatatagacacttactgttgtagaagctttactaaaatatatgtatacacatatataaaaagagtgtaaatggaatgaccctgtaatgggataaccatagcccctactagatgtcacacactaacaaaaagtcaagggtcaggaacagtttcttgagtcattggccagtaaggacccttaagctcccaagaattatggactattgttaaaaattttggttacccttcagaacataacagtcagaccctagtactaaggatagcacacacttgagacatataacatttccatcaagctgatactggtctggaaagttcaactactggctagcctgcagagtgatgaaaactgatattgtcactactagaagagaaaggtaaccatcaatattaccctttgaatcctgagaactacacccaacctgccacaacatggccaacggctgtgtagtggtaccaatgtcatgcaagtaagaacctactttctggttgaatttaaggcctaatccacaggttgaaacccatacctggtaccattaatagggccaagaacctatagggagacaggcaattgtaaaagtttggtccagttctacctcccagccccatggtacagtaataagactcagagtcaaaatatatttacaagaaccttagccatatatgtaggctcttctctgactagatcctaacttattataacccatttactctaggctaccttctgccacatggctaattacctatgttcaggtaccatgcatctgtctcatcacatcttccctacgtgaatcacctgcctggctctctcccagaattc

SEQ ID NO: 248 - DNA, 571 bp, Rattus norvegicus
tgaattcgtgggttacccctagccccgcctgagaggtgggagccaagtgctttcttgggtgacacaggagcagcttctacgttcgattgagcgggcctgggaaaggttcccagaaggccgsgcrytsgrswckmkgagcgcaswmdwggcssgmdygrkgaagaagactactggcctggtgggattgsccgtttgcgacactccacacgagaggctaacaatattgtatacaaagattcttgatcwyswgragcactttcctaaacatgcagcctacagaaagtacacagaacagatcmccagtgrgaagctggagktggtcaaattggaaccagatgttaaraaattagaaaacttgcttcagggtggtgaartasaagaggtgattcttcaggctgaaaaagaactaagtytggcaagaaaaatgttgcagtggaagccctgggagccactggtggaggagccccctgctaaccagtggaagtggccaatataatccccgtgtctgatgatggatgtggatctaatgtgcaattaaatgttctgtgvtgcywaaaaaaaaaaaaaaaaa

SEQ ID NO: 249 - DNA, 565 bp, Rattus norvegicus
mtgagcatkgccttckgarctgttctgtgggwccaagctgcggagtcagscmaacatgagtgagagacaaagtgytggagcraccaatggaaaagacaagacatcaggagataatgatgsrcmgragaaggtccamgaagaatttgatatcgacatggatgcaccakagacagagcgtgcagctgtggscattcagtctcagttcagaaaattccagaagaaaaaggcaggatcacagtcctagtggggaagctgccttcstkgtycaccsgargacaccaagttcaamcrccgtccatycagaaatgwgaagaacaataccytmgagcamagtcatycacacccagtacacactccgctgctaacctgaaatgcatgaacagaaacccatagtatttatgcccctmtaggcaggtgtscacaataaaattgtgagcagcttaawmwrwmwrwmwmmawwamaawwmctstgcaacgattttyctcgatgttgtaataaaaaggaggtaagrgscgakmcaaaaaaaaaaaaaaaaaaaaaaacwmtwgcggccgcaagcttatt

SEQ ID NO: 250 - DNA, 991 bp, Rattus norvegicus
cagcctcttgcttcccacggctgcaccatgaaaatcctgttttgtgatgtcctgctgctcagcctgctctccagcgtgttcagcagctgtcccgaggactgcctcacctgccaggagaggctccacccggctccgggcagcttcaacctgaagctgtgcatcctccagtgtgaagagaaggtcttcccccgccctctctggactctttgcaccaaagccatggccagtgactctgagcagctcagmsswgctsakccmkwgctymcstccgctgctctttaccagtcgaaagcctcggagatgcagcacctgaagagaatgccgcgtgtcaggagtgtggtgcaagcccgagacgcagagcctgaggcagatgcagagcctgtcgcagatgaggccgatgaggtggagcagaagcagctgcagaaaaggtttgggggcttcactggggcccggaagtcagcccggaagttggccaaccagaagcggttcagtgagtttatgargcagtacctggtcctgagcatgcagtcaagccaacgccggcgcactctgcaccagaatggtaatgtgtagccagaaggagcccctcccagctgcaccggccactgcaacccatgagcatccaggtgagcccccgtacagcatgtgtccacaccaagacctgcaggccgggagtcaggattcctccttccctgaggcactgaacacccgcggcacctccccacagcatgtctcaccacaatcctgttgctacatcagagtgtatttttgtaattcctccagctaacattttaatggccccatcttcttgctcatcctctgccctctcgtagggccaggtgwgaggaacatgaaatcagacctggggttttgcctcaccactgccataactggtttgtaaaggagctgttctttttgactgattgtttgaaacaactttctccattaaacttctactgagcaaaatggttaataaaaaaaaaaaaaaaaa

SEQ ID NO: 251 - DNA, 2593 bp, Rattus norvegicus
agcagtcgagctggagctgagccatagtcaaggactcattgtgggtgcccatcatgatgtcctacagcgagagattggggggaccggctgtctccccacttccagtccgtgggagacacatggtgcatggggcagcctttgcttatgtccccagcccacaagtcctgcacaggattcctgggacaaccacctatgccatctccagtctgagcccggtagccctcacagagcacagctgtccctatggggaggtcctggaatgtcatgacccgctccctgccaagctggcccaggaagaggagcaaaagccagagcccaggctgtcccagaagcttgcccaggttggcacaaagctcctgaaggtgccgttgatgctaggcttcctttacctctttgtctgctccctggacgtgctcagctctgccttccaactggccggagggaaagtggctggggacatcttcaaggacaatgccatcctgtccaacccagtggcagggctggtggtgggaatcctggtgacagttctggtgcagagctccagcacctcgacatccatcattgtcagcatggtctcctctggcttgttggaggtgagctccgccattccgataatcatgggctccaacatmgggacctytgtsassaacwyyattgtggccctgatgcmsgcgggggacaggactgacttcargcgggcttttgcaggggcaacagtgcatgactgctttaactggctgtctgttctggtcctgctgcccctggaggctgccacgggctacctgcaccacgtcaccgggcttgtggttgcctccttcaacatccgtggtggccgtgatgcccctgaccttytcaaggttatyacagagcccttcacaaagcttatcatccagctggacaagtctgtgattaccagcattgccgtgggggatgagtccctsagraakcacagtctsrwkmggakkwrgwgwcaascasakwcwrawswggcttccacttctatgtccagggtagaggccattggcagccttgcaaacaccaccatggagaaatgcaaccatatcttcgtggatactgggctgcccgacctggccgtggggctcattctgctggcgggctccctggtggtcctgtgcacttgtcttatcctcctcgtcaagatgctcaactctctgctgaagggccaagtggccaatgtcatccagaaggtcatcaacacagacttcccagcccccttcacttgggtcacaggctactttgccatggtggtgggcgccagcatgacgtttgttgtccagagcagttccgtgttcacctcagccatcactccgctcattggcctgggtgtgatcagtattgagcgggcctaccctctcaccctgggctccaacattggtaccaccactacagccatcctggcagcactggccagccccagggagaagctctccagctcctttcagattgccctctgccacttcttcttcaacatctcgggcatcctcctgtggtacccgctgccctgcacacgtctgcccatccgcatggccaaggcactgggcaaacgcactgccaagtaccgctggtttgccgtcctctacctcctcgtgtgcttcctgctcctgccctcactggtgtttggcatttctatggcaggctggcaggctatggtcggtgtgggcacaccctttggggccctgctcgccttcgtggtgcttgttaacgtcctgcagagtcgaagtcccgggcacctccccaagtggctgcagacatgggacttcctaccccgctggatgcactctctgcagcccctggatggccttatcacaagagccaccttgtgctatgccaggcccgagccccgttcaccccaacttccccccagagtcttcctggaggagcttcctcctgccacgccctctccccgcctggcactgcccgctcaccacaatgccacccggctctaggctgcaggtccagactattgcctggaggcgagggacgggatttttacagagcccacagtagaaaggcacagcatgtttgtgagtgtgtgtgcatgcatgtagatgcatgtcacttgaggtacatgattttgtgccacccttgggtacctgtccctactcagggccacagcggggtsggcykwttttgcaattaaraagcagtgtgcacaaattacatgmtaggtcctgagcctttgtggccatcaggacaggagtatgcgagtgcatggtgtgggtacaggggatgcaratgcatgaggagcccccaaaattttctgggaagagtsggmtatgccctctcaccttctcactacccttgtcccaacaggagaggcagaagagcagytggccttctgtatacatgagcctttcctctgccaattctgctaactgtgcatagaaaaagttttaaaagttgmawmwrwmmwrawmawawawrarmwwwwwwwttttttttaagaaatcatattccttacccctacagcatggtaattcttcacatggcttttacaatattgggtatctaagtcacctggagatcacacaccaggggatgtaggctgattctttacaaacactgtggtttt

SEQ ID NO: 252 - DNA, 1901 bp, Rattus norvegicus
  misc_feature (1494)..(1494): n is a, c, g, or t
  misc_feature (1897)..(1899): n is a, c, g, or t
cggccgccagggaactcacccagccccgcgttccgctcgttgccgccgcccgcgctcgcgccgccccgcatcccggtcaccagttcaggagacaaagacacagcctcccacaatgtcctacagacgagagctggagaaatatcgagacctggatgaggatgaaatcctgggggccctcacagaggaggagctcaggacactggaaaacgagctggatgagctagaccctgataatgcactgctccctgcaggcctgaggcagaaggatcagaccaccaaggcacccacaggcccctttaaaagagaggagcttttggaccacttggaaaagcaagcgaaggaattyamggrycrakarkacctrrwtmycwryacagskkagmwrygwggaaagatctgggttcccaagcagaagccaatggatcccgtgctggagagcgtgacgctggagccggaactggaggaggccctagcaaatgcctcagatgccgaactatgtgacattgcagctattctgggcatgcacacgctcatgagcaaccagcagtactaccaagccttgggcagcagctccatcgtgaacaaggaggggctcaacagtgtgatcaaacccacacagtacaagcctgtgcctgatgaagaaccaaatycaacagatgtagaggaaacgctggagcgaataaagaacaatgacccagaacttgaagargttaatcttaacaacatccggaatattcccatacccactctcaaggcgtacgcggaarscctgaaagagaactcctacgtgaagaagttcagcatcgtggggacccgcagcaatgaccctgtggcatttgctcttgctgaaatgctgaaggtgaacaaggtgttgaagacgctgaatgtcgagtccaacttcatctccggagctgggatcctgtgcctggtggaagctctcccccacaacacttctctggtcgaactgaaaatcgacaaccagagccagcctttgggcaacaaagtggaaatggagatcgtgaacatgttggagaaaaacacaacactcctcaaatttggctaccactttacccagcaggggccccggctgcgggcatccaacgccatgatgaacaacaacgaccttgtgaggaagaggaggctcgcagacctgacggggcctattattcccaagtgccgcagcggtgtctagtgcgcaaagggacgcccacgcctatrarctggacgtgttctaccgatrrtgtgtgttccccagtggagaccaggaggcaaatgttggcgtgaactcttgtggttcagttctttgtgcactaaggtttagggtaactagtgactgtagttggaccttttataaaatatggttaatgtgaarrwwwwmwwwarwmacagaarwwmarwmwrawaawtatttaaaaatgcagaagccctcaagctggcaggccttgctgcagacagcgtgacactggcagagacagcccaggggcccttggcggncgtgctttggtgcttaggtgcacttacaacatgaatgcatcagcacacaacacttcccaccttagttggaagcatggtggaacaatttattttcagatttgagcatagcaggtcagtaaagaacctgattctgagtttcaacccattggaacgtaaatcagaataagcggcaatgattcagatcagctccaccctagaagaaaagagaccgaattctagaatgaagaacgagcccgggcgttagaagggggacagggggcggggtcaacccacgccccaaatggggggtgaccggggccgggcaaacctctgagagcggggaatacacaatcccggaggggagcaggtgcccggtggctgaaagcggaaaaggccggtgtcgcatcgcgattcggggcggccnnnaa

SEQ ID NO: 253 - DNA, 1748 bp, Rattus norvegicus
tgcagccagctagcgagaaggcgcgagcggcggcgcagccagcagcctcccgccagccggcgagccagtgcgcgtgcgcggcggcggcctcggcggcgaccgggaagcggacgggcgggcgaggcgagcgaggcaggcggtgcgggcgtgcgaggcgaggccgatcgcgagcgacatgggggaccgagagcagctgctgcagcgggcgcgactggcggagcaggcggagcgctacgacgacatggcctccgccatgaaggcggtgacagagctgaatgaacctctatctaatgaagatagaaatctcctctctgtggcctacaagaatgtagttggtgccaggcgatcttcttggagggttattagtagcattgagcagaaaaccatggcagatgggaatgagaagaagctggagaaagtcaaagcctatcgggagaagattgagaaggagctggagacagtttgcaatgatgtcttggctctgctcgacaagttccttatcaagaactgcaatgattttcagtacgagagcaaggtgttctacctgaaaatgaagggcgattactaccgctacctggcagaggtggcttctggggagaagaaaaacagtgtggttgaagcttctgaggcagcgtataaggaagccttcgaaatcagcaaagagcacatgcagccaacacaccccatccggcttggcctggccctcaatttttctgtgttctactatgagatccagaatgcaccagagsaggcctgcctcttakccaaacaagccttcgatgatgctatagctgagctggacacattaaacgaggwttcctataaggactccactctcatcatgcagttgctgcgagacaacctcaccctctggacgagcgaccagcaggatgaagaagccggagaaggcaactgaagacccatcaggtccctggcccttyctttacccaccacccccattatcastgattcttccttgccacaatyactatatctagtgctmaacctatctgtrttggsarvacarvtattyagatctgbcctcctgtsccttggaarsrgbttcagataamccttcatgggcatttgctggacygakggttgctttgagccacmvagcgctccctytktgrattgtgcagagaartgtgttctkaacgagscattttaywabgyctgbtgatctgkdgcawatmcatgtgawgskwattkagtskdkaaakgrgawtwwbscmmcmcargstwtggstgytrtttaaamcmrgykgwtagtgkgbtgktaagcardacatytygtgcatgcaaaartgaawttgrccctctcmccccytyyttyarbtwatggdaactgdcacacgacaacttgttcytthammatmagstttataaactgtttytsgtgrgytttmaggccchkgmtgtgcctytttaaawtwtgatgtgcgsacacyttyttttyaatgmmakgcwtharadgkktttgatatgtgkaacyytttkttttggttgkgaktaagaatcatggrwttattykttkkaactywttggcwattgdtcytgygkmcmctgmmagcatcatgtgtgkyaacctgkgkcaatmwtgakgggtggkwwtgaaatgccmrawtgctwaaawawatgktttggactwamaragagkmaawaaawrmwrmhhwrrvvawwwwaaaaaaaamaaaaaaaaaaaaaaaaactcgagggggggcccggtacccaattcgcccgatagt

SEQ ID NO: 254 - DNA, 1169 bp, Rattus norvegicus
gtcactcagtgacagatggacaatgcaagattgaactcctttctggaataccccatccttggcagtggcgattctgggacctgctcggcgcgagtttactcctctgaccatggaattacaactttccaatcctgcgcggtcagtgccaacagctgcggcggcgacgaccgcttcctagggggcaggggggtgcagatcacctcgccccatcaccaccaccaccaccatcaccatccccagccggctacttaccagacttctgggaaccttggggtttcttattcccactcgagttgtggtccaagctatggcgcgcagaacttcagtgcgccttatggcccctatggattaaatcaggaagcagacsyaagwrgyskgtmsyycccstgckctcsmgmygtytwctcwggaracctytsrtctcccatggtccagcatcaccaccaccaccagggttatgctgggggcacagtgggctcgccccagtacattcaccactcatatggacaagagcaccagagtctggccctggccacgtataataactccttatcccctctccacgccagccaccaagaagcctgtcgttcccctgcttcagagacgtcttctccagcgcagacctttgactggatgaaagttaaaagaaaccctcccaaaacagggaaagttggagagtatggctacgtgggtcaacccaacgcagtgcgcaccaacttcaccaccaagcagctcacagagctggagaaggagttccacttcaacaagtacctaacaagagcccgcagtgagatagccgcgtccctgcaactcaatgagacccaggtgaagatctggttccagaatcgccgcatgaagcagaagaagcgcgagaaagaggggctcttgcccatgtcacccgccacccctcctggaagcgatgagaaaactgaagaatcatctgagaaatccagctcctcgcccagcgccccttctcccgcatcatctacctcagatactctgactacctcccactgagctgccccagcccaactctgacccaggcttctccctgggctgagatttcttacccaaagcacattcttagcttatcttcctttctttccagactctctcttcctttctggtcccatctggggagctcctggctaagataagatatttccaga

SEQ ID NO: 255 - DNA, 4554 bp, Rattus norvegicus
taggaacccagatccatggggtctcatgactagctggttttatcctgttcattggcttaatctggccaggacggtctgtgtttcagatttcggaagcagaagattcagtaactgagaggccaccgtggagctgctggaaactgttacagaaggagcacctctcaaaccgtgcttcaggctctgaaaaaaaggagcacaggggaagcttagtcttgctttggatccaagcaaatgctgtcggagcgatgaactgggactttgtgtgcggactcctggcttgatcttgataggattgggtgtatgttgttggaacgggcaggccaagaggcctgagatctacaggtgccgtctatatggagaaaagcggctgtagtccatttccagtgtgttgggctaaagaatatgacagatacctagcatctagcaaaagaatggcagctgcttatcttgacccaaacttgaatcacacaccaagttcgagtactaagactcacctgggtactggcacggaacggtcccctggtgcaatggaacgagtattaaaggtctttcattattttgaaagcagtaatgagccaaccacctgggccagtattatcaggcatggagacgctactgacgtcaggggaatcattcagaagatagtggacagtcacaaagtaaagcacgtggcctgctatggatttcgcctcagtcacctgcgatcggaggaggtgcactggctgcatgtggacatgggtgtctccagtgtgagggagaaatacgaactcgcccacccaccagaggagtggaaatatgagttgagaattcgttatttgccaaaaggatttctaaaccagtttactgaagataagccaacattgaatttcttctatcaacaggtgaagagtgactacatgctagaaatagctgatcaagtagaccaagacatagctttgaagttgggttgtttggaaattaggcgatcctactgggagatgaggggcaacgccctagagaagaagtccaactatgaagtgttagagaaagatgttggtttaaagcgattttttcccaagagtttactggattccgtgaaggccaaaacactaagaaagctgatccagcaaacattcaggcagtttgccaaccttaatagagaagaaagcatcctgaaattctttgagattctctctccagtgtacagatttgacaaagagtgcttcaagtgtgcccttgggtcaagttggattatttctgtggaactggcgatcggcccagaagaagggatcagttacctgacagacaagggctgcaatcccacacacctagcggacttcaaccaagtgcagaccatccagtactcaaacagtgaagacaaagacaggaaaggaatgctacaactcaaaatcgctggtgctcctgagcctctgacagtgacggccccatccctaaccattgcagagaacatggctgacctgatcgatggatactgccggctggtgaacggagccacgcagtccttcatcatcagaccccagaaagaaggtgaacgggcattgccatcaataccaaagttggccaacaatgaaaagcaaggcatgcggacacatgcagtctctgtgtcagagacagatgactatgccgagatcatygatgaggaagacacatacaccatgccctcaaccagggattatgagattcagagagaaagratagaacttggacgctgtattggagaaggccagtttggagatgtacatcaaggcgtgtacctgagcccagagaatccagctttggctgttgcaatcaaaacatgtaaaaactgtacttcggacagcgtgagagagaagttccttcaagaagccttaacaatgcgccagtttgaccatcctcacatcgtgaagctgattggagtcattacagagaacccagtttggataatcatggagttgtgcacacttggagagctgaggtcatttttgcaagtaaggaaatacagcttggatctagcatctttgatcttatatgcctatcagcttagtacagcactcgcgtatctggagagcaaaagatttgttcacagggacattgctgcacggaatgttctggtgtcttcaaatgattgtgtaaaattaggagactttggattatctcgatatatggaagacagtacttactataaagcttccaaaggaaaattacctattaaatggatggctccagagtcaatcaattttcgacgttttacctcagctagtgacgtgtggatgtttggtgtgtgtatgtgggagatactgatgcatggcgtgaagccttttcaaggagtgaagaacaatgatgtgatcggtcgaattgaaaatggggaaagattaccaatgcctccaaattgtcctcccaccctctacagccttatgacgaaatgttgggcctatgaccccagcagacggcccaggtttactgaactaaaagctcagctcagcacaatcctggaggaagagaaggtgcagcaagaagaacggatgaggatggaatccagaagacaggcaacagtgtcctgggactctggagggtctgatgaagcaccacccaagcccagcagacctggttatcctagcccgaggtccagkgaaggattttatcccagcccacagcacatggtccagaccaatcactatcagatctctggctacccaggttcccatggaatcccagccatggctggcagcatttmcccaggtcaggcatctcttctggaccagacagaattgtggaatcacagacctcaggagatgtccatgtggcagcccagtgtggaggactcagcagctttagatcttcgagggatgggacaggtgcttcctcctcacctgatggaagagcggctaatccgacagcagcaggaaatggaggaagaccagcgctggctggaaaaggaagagcgattcctgaaacctgatgtgaggctctctcgaggcagcatcgacagggaggacgggagttttcagggtccgactggaaaccmwcryrtctatcagcctgtgggaaaaccagatcctgcagctccaccaaagaaaccacctcgccctggagcacctggccacctaagcaacttgtccagcatcagcagccctgcagaaagctacaatgagggtgtcaagccgtggaggcttcagccccaggaaatcagcccccctcccactgccaaccttgaccgatccaatgacaaggtatatgaaaatgtgacgggcctagtgaaggctgtcattgagatgtccagcaaaatccaaccagctcctccagaagagtacgtccctatggtgaaggaagttggcctggccctgcggaccttactggcaactgtggatgagaccattcccatccttccagccagcacccatcgagagatcgagatggcacagaagctgctgaactccgacttgggtgagctcatcagcaagatgaagctggcgcagcagtatgtcatgaccagccttcagcaggagtacaagaagcagatgctgacagctgctcacgccctggctgtggatgccaagaatctacttgatgttattgatcaagcgagactgaaaatgctagggcagacacggccacactgagccactggccattgaasatggctttctgccctttgggagatcttctctagcattccaccagcagcgaggaagtaaccttgtcctcggtcgcccgcactcacagctccaactgatgacagctagctgaaagtctctcttgtataagtttaactamttatacatggttytgattctgttattyttctaaatagtgttcagaaaactctggatccaaaatgtggcatttttctgagaatgaagattgtacattaagaagcttttaaaatatacttggtgttcaaatyggvahrwadrwwmmwaraagtggyaattcatactgaccatgacttcgaattggaagagaagtgtctgaggagggagggctcccaagacactgagactggctatcmykmskgccaraawtmctgtccagaytgartkgcaawmtgctaatywyaytrtaragaagkgcataaaagctatattttgaagaatgagkkgtttcaaaaraaaamttytgcccyccctgtyttcacyttytttcctgkggatcctraagcattgggttgcaaactatytytaraactgacaaaaacttgtytttccyccycaraattytkkgccagttttgkaccaragcactcccaaytrcatcaaraagttccaggaccayccctgttyyccatytttawataatttataagaatgattaaagccatgttgmctyttamarmmamwrarmwaamwgatctcatgcgtctgtcttcccagggaggatcccgcagacaaacagggatgtggttttctttagatgtccagttgttacaccatgcattctgttaggtggttttgagagcataccttccctttagtttgttggggatataaattattctcaggaagaatataataaattgtacagttactctgacctattaaaaaggrgckcswgsaaarrwaaaaaaaaaaaaaaaaa

SEQ ID NO: 256 - DNA, 996 bp, Rattus norvegicus
agcctgcacagccctgagtrgcccctcagagaggatgaatctccatgctctgtgtctgctgctccttctcctgggttccagcaccaaagctggggagatcatcgggggcacggagtgcataccacactcccgcccctacatggcctatctagaaattgtcacttctgacaattacctgtcagcctgcagtggcttcctgatcagacgaaactttgtgctgactgcagctcactgtgcaggacggtctataaccgtcctcctaggagctcataacaaaacatataaagaagacacatggcagaagctcgaggttgaaaagcaattcattcatccaaactatgataagcgtttggttctccatgacatcatgttactgaagttgaaggagaaagccaagctaaccctaggcgtgggaaccctcccactctcggccaacttcaacttcattccacccgggagaatgtgcagggcagttggctggggcagaacaaacgtgaatgaaccagcctctgacacactgcaggaagtaaagatgagactccaggagccccaatcctgcaaacacttcacsarttkkcaacacaagtcccagttgtgtgtgggcaaccccaagaagatgcwaaatgtatacaaggragactctggaggacctytcctgtgtgctgggatagcccaaggcattgcatcctacgtacatccgaatgcaaagccccctgctgtcttcaccagaatctcccattacagaccctggatcaataagatcttgagggagaattaactctggatctcgggccagtgtgtgaggaaatctggagctggaatcgtgcaggttttctgtgacatgggatctggcctgtctgtagttcctgctgaagcccttcctgatccctgagcttccagaaggttcttacaagtcacagaaagttcctaaaagtcwccatcttcataamcctcaataaagagccagatcctagactgcaaaaaaaaaaaaaaaaa

SEQ ID NO: 257 - DNA, 1031 bp, Rattus norvegicus
cggccgcctgcccgcagcagctgcactaggctctctggaaggagtgcacagggcaaaaactscgccatgacctgggacggactgcccacacagccgctgttgatgctgttaatgctgttgttcgctgcgggctccgagtccgccttagcggggtgcccgggctgcgggccgggggtgcaggaggaagacgcggggtcgcctgcagacggctgtgcagagaccggaggctgtttcaggagagaggggcaaccgtgcggggtctacatccctaagtgcgccccaggactgcagtgccaaccccgagagaacgaagagacacctttgcgggcgctgctgatcggccagggccgctgycarygckccagakggcmgtcggaagwsastrccwrssagagcaaaccccatggaggcgcctcccgcccacgtgacagagaccggcaaaagaatccacggacctcggctgcccctataaggcccagtcctgttcaagatggtgaaatgggcccctgccgcagacacttggattcagtactgcagcagctccagactgaggtcttcagaggcggagcaaatgggctctatgtgccaaactgtgacctcagaggtttctaccgcaagcagcagtgtcgttcctcgcaggggaatcgccgtggtccctgctggtgtgtggatccgatgggccagcctttgccagtgtctccagatggccagggaagctctcagtgctctgccaggagcagcgggtgaaacctggtgggagcctccaggaccctggcaggagcatggggctgtcatttgagctctatgtgaagtgatgataactctgtgccccgagatgagacccaccttcaagccctaccccattgtccctgtcacccctgggcctttacacagcaagttagaaagattgttgttggcttgtgtactaataaagctggacacaagggtttgtctttcaatagatcgcagcgagggagctgctctgctacgtacgaaaccccgacccagaagcaggtcgcccgtcacgccgc

SEQ ID NO: 258 - DNA, 4139 bp, Rattus norvegicus
  misc_feature (54)..(54): n is a, c, g, or t
  misc_feature (149)..(149): n is a, c, g, or t
gtggtagtcacgcgtgcgtgtcgtcagagtgctgtggttgttggtgtaagcacnaaagacaagttaaaaacctgccgtgaacaagaattgtcctcacttaccgcttttaccatggtggcgccccaggtttgtgtggtattagaaaaccncaatacctgggggggttactatgcccaacacagacacttagtagcctctcactaccaaaagaaagctaaggtcgaagttgtaaacactacttatgcttgataaccaaagatgagtactgcatccacgtattaaagtacagaggtttgacataggacaacyctkgttctwamccatatttattattctgatcaaaacactcaktgaagctttattattccggaaatctaggatattagtctccaatktktttkaaaacatgcataaaatatttaaggtaagatatgaagaagatggtrtgctcattgctattctttactttrtggataaattgtatagcatattagaaaccggatctggakttaaactggtccaratgattcagagctccatagagcttgattacatgtctcggtcccagktgacggttttkggctccttcagagtgacgtgtttamctctgcragcatatacatcggyckcggtggkygtgmattcartgtgagccrkgatgtakaaagaccagtccttgstgaasgrcagatctgacatctcsatattwggtatcttctttccattsttcastagctcaatttctatctgaggtgggtggaactgagacacgtagcagttgargaagttgggcttsccattctccgstggatggcgagagtacacttgaatttggggagttttctgaatggcaagcacgacggccagagaracaagcaccagaaagatyacggtcaccgagcgagccatcgtgccggtcsgstcwgcaggacgcatcaggatggttgttctgttttgtttgttttcttgagattgctctttctagggaagtgaactgacaggagtccgcttgggtggtatctctacctggaaagagaaaaacagaactagggagcagatgcacactgttgtcagacttctgcaacctgacttatgataggctgggcaaactcatcccaccccagggtgctgaggcacttggcwmtrwtgymagmtgakgscmmttggggktvtgrkbhctgymaykgsyrmwgycrrstatgtctgcacttcgaggctgcacagtcgtgacagagagatgacttgagggggacggcgtttatctccacaacgatgtccataaacagttccaagcagccggygtcctctgcagctggactcatcgccaacacgacttgccagacggagaaccggctttcagtgttcttttcaataatcttcatgacggtggggattgtatctaacagcctggccattgccatcctcatgaaggcatatcagagatttagacggaagtcgaaggcttctttcctgctcttggctagtggcctggtgatcacagacttcttcggccacctcatcaacggagggatagctgtcttcgtatacgcttctgataaagactggatccgcttcgatcaatcgaacatcctgtgcagtgtttttgggatstccatggtgttctctggcttgtgcccacttttcctgggcagtacgatggccattgagaggtgcatcggggtcaccaaccctctattccactctacaaagatcacgtctaagcatgtgaaaatgatactgagcggtgtgtgcatgtttgctgtcttcgtggccctgttgcccatccttggacaccgagattatcaaatccaagcatccagaacttggtgcttctacaacacagagcacatcgaagactgggaagacaggttctatctcttgttcttttcttccctgggactcttagctctcggcatctcattctcgtgcaacgccgtcacgggagtcacacttttgagagtgaagtttagaagtcagcagcacaggcaaggcaggtcycaccacctggagatggtsattcagctcmygrssataatgtgtgtctcctgcgtctgctggagtccctttctggtgacgatggccaacattgcaatcaatggwaataattccccagtgacctgtgagacgamgctctttgctctccgaatggcaacctggaaccagatattagacccctgggtctacattctgctacggaaggctgtccttaggaacctgtacaagcttgccagtcgctgctgtggagtgaacatcatcagcttgcacatctgggaactcagctccatcaagaattccttaaaggttgctgctatctctgagtcaccggctgcagagaaggagaatcagcaagcatctagtgaggctggactgtaagtcaatgcacagctagaagaaagttatgggaacttccgaaacatcttacctgaccagactcagagcataactggaacacttggacctctgtgtgtagttcrggagtacactggtcagacaaagcttctgacttttgttatgctggctgctgcatggttgtgcattttcatttgttggtgtcaacaggagattcaacatggtggagttaagtagagtacacattttatctgcgtgacttatgtttttggaataaatgaatctgttgaggccctgtgmmwwwawwwrammwawwtttccaagcaccttaatgctacctgcaccgtgacatggccatttgaggagcactgacttgcagacaaagcttaaagtaacacaagactttttgtgtttgtgtgtgcagctctgctctgtttaccaacccacgtgtcctcaatgtctgcatgaccatgacatctgagtctcatggtgactttgatggccactatgtaggcagctcagcttgacattgtggggctgatgaggataatcattcttgtcacaactcacatgtgtggttgcttgcatttgttgttgtgaaggtcaattattttttccacattggctgtcctcctataaagtcataggttttcagtgtctaagtaatccccctttcctctgaaaattgtagaggaatacaggctttatcttagcacagattcagctcatgatagcatatcataagccctattgtggatgatgcaaacattgaaatcccacttacacatgccaagaacatggcagacattgctttacctgagctatcatttctgtgtcagagaataaaaaacgatcaagacacawwmraarwmwmwwrragctattgtgtttctgccttacacacacaggcataagggagttctgttaacagtaatttcactaaataagttgaaccacacttccaaaagcctgtgttatcagtgaggagtggaaagatctgaaattagccaggagttgggatcactgttgtggttaacccgaggctaagggacaagattctgtcgccaagtttcccaatcttaattcacacttctcctttgtataatttaacacaaagatactcaatttcagtaatcactctaaacattagttccatcagtggctacggttagtggttatattttataaagaaatgtattttcatatttaaaaaattcctttcttttatcgtttgtctttatttaaaaatttctatttttttctttgctatatgtatgagtgtttcacccgaatgtatttccgagcattacgtaccttcctagaacttacttaaaccagaaaaggacatcgggtccttacagatggttataagctaccatgtggatactaggaattgagcccaggttctctggaagagcagctgtagagagaattttaatccagcaatttgtgaattcaatagacttaaaatagtacctccaacatggtttctctggcaaaagatcacatccgaagagcttctaggtttatatgatctggcttgaatgcagacattctctggattatagtacaatctggctgtaacacagacacacccttagtacacacctttaatccctaacagtgaaggaaagttagtttgtagaaggaagtagtcacttttgaaatcgatgtccagttgagggtcagacagagtgacgaatcagagaaagttttgacagaatgagttagagaaaagatgtgctcaattcacgtgagaacagtacggaaagagaggatgccgaaaaggg

SEQ ID NO: 259 - DNA, 6822 bp, Rattus norvegicus
cagtgttttgtcgtttgcgcaatggcgtgtgtctgccagtagatggcagtgacacgttgagtgccgccaaccttttcttttttctttctttttttttttttttccccttccagggccgttttctgatatatgttgggtaccatagagtgaatctcagaacaggaagcggaggcataagcagagaggattccggaaaggtctctttgttttcatgtccacagagaaagcaagggggaaaaattgaatgtaatttgcaaatccctgtggcccaaatctgaagaactacagggggtggcaccgtccattctaaccatcttggatgctgtcctttgttgagctgtgattcctaaggctctccatcaggcaattcttatgcaagaagctaaacgtaattaaatgtgcaggatgaaaagatggcccaggcactgctggtacccccgggacctgagagcttccgccttttcactcgagaatctcttgctgctatcgaaaagcgtgctgcagaagagaaagccaagaaacccaagaaagagcaagacattgacgatgagaacaaaccaaagccaaacagcgacttggaagctgggaagaaccttccatttatctatggagacattcctccagagatggtgtcagagcccctggaggacctggacccctactatgtcagtaagaaaacttttgtagtgttgaataaagggaaggcgatttttcgattcagcgccacctccgccctgtatattttaactccgctaaaccctgttaggaaaattgccattaagattttggtacactctttgttcagcatgcttatcatgtgcactattttgaccaactgtgtatttatgacgttgagtaatcctcccgactggacaaagaatgtagagtatacgttcactgggatctatacctttgagtcacttataaagatcttggcaagagggttttgcttagaagatttcactttcctccgtgacccatggaactggctggatttcagtgtcatcgtgatggcatatgtgacagagtttgtggacctgggcaatgtctcagcgctgagaacgttcagagttctccgagcattgaaaacaatatcagtcattccaggtttaaagaccatcgtgggggccctgatccagtccgtgaagaagctgtccgacgtcatgatcctcaccgtgttctgtctcagtgtctttgctctaatcgggctgcagctcttcatgggcaacctgaggaataaatgctcgcagtggcccccgagcgattcggcttttgaaaccaacactacttcctacttcaatggcacaatggattcaaatgggacatttgttaatgtaacaatgagcactttcaactggaaggattatatcgcagatgacagtcacttttatgtcttggatggacaaaaagatcctttactctgtggaaatggctccgatgcaggacaatgtccagaagggtacatctgtgtgaaggctggacgaaaccccaactacggctacacaagctttgacaccttcagctgggccttcttgtccctgtttcgactcatgactcaggactactgggagaatctttaccagttgacattgcgtgcagctgggaaaacctacatgatatttttcgtcctggtaattttcttgggctcgttttatttggtgaacttgatcctggctgtggtggccatggcctatgaggagcagaaccaggccacactggaggaggctgaacagaaggaggcagagtttcagcagatgctggagcaactgaagaagcagcaggaggaggctcaggcagtggctgcagcctccgcggcatccagagacttcagtggaataggagggttaggagaacttctggagagttcttcagaagcttccaagttgagctccaagagtgctaaggagtggaggaaccggaggaagaagaggagacagagggaacacttggagggaaaccacagagccgatggagacaggtttcccaagtcggaatcggaagacagtgtcaaacgaagaagcttcctgctctccctggatggcaacccgctgactggtgacaagaagctgtgctctccccaccagtctctcttgagtatccgtggctccctgttttccccaagacgcaatagcaaaacgagcattttcagcttcagaggtcgggcgaaggacgtggggtctgagaatgactttgcagacgatgagcacagcaccttcgaggacagcgagagcaggagagactccctgtttgtgccgcacagacctggagagcgacgcaacagtaacggtaccaccactgaaacggaagtcaggaagagaaggctaagttcttaccagatttcaatggaaatgctggaggattcctctggaagacaaagatccatgagcatagccagtatcctgaccaacaccatggaggaacttgaagaatctagacagaagtgcccaccatgctggtatagattcgccaatgtgtttttgatctgggactgctgtgatgcatggttaaaagtgaagcatcttgtgaatttaattgtgatggatccatttgttgatcttgccataacaatttgcatcgtattaaatacactgttcatggccatggagcactatcccatgacccagcagttcagcagtgtgctgactgtgggaaacctggtcttcactgggatcttcacagccgaaatggtccttaaaatcattgccatggacccctattattatttccaagagggctggaatattttcgatggaattattgttagcctgagtttaatggagctaggcctggcaaatgtggaggggctgtctgtgcttcggtccttcagactgctccgagtcttcaagttggcaaagtcctggcccacactgaacatgctcattaagatcatcggcaactcggtgggcgcactgggcaacctgaccctggtgctggccatcatcgtcttcatttttgccgtggtcggcatgcagctgtttggaaagagctacaaggagtgtgtctgcaagatcaatgtggactgcaagctgccgcgctggcacatgaacgacttcttccactccttcctgatcgtgttccgagtgctgtgtggggagtggatagagaccatgtgggactgcatggaggtcgcgggccagaccatgtgccttattgtgttcatgttggtcatggtgattgggaaccttgtggttctgaacctctttctggccttattgttgagttcctttagttcagataaccttgctgctactgacgatgataacgaaatgaacaacctccagatcgcggtgggaaggatgcaaaagggaattgattttgtgaaaaataagatacgggagtgcttccgaaaagcgtttttcagaaagccgaaagtgatagaaatccaagaaggcaacaaaatagacagctgcatgtccaataacacgggcatcgaaataagcaaagagcttaactaccttaaagacggtaatggaaccaccagcggcgtgggaaccggaagcagtgtggaaaaatacgtaatcgatgaaaatgactacatgtcattcataaacaatcccagcctcaccgtgactgtgccaattgctgtgggagagtctgactttgaaaatttaaatacggaagagttcagcagtgagtcagaattggaagaaagtaaggagaaattaaatgcaaccagctcttctgaaggaagcacagttgatgttgctccaccccgagaaggtgaacaagcagaaattgaacctgaggaggaccttaagccagaagcttgttttactgaagggtgcattaaaaaattccccttctgtcaagtaagtacagaagaaggtaaaggaaaaatatggtggaatcttaggaagacatgctacagcattgtggagcacaactggtttgagacattcattgtgttcatgattctcctcagtagtggcgctttggcctttgaggatatatacattgagcaacgaaagacgatcaagaccatgctggagtatgcagacaaggtcttcacgtacatcttcatcctggagatgctcctcaaatgggtggcctatggatttcaaacctatttcaccaatgcctggtgctggttggacttcctgatcgttgatgtttctttggttagcctggtagccaatgctcttggttactcagaacttggtgccatcaaatccctacggacactgagagctctgaggccgctccgagccttatcccgctttgaaggcatgagggtggttgtaaatgctcttgttggtgcaattccctccatcatgaatgtgttattggtgtgtctcatcttctggctgatttttagcatcatgggtgtgaatctgtttgctggaaagttctatcactgtgttaacacgacaacaggcaacatgtttgaaataaaagaagtgaacaatttcagtgactgtcaggctcttggcaagcaagcccggtggaagaatgtgaaagtcaactttgacaacgttggggctggctacctggcattgctgcaagtggccacattcaaaggctggatggacatcatgtatgcagctgttgattcgcgggacgtcaaactgcagcccatatatgaagaaaacctgtacatgtacctgtactttgtcatcttcatcatcttcggctcgttcttcactctaaatctattcatcggtgtcatcatagacaacttcaaccagcagaagaagaagtttggaggtcaagacatctttatgacagaagaacagaagaaatactacaatgcaatgaagaagctcggctcaaagaaacctcagaagcccatccctcggcctgcaaacaaatttcaagggatggtctttgattttgtaaccagacaagtgtttgacatcagcatcatgatcctcatctgcctcaacatggtgaccatgatggtggaaacggatgaccagagcaaatacatgaccctggttttgtcccgaatcaacctagtgttcattgtcctcttcactggggagtttctgctgaagctcatctccctcagatactactacttcacgatagggtggaacatctttgactttgtggtggtgattctctcgattgtaggaatgtttctcgcagagctgatagagaagtatttcgtgtcccctaccctgttccgagtcatccgcctggccaggattggacgaatcctacgcctgatcaaaggcgccaaggggatccgcactctgctctttgctttgatgatgtcccttcctgcgctgttcaacatcggcctcctgcttttcctggtcatgttcatctacgccatctttgggatgtccaactttgcctatgttaaaaaagaggctggaattgatgacatgttcaactttgagacttttggcaacagcatgatctgcttgttccaaatcaccacctctgccggctgggacggactgctggcccccatcctcaacagcgcacctcccgactgtgaccccgatgcaattcaccctggaagctcggtgaagggggactgtgggaacccatccgtggggattttcttttttgtcagctacatcatcatatccttcctggtggtggtgaacatgtacatcgctgtcatcctggagaacttcagcgtcgccaccgaagaaagtgcagagcccctgagtgaggacgactttgagatgttctacgaggtctgggagaagttcgaccctgacgccactcagttcatagagttctgcaagctttctgactttgcagctgccctggatcctcccctcctcatcgcaaagccaaacaaagtccagctcattgccatggacctgcccatggtgagtggagaccgcatccactgcctggacatcwygwkkgcttttacaaagcgggtcctgggcgagagtggagagatggacgctcttcgaatccagatggaagatcgcttcatggcttccaacccctccaaggtctcttatgagcccattaccaccaccctgaaacggaaacaagaggaggtgtctgctgctatcattcagcgtaattatagatgttatcttttaaagcaacggttaaaaaacatatcgagtaaatacgacaaagagacaatcaagggaaggattgacttgcctataaaaggagatatggttattgacaaattgaatgggaattccaccccagaaaagacggatgggagttcctccacaacctctcctccttcctatgacagtgtaacaaaaccagatwaggraaagtttgagaaagacaaaccagaaaaagaaatcaaagggaaagaggtcagagagaatcaaaagtaaaaagagacaaagaaatgtctttgtaatcaattgtttacagcctctgaaggtaaagtatccgtgtcaactggactctaaggagaggtccatgccaaactgactgtttcaacaaatactcaaggtcagtgcctataccagacagtgacctctgtcactgccactctgtgagacagggtatcaacattgacaagaggttgctgcttccattaccagctgacactgctgaggagaactccattgtgcaagtgacccgtcatcaygcccccaaactccattagtacaacgctcctgtcatctatttttaacattcacatttgccatatttttacaaaatctgtcccagtgtatcttcctggtccccacttcatagtctgttcataatactatgtcactatttttgtaaatgaagtttacgttaagggaaaatatatatataagaatcccatgttgctaagtccacaagtttctccagtaatcataaaaaaatattttgcctgagagatgaaattattgctcaaaacaaaaaaaaawaaattctaatgttaacagtttc

SEQ ID NO: 260 - DNA, 7545 bp, Rattus norvegicus
gagacggcggcggcgcccgtgggatgcggggatcgcgcccccggggccgctgagcctgagcccgctgccccaagccctacgccgagccgagcccgcaccgcgctgcagccgcccaccccggggcgcgggccggggaccatcagcttccttccaggcaacctgaggagagcctgtgcccccagaagcaggatgagaagatggcaaacctcctgttacctcggggcaccagcagcttccgtaggttcacccgggagtcactggcggccatcgagaagcgaatggctgaaaagcaagcccgaggaggttcggccacctcacaggagagccgtgagggcctgcaggaggaggaggctccccggccccagctggacctacaggcctccaaaaagctgccagatctctatggcaacccaccccgagagctcatcggggagcccctggaagacctggaccctttctatagtacccagaagaccttcatcgtgctgaataagggcaaaaccatcttccggttcagtgccaccaatgccttgtatgtcctcagccccttccaccccgtgcgccgagcggccgtgaagatcctggtacactcgctctttagcatgctcatcatgtgcaccatcctgaccaactgcgtgttcatggcccagcacgaccctccgccttggaccaaatatgttgagtacaccttcactgccatctacacctttgagtctctggtcaagattctagctcgaggcttctgcctgcatgcattcaccttccttcgggacccgtggaactggctagacttcagtgtgatcgtcatggcatacacaactgaatttgtggacctgggcaatgtctcagccttacgcaccttccgagtcctccgggccctgaaaactatatcggtcatttcaggcctgaagaccatcgtgggagccctaatccagtctgtgaagaaactggccgatgtgatggtcctcactgtcttctgcctcagtgtctttgccctcattggcctgcagctcttcatgggcaacctgaggcacaagtgtgtgcgtaacttcaccgagctcaatggcaccaatggttccgtggaggccgacggcctagtctggaactccctggacgtctacctcaatgacccagccaattacctgctcaagaatggcaccacggatgtgttactatgtgggaacagctctgatgccgggacatgccctgagggctatcggtgcctgaaggcaggtgagaacccagaccacggttacaccagcttcgactccttcgcctgggccttccttgcactcttccgcctgatgacacaggactgctgggaacgcctataccagcagaccctgaggtccgcaggaaagatctacatgatcttcttcatgctcgtcatctttctgggctccttctacctggtgaacttgatcctggctgtggtggccatggcctacgaggagcaaaaccaagccaccatcgccgagacggaagagaaggagaagcgcttccaggaggccatggagatgctcaagaaggaacacgaggctctcaccatcaggggtgtggataccgtgtcccgtagctctctggagatgtctcctttggccccagtaaccaaccatgagagaaagagcaaaaggaggaaacgactatcttcggggacagaggatggtggggatgacaggctccccaagtcggactcagaagatggtcccagagcattgaatcagctcagcctcacccatgggctcagccggacatccatgaggccccgctcgagccgagggagcattttcacgttccgaagacgggaccaaggctctgaggcggacttcgcagatgacgagaacagcactgcgggggagagcgagagccaccgcacatcgctgctggtaccctggcccctgcgccatcccagcgcccaaggacagcccggccctggagcctcagctcccggttacgttctcaatggcaaaaggaacagcaccgtggactgcaatggggtggtttccttgctgggggcaggtgacgcagaggccacctccccagggagctaccttctccgccctatggtgctggaccgacccccagacacgaccactccgtcagaggagcccggtgggccccagatgctgacacctcaggctccgtgtgcagatggttttgaggagcccggagcacggcaacgggcactcagcgctgtcagtgtcctcaccagcgccctggaagagttggaggagtcccatcggaagtgtccaccatgctggaaccgctttgcccagcactacctcatctgggagtgctgtccactctggatgtccatcaagcagaaggtgaagtttgtggtcatggacccatttgccgacctcactatcaccatgtgcatcgtgctcaatacgctcttcatggctctggagcattacaacatgacggcagagtttgaggagatgctgcaggtcggaaacctggtcttcacgggaatcttcacagcggagatgaccttcaagatcatcgcccttgacccctactactacttccagcagggctggaatatcttcgacagcatcatcgtcatcctcagtctcatggagctggggctgtcccgcatgggcaacttgtctgtgctacgttccttccgtctgctgcgggtcttcaagctggccaagtcctggcccaccctgaacacgctcatcaagatcatcggaaactccgtgggcgccctggggaacctgaccctggtgctggccatcatcgtcttcatcttcgccgtggtgggcatgcagctcttcggcaagaactactcagaactgaggcaccgcatcagcgactccggcctgctgccccgctggcacatgatggactttttccacgccttcctcatcatcttccgcatcctctgtggggagtggatcgagaccatgtgggactgcatggaggtgtctgggcagtcgctgtgcttgctggtcttcctgctcgtcatggtcattggcaaccttgtggtcctgaatctcttcttggccttgctgctcagctccttcagcgcagacaacctcacagcccctgacgaggatggggagatgaacaacctccagctggccctggctcgcatccagaggggcctgcgctttgtcaagcggaccacctgggacttctgctgcgggatcctgcggcggcgacctaagaagcccgcggctcttgccacccacagccagctgcccagctgtatcaccgcccccaggtccccaccacccccagaggtggagaaggtgcccccagcccgcaaggaaacacgattcgaggaggacaagcgacccggccagggcacccctggggattcggagcctgtgtgtgtgcccatcgccgtggctgagtcagacactgaagaccaggaagaggatgaagagaacagccttggcacagaggaagagtccagcaaacaggaatcccaagttgtgtctggtggccacgagccctaccaggagcccagggcctggagccaggtgtcagagaccacgtcctctgaagctggggccagtacatctcaggcagactggcagcaagagcagaaaacggagccccaggccccggggtgcggtgagacccctgaggacagttactccgagggcagcacagctgacatgaccaacaccgccgacctcctggagcaaatcccagaccttggtgaggacgtcaaggacccagaggactgctttactgaaggctgcgtccgacgctgtccctgctgcatggtagacacaacccagtccccagggaaggtctggtggcgattgcgcaagacctgctaccgcatcgtggagcacagctggttcgagactttcatcatcttcatgatcctgctcagcagtggagcgctggccttcgaggacatctacctggaggagcggaagaccatcaaggttctgctggagtacgcggacaagatgttcacctacgtctttgtgttggagatgctgctcaagtgggtggcctacggcttcaagaagtacttcaccaacgcctggtgctggctggacttcctgattgtggacgtctcgctggtcagcctcgtggcaaacaccttaggcttcgccgaaatgggtcccatcaagtcactgaggacactgcgtgcacttcgacccctgagggccttgtcgagatttgagggcatgcgggtggtggtcaatgcgctggtgggcgccatcccctccatcatgaacgtcctcctcgtctgcctcatcttctggctcatcttcagcatcatgggcgtgaacctcttcgccgggaagttcggtaggtgcatcaaccagacagaaggggacctgcctctgaactacaccatcgtgaacaacaagagtgagtgcgagtccttcaacgtgaccggagagttgtactggaccaaggtgaaggtcaactttgacaacgtgggagccgggtacctggccctcctgcaggtggcgacatttaaaggctggatggacatcatgtatgcggctgtggactccagagggtatgaggagcagccgcagtgggaagacaacctctacatgtacatctactttgtcgtcttcatcatcttcggctccttcttcaccctcaacctcttcatcggtgtcatcattgacaacttcaaccagcagaagaaaaagttagggggccaggatatcttcatgacggaggagcagaagaagtactacaatgccatgaagaagctgggctccaagaaaccccagaagcccatcccacggcccttgaacaagtaccagggtttcatattcgacattgtgaccaagcaggccttcgatgtcaccatcatgttcctcatctgtttgaacatggtgaccatgatggtggagacagatgaccagagccctgagaaggtcaacatcttggccaagatcaacctgctcttcgtggccatcttcacaggcgagtgtattgtcaagatggctgccctgcgccactattacttcaccaacagctggaacatcttcgactttgtggtggtcatcctctccattgttggcactgtcctctccgacatcatccagaagtacttcttctccccgacactcttccgggtcatccgtctggccaggatcggccgcatcctcaggctgatccgcggagccaaggggattcgcacgctgctcttcgccctcatgatgtccctgcccgccctcttcaacatcggcctcctcctcttcctcgtcatgttcatctactccatcttcggcatggccaacttcgcttacgtcaagtgggaggccggcatcgatgacatgttcaacttccagaccttcgccaacagcatgctgtgcctgttccagatcaccacatcagccggctgggacggcctcctcagccccatcctcaacacggggcctccctactgcgaccccaacctgcccaacagcaacggctcccgggggaactgtgggagcccggcggtgggcatcctcttcttcaccacctacatcatcatctccttcctcatcgtggtcaacatgtacatcgccatcatcctcgagaacttcagcgtggccaccgaggagagcacagagcccctgagcgaggacgacttcgacatgttctatgagatctgggagaagttcgacccggaggccacccagttcattgagtatctggccctgtccgactttgcagatgccttgtctgagccgctccgcatcgccaaacccaaccagataagcctcatcaacatggatctgcccatggtgagcggagaccgtatccactgtatggacatactgttcgctttcaccaagagggtgctcggcgagtctggggagatggatgccctgaagatccagatggaggagaagttcatggcggccaacccttccaagatctcctacgagcccatcaccaccaccctgaggagaaagcacgaggaggtgtcggccacggtcatccagcgtgccttccggaggcacctgctgcagcgctcggtgaagcatgcctcctttctcttccgccagcaagcgggcggcagtggcctctccgacgaggatgcccctgagcgggagggcctcatcgcctacatgatgaatgggaacttctctcggcgcagtgctccgctctccagctcctccatctcctccacgtccttccccccgtcctacgacagcgtcacgagagccaccagtgataacctcccggtgcgtgcgtctgactatagccgcagcgaagatcttgcagacttccctccatctccagatagggaccgagagtctatcgtgtgaacctggccagggtggccgggacgttcgccattgtgccctgacgaaccttatgcagttaaaaccagtgtcggccgaggccttcctagctctgcagatgagcctccgggtggaggagcctcgaggcagagttccgtgtctctgtgtggaagctggaggcagccggaggagccctggctggtggaggcctgaccctggaggcctggcacaccctagtagccgggtctggccaggcagcaccgcatggctctcaaaagcgactccgtcccagcttctgaggtggaatgggaaacacactgtacatgttgtgaacaagcttccatagatttattatatttgatatttttttacttgagcgaagaacatcttttttccatgaacatcagcagttcacactgcctctccttaaccctgagcaagtgtcaacggaggtgccagaactcggctctcgaagctaacgtggggatccattgtacccaaggggagggtcgtgcgtggctcctgttgcctgggctgaggaaccaggaaggcctaagcactccactcatacacgcgtgtgtgtgcgagcacacttcacatgctagggcgggacataggcctcgggggtcttgggggagccgggatcgcctcaggcaaatgtggtcagcggctctgaaggaggcaggtttttcttcccagcccccaaacgtggggttcttccggtggaactcagtctgcgctcctgttctccccaggactctgttctcctgttttctagtcaggcttcacctgaggacagtgctgccagaattaaaagctctagagagctgccccggtctcagagatgaattctgcccttccttcctctcctggaagagtattactgttgggggtacgagggaggcagcaccccctcacagccaggcacataggtctcccctagtacacggcgggccctgtccaaaggctgagggaagagagggctgttccacatgggccgctgaactgtgtccagctgtgggcagctgcacagcagaggacgccatctccatttcccaggctcccctggggtctctgcctctgaccgagtgtgaaggggattcccactgggactccaactcctcttcagacactgtggaagtgggagggtagcctggccctgcctaggagagaggccctgggtggtcaggcatggttctgtgccctggaagaggacaagccctccatcccatcgggaggggaggcagtgtggcgtctgggcccagcccggggtctgactatcccaggcgtcttctgagaaggctttttcagg

SEQ ID NO: 261 - DNA, 7578 bp, Rattus norvegicus
ggggccgccgtcgctgtcctagccgccgccgctgccgccgccgccgctgccgtcttcaccgcgggagaaggagcacgagacaggacgcccctgagtgaacgccaccatcctgccgacagctccgcccgggctgcttcctttccgcccaggtccccgtcccctcccccctcaggtgccatccgcctccatccgcgccctcgatccccccatccccaggtgagggggctgagccccggtcgcggaggcccggacgagcccggcagggtcaccatttgcagcgcgacatggcaggagctggaggagggaatgatattcaatggtgtttttctcaggtgaaaggagcagttgatgatgacgtagcagaagcagatataatttctacagtagagtttaatcattctggagaattactagccacaggagataaaggtgggagagtcgtcatctttcaacaagagcaggagaacaaaatccagtctcatagcagaggagaatacaatgtttacagcaccttccagagccatgagccagaatttgactacttgaaaagcttagaaatagaagagaagatcaacaaaattaggtggttaccccagaraaatgctgcccagtttttattgtctaccaatgataaaacaataaaattatggaaaatcagtgaaagagacaaaagaccagaaggctataacttgaaagaggaagatggraggtatagagaccctactacagtcactacactacgagtgccggtgtttaggcccatggatctaatggtggaggccagtccgcggagaatatttgccaacgcccatacctaccacatcaactccatttctatcaatagtgattatgaaacctacttatcagcagatgatttgcgaattaatctctggcatctggaaattacagacaggagttttartattgtggacattaagcctgccaatrtggaggagctcacggaggtgatcacagccgcagagttccatcccaacagctgtaacacgtttgtgtacagcagcagtaaagggaccattcgcttatgtgacatgagggcatctgcactctgtgacaggcattctaaactgtttgaagaacccgaagatcccagcaacaggtcgtttttttctgaaatcatctcctcaatttctgatgtaaaattcagccacagtggtcgctatatgatgactagagactatttgtcagtcaaagtttgggacttgaatatggaaaacaggcccgtggagacataccaggtacacgaatacctcagaagtaaactttgctcactgtatgaaaacgactgcatatttgacaaatttgaatgttgttggaatgggtctgacagtgttgtcatgactggatcctacaataatttcttcagaatgttcgacaggaacacaaagcgggatataactctagaagcatcgcgagaaaacaataagcctcgtacagttttgaaaccacgcaaagtctgtgcaagtggcaagcgaaagaaagatgaaataagtgttgacagtctagacttcaacaagaaaatccttcatacagcctggcatcccaaggaaaacatcattgctgtagcgactacaaacaatctgtatatatttcaagacaaagtgaattaggctggcattctctgcagaggagccacttcctgcttagtgagatagttgaatctagcattcgtacctataagagagcggtccattgtggcgtccctttccagtgtttgacagtgtgccattcaacaacacatttgatagccacatggagaaagctgtgcggatgcatcccgggctgtttccatgtctgctagccatttagggaagggaagggcacttttaatttaatgacttcttgcaccatcttgcctggtggactggactggactgtgtcagcattgatgtactccactttttatgccttccattgtgatgacgtcaaacacagtgaacgccttcagtcatgctatggaatttgtgtatcctcattactgtatcatttgtgggagtgcaagggtaatcatttattgaactgcaagagcaagatatttgtgcggaatgatcatgggtggggccaagagaaatttaagaaagcttttaattctcgatgtgttgtcctgggtaactagggaagatgctggagagaccaggattgcacttttctgtgacaggggatggaaatcagatcgcagaatttgtctcaggatgctccatggacaggaaatggtgatgctagagtcctggtgagaagtctccactcagcactggaggctcaggcctttcttcatcctcgggcctggagacagcgatcagtcttggttagatcaatgatattgtccctagtgattccatgcgcctcacatagttttgcaaacttttccttgatgtctgaactcagatcctttgttctgccgtagagcaccatcagctggaaggtttccccgttcttgaaattaatgagatgaaacatgacatatctgtcatagtctgtcttaagtatagtaaatgtattccctccgtcatactcaacaaaatattcggaattccgactggcttgttttattgaggggggacatgggtaagaacaagtaagacagttgagacccaagtgttaacacaaagggaagactggcgcatcctgctcagcgcatttcggcaacagataatatggcccgtgtgctggcccagcccatgctctgacctccaggcgccaggtcccctacctcagtcactcctacccagaccagctgcggacatgcttagcagatccgggtcccagggaaggcgctgcctggccacactctctcaaattgcctatcagaggaatgatgatgacgaagaagaggctgccagggaacggcgccgccgagcccgacaggaaaggctgcggcagaagcaagaggaagaatccttgggacaggtgacagaccaagtggaggcccatgtccagaacagtgcccccgatgaagagtctaagccagccactgcaaatgctcaggtagaaggtgatgaggaggctgctttgctggagcgcctggccaggcgagaagagagacgtcaaaaacgccttcaggaagccttagagcgtcagaaggagtttgatccaaccataaccgatggcagtctctcagtcccaagcagaaggatgcaaaataactcggctgaaaatgagacagcagagggggaagaaaaaggagagagtcgctcaggacggtatgagatggaagaaacagaagtggtcatcacgtcctaccagaagaacagctatcaggatgctgaagacaaaaagaaagaagaaaaggaggaggaggaggaggaagagaagctgaagggagggaaccttggcgaaaatcagatcaaagatgagaagattaaaaaggacaaagagcccaaagaagaagtcaagaacttcttggatcgaaagaaaggatttacagaagtgaaggcgcagaatggagaattcatgacccacaaacttaaacaaactgagaatgctttcagccccagccgttcaggaggccgggccagcggggacaaggaagctgaaggcgccccacaagtggaagccggtaagaggctggaggagctgcgccgacgccgtggggagacagagagcgaagagttcgaaaaactcaaacaaaagcaacakgaggcagccttggagctggaagagctgaagaaaaagagggaagagagaaggaaggttctggaggaagaggagcagagaaggaagcaggaggaggctgatcgaaaagctagagaggaggaagagaagaggaggttgaaggaagagatcgaaaggagaagggcagaagctgctgagaaacgccagaagatgccggaagatggcctatctgaggacaagaagccgttcaagtgcttcactcctaaaggctcatctctcaagatagaggagcgagcagagtttttgaataagtctgtgcagaaaagtggtgtcaaatcaactcatcaagcagctgtggtctccaagattgacagccggctggagcaatataccaatgcaatcgagggaacaaaagcttcaaaacctatgaagcctgcagcatccgatcttcctgtccctgcggaaggtgtccgcaatatcaagagyatgtgggagaaagggagtgtgttttcatccccctctgcctcggggacaccaaataaggaaactgctggcctgaaggtgggggtttccagccgcatcaatgaatggctaactaaatcgccggacggcaacaagtcacccgctcccaagccttctgacttaaggccaggagatgtatctggcaagcggaacctctgggaaaagcaatccgtggataaggtcacttctcccactaaggtctgaaacaatcggagaaagaacccaactgcaagccatcttgctgggccagctcagttggagagggctaatcgctctgtttatatttatgttttccaatatcccagtaaattcatgtatatgctcactatatttaataaccacaagtagaggtgttcatggtcaaagtgctgcctttgcagaggagcctgtttctaaagaaacccatgctgtgaagtaagcttgctactgtcatatgaacagtgataccaaccacatcagaagtcgacaaaagaaaatcgagcttaagattgtccaaggaatgtatgcggtatctaggtggggggaaatgacccataggctttgttttgkcwcagkacagacatcatgtttctgcactttagactaaagcatggaagaaattatctaagtaggcaatcaaaattctctgaaagtgatccacttcagatctgatatagggcagtgwtkwttktytttttttttaaaaaagaagatgtactgttgacatattgcttttcttctatgctgattcatacctagattgggtgattattttagctgacagtggtactgatttttttcttcaggttagttgctttgtggatttctctggtagcgatagtagactgaaccacatttagatataacccaactatgtaatgtatgtgcatacgtgtatacagacacactaatggtagatgactctttcatgctggcgctattctatttcatagtacgcccttgtaactaaccaatatcacagctttcaaagattaaagaaaatcacaatagtatatcaatatttcatatttgccagtagaaacatggaagttaggtatagatatgttttcaatgcccaatgacttataagaaaaaagtattggaaaaataagagattacaagtgtcaaaactagttgaaacttcttataagacatagtatttagtttataattgagagcagtcttgaattccagtgtgaattttattaagtctaccatctggacaaagcccaaaccctgtttatttgtggccgtgaagttcacctcctccacacacaaaaaaagttgacctacatgatacctaaggtgtctcctttctctacgaattccggaattccggaattccccaactgcactgtctccacacagctttccttcccactggttacaagcaaattggacaacaaaatctcatgagatatttgtgatttaattttagtcacaaaacatcttcaaaatgacgaggattttgacagcatgcaaagtggtgaagacactgaagagtggctttggtttggccaatgtgacttcgaagcgacagtgggacttctctagacctggcatcarrctsctttctstgaaggcacagacagcacacattgttctggaagatggaactaagatgaagggctactcctttggccatccctcctcggttgctggcgaagtggtttttaakmctgkctwmssagggtaswcggaagcacttactgatcctgcctacaaggggcagatcctcaccatggccaaccctatcattgggawtggtggggcccctgatacaacggcacgtgatgaactgggactgaataagtacatggagtctgatggmwtcwaggtrgcrggtctgctggtgctgaattacagtcatgactacaaccactggctggccaccaagagtctgggcagtggctgcagsagsagaaggtsmstgcaatttatggagtgggtacaagaatgctgactawwwtmattcrggataagggtaccatgcttgggaagattgagtttgaggccagtctgtggactttgtggatcctaataagcagaatttgattgccsasgwwwswrscaaggatgwcaaggtgtttggcaaaggaaaccccacgaaagtggtagccgtsgactgtgggataaaaaacaatgtcatccgmytkytmsyymagskargwgcggaagtgcatttggtcccctggaatcatgacttcacccagatgsastatgacggacttctgatcgctggaggacctgggaacccagctctgcacagccactaattcmkwmcstgawswagrtkytggagagtgaccgcaaagagccgttgtttggaatcagtacaggaaacataataacaggattggctcgtggcgccaaatcctacaagatgtscatskccwmcagagkamrgaaccaacctgttttgaatatcacaaacagacaggctttcataactgctcagaatcatggctatgctctggacaacaccctccctgctggctggaaaccactgtttgtcaatgtcaatgaccaaacaaatgaggtacacgctctcaacaatccattcaggtggaagtaagaagttatggcttttcatagtctgttttatacttctttcccatgtctatgtggtgtgcatgtgcatatgtgccacacactcgtgtgtgtgcatgtgcatgtctattgtgtaggtgtgtgcacccatgtgtgtccatggggagcccggagcaggacacccggtttcttcctggattgttcttcacttaattgtcgtatacatggccactcgttgaactgaacctttggcttggctggctggtcaataaataagctctcaggaagcgttcagctccattccttaaccctgaggttatagcacatgcactgaccagctccattccttaacgctgaggttataaacgcatgcactgaccagctccattccttaacgctgaggttataaacgcatgcactgaccagctccattccttaaccctgaggttatagcgcatgcactgaccacgtccattccttaacgctgaggttataaacgcatgcactgaccagctccattccttaaccctgaggttatagcgaatgcactgaccagctccattccttaacgctgaggttatagcgcatgcactgaccagctccattccttaaccctgaggttatagcgcatgcactgaccagctccattccttaaccctgaggttatagcgcatgcactgaccagctccattccttaacgctgaggttataaacgcatgcactggcatgcttagcttctcacacaggtgataggaacttggcctcagatccttgcctgtaggtcaagtgctctaagccatggaacgatctccccagacagcctgtcactttaaaaaagtaattgctctcttcctttctaattagtcgacttgttaagggccagcacttgcacctccg

SEQ ID NO: 262 - DNA, 8420 bp, Rattus norvegicus
acggcacccggggctcgtccgccaccgctcttctctgcttctggccaacagctgaagtcacgcagttcctggagtctgaacccaggagacagttcgggacactggggcgttggccccaagctcctcgggctggagaagatctggttcactttctgttgatcccgaaggtggcacaatctattgctgagaagagaacactgcggggcctggagtgggggaatgcaccgtgcccagtgtcctgggcatcagcacgcccaggtcttgcaggcacatctcccagccccaacaagaccaggacacccacctccctgacccaactcctgggcaggcagagagtgaggagtacacagtagaccccgggcattggtgaccacccaaaacccaagggctgcgggctgtagcggctctgttacctaccaccctctggcccctgagcccagaatgcaaggatggccagctcatctctgcccaacctggtccccccgggtccccactgcctgcgccccttcaccccagagtccctggcagccatagagcagcgggcggtggaggaggaggcccggctgcagcggaacaagcagatggagattgaggagcctgagcggaagccacgcagtgacctggaagctggcaagaacctcccactcatctatggggaccccccacccgaagtcattggcatccccctggaggacctggatccttactacagtgacaagaagaccttcattgtgctcaacaaaggaaaggccatcttccgattctctgccacgcctgccctctacctgctgagccccttcagcatcrtcaggagggtggctatcaaggtgctcattcacgcgctgttcagcatgtttatcatgatcaccatcctgaccaactgtgtgttcatgaccatgagcaatccgccttcttggtccaaacacgtggagtacaccttcacggggatctatacctttgagtccctcattaagatgctggcccgaggcttttgcattgatgacttcacattcctccgagacccctggaactggctggacttcagtgtcatcacaatggcgtatgtgacagagtttgtggacttgggcaacatctcagccctgaggaccttccgtgtgctgcgggccctgaagaccatcacggttatcccagggctgaagacaattgtgggagccctgatccagtctgtgaaaaagctgtcggatgtgatgatcctcactgtcttctgcctgagtgtctttgccctggtggggctgcagcttttcatgggaaacctgcgtcagaagtgcgtgcgttggcccccgcccatgaatgacaccaacaccacgtggtatggcaatgacacttggtacagcaatgacacttggtacggcaatgacacttggtacatcaatgacacttggaacagccaggagagctgggccggcaactctacctttgactgggaggcctacatcaatgacgaagggaacttctatttcttggagggctccaatgatgctctgctctgtgggaatagcagtgatgctgggcactgccctgagggctacgaatgcataaaggctgggcggaaccccaactatggctacaccagctatgacaccttcagctgggctttcctggctctcttccggctcatgacrcaggactactgggagaaccttttccagctgaccctacgagctgctggcaagacctacatgatcttcttcgtggtcatcatcttcctgggctccttctacctcatcaatctgatcctggccgtggtggccatggcgtacgctgagcagaatgaggctaccctggccgaagaccaggagaaagaggaggagttccaacagatgcttgagaaatacaaaaaacatcaggaggaactggaaaaggctaaggctgcccaggctctggaaagtggagaggaggcagatggggacccaacccacaacaaagactgcaatgggagcctggatgcatccggggagaaggggcccccaaggccaagctgcagcgcagacagtgccatctcagatgctatggaggagctggaagaggcccatcagaagtgcccaccgtggtggtacaagtgtgcacacaaagtcctcatctggaactgctgtgccccgtgggtgaagttcaaacatataatctacctgatcgtcatggacccctttgtggacctgggtatcaccatctgcattgtgctcaacaccctcttcatggccatggagcactaccccatgaccgagcactttgacaacgtgctctccgtgggcaacttggtcttcacaggcatcttcactgcggagatggtgttgaagctgattgccatggacccctacgagtatttccaacagggctggaacatctttgacagtttcatcgtcaccctcagcctggtggagctgggcctggccaacgtacaggggctgtcagtgctccgttccttccgcctgctgcgtgtcttcaagctggccaagtcatggccaacactcaacatgctcatcaaaatcattggcaactcagtgggcgcgctgggcaacctgaccctggtgctggccatcatcgtcttcatcttcgccgtggtgggcatgcagctgttcggcaagagctataaggagtgtgtgtgcaagatcgcctcagactgcaacctgcctcgctggcacatgaacgacttcttccactccttcctcatcgtcttccgcatcctctgcggggaatggatcgagaccatgtgggactgcatggaggtggccggccaggccatgtgcctcaccgtcttcctcatggtcatggtcattggcaacctggtggtcctgaatctgttcctggctctcctgctgagttccttcagtgctgacagcctggcggcctcggatgaggatggcgagatgaayaacctacagattgccatcgggcgtatcaagtggggcatcggttttgccaaaaccttcctcctggggctgttgcgtggcaagatcctgagccccaaggaaataatactcagcctcggtgagcccgggggtgccggggaaaatgccgaggagagtactcccgaggatgagaagaaggagccgccaccggaagataaggagctgaaagacaatcatatcctgaaccacgtgggcctgaccgatggcccccgctccagcatcgagctggaccaccttaacttcatcaacaacccctacctcaccatccasgtgcccattgcctccgaggagtctgacctggagatgcccacagaggaggagacagacgccttctcggagcctgaggatatcaagaagcccctacagcccctctacgacgggaactcctccgtctgcagcacagctgactacaagccccctgaagaggaccccgaggagcaggctgaggagaaccccgagggggagcagcctgaggaatgcttcacggaagcctgtgtgaagcgctgcccctgcctctatgtggacatctcccagggccgtgggaaaatgtggtggacactgcgcagggcctgtttcaagattgttgagcacaactggtttgagaccttcattgtcttcatgatcttgctcagcagtggagccctggccttcgargacatctacattgaacagcgacgagtcatccgcaccatcctggaatacgccgacaaggtcttcacctacatcttcatcctggagatgttgctaaagtgggtcgcctacggcttcaaggtgtatttcaccaatgcctggtgctggctcgacttcctcatcgtggacgtctccatcatcagcctggtggcaaactggctgggctactctgagctggggcccatcaaatccctgcgcacactccgggccctgcgacctctgagggcactgtctcgatttgagggtatgagggtggtggtgaacgccctcctgggagctatcccctccatcatgaacgtcctcctcgtctgcctcatcttctggctcatcttcagcatcatgggggtcaacttgtttgctggaaagttctactactgcgtcaacaccaccacctctgagagattcgacatctcggtggtcaacaacaagtccgagtstgagagcctcatgtatacaggccaggtccgctggatgaatgtcaaggtcaactacgacaacgtgggtctgggctatctctccctccttcaggtggccacattcaagggttggatggatatcatgtatgcagctgtggactcccgggagaaagaggagcagccasactatgaggtgaacctctacatgtacctctacttcgtcatcttcatcatcttcggctccttcttcaccctcaacctcttcatcggtgtcatcatcgacaacttcaaccaacagaagaagaagtttggagggaaagacatcttcatgacagaggaacagaagaaatactacaaygcgatgaagaagcttggctccaagaagccccagaagccaattccccggcctcagaacaagatccagggcatggtgtacgacttcgtgacgaagcaggtgtttgacatctccatcatgatcctcatctgcctcaacatggttactatgatggtggagacagatgaccagagccagctcaaggtggacatcctgtacaacatcaacatggtcttcattatcatcttcacaggggagtgtgtgctgaagatgtttgccctacgccattactacttcaccattggctggaacatctttgactttgtggttgtcatcttgtccatcgtgggccttgcgctctctgacttgatacagaaatactttgtgtcacccacgctgttccgtgtgatccgcttggctcggatcgggcgtgtcctgcgtctgatccgcggggccaagggcatccggacgctgctgttcgccctgatgatgtccctgcccgccctcttcaacatcggcctccttctctttctggtcatgttcatctactcgatcttcggcatgtctaacttcgcctacgtcaagaaagagtcaggcatcgacgacatgtttaactttgagacctttggcaacagtatcatctgcctcttcgagatcaccacgtcagccggctgggacgggcttctgaaccccatcctcaacagtgggcccccagactgtgacccgacgttggagaacccgggtaccaatgtcaggggggactgcggcaacccttccatcggcatctgtttcttctgcagctacatcatcatctccttcctcatcgtggtcaacatgtacattgctatcatcctggagaatttcaacgtggccaccgaagagagcagcgagcccctcagtgaggatgacttcgagatgttctatgagacctgggagaagttcgacccggacgccactcagttcatcgactacagccgcctctcggactttgtggacaccctgcaggagccrctgaaaatcgccaaacccaataagatcaagcttatcacgttagacctgcccatggtgcccggcgacaagatccactgcttggacatcctctttgccctgaccaaagaggtactgggtgactctggggagatggacgccctcaagcagaccatggaggagaagtttatggcagctaacccttccaaggtctcctatgagcccatcaccaccaccctcaagaggaagcaggaggaggtgtgtgctatcaaaatccagagggcctaccgccgccacctgctgcagcgctccgtgaagcaggcctcttacatgtaccgtcacagccaggacggcaatgrcgacggggcccccgagaaggagggattgcttgccaacaccatgaacaagatgtatggccatgagaaagagggtgatggtgtgcagagccagggggaggaagagaaggcctctacagaggatgctggacccaccgtggagcccraacccaccagcagctcagatactgccctgactccttctcctccaccactacccccctcatcatcaccgccacaagggcagacagttcgcccaggggtcaaagagtctcttgtctagatggcagcgtcaaggctgcacgcagagttggaggggaagggctttgagatgggggctatacaggacttgacacctgggctgaggggtatggaaattgtgctcagggttcaggtgggtcggaagcccctgctgcctgatttcatctttacgatgctctgacattctgttggccaggggaggccaggacatctgaatgctgtttccttcttgggggagagccagcataccttggaggggttggccaccttcctgtcactactttaagggcccaggaccccagctctagccaagacaaagacgaatcttaacccccaaacctacacctgacccccagagcttagctatccctctcgcccccataattctagggtgcagcttccccctgacagctcaggaatgccctgtaaaaggggaaatggttctggtacagaaccaattggccgctggatccggatgtatcaggctggaaacatgacttctgaaacctttcacccagtcagatccaggccggtgggcagctcccctggctggcccctgggggaagaactaaggaaggattgccytgagaaattacctttctstagattgcgtggatgggtcaaacaggmtgggtcytgccagstgcattcatgcccktgagcctgagcgcccacatstgcctggggtcaggytggaagctstbtatcaagaatcgcccgttcccgcctccctgccttctttctttgaataccagggytcbtgggagccccatcaaacmcgaaagactgccttcctcctgtctaatcwctgccccccccttccctgccccttccctgcttcctcaagtgactctgagaatgctagaactcagcacacgggagatgagttgatactggggcatgcagtgagaaggctcaccaggcttggctttggtcttctcattgcctgaaagcaagttttcccctgagacagggtttcttttctccgtgtagccctggctgcctggaattcattctgtagatcgggttagcctcaaactcaggtatctgcctgactctgcctcctgygtgctgaaattaaaaacccacaccaccactgccaararraaarmmwmwwwrcttagctctgctcaccaggacctgactacaccacactcagagaacagagaccaggcttggaagggggaatgagggtcctgctcagaggtctctggattcagtagtcccttgtgtgtgtgcctgcacatctgtgcttgtgagcccgaggtcatgagtttgcgcacgactgttataatgtattacgaacccctgtgtctgcagatacacatgtgtctgtgaatgtttgtgcttgtgtgtgtgtgtgtgtgtgaagagagagagagagagagagagagagagagagagagagagagagagagaacattttgtcttctccacacgtttgttcctctaagcatccctaaatgtggaagagttcattttgctatgcaggagtatataaggaggaacacataactaagctttgcaaagtctcctcttggcccaaattccttttctttttcttcttgtttctttctttctttttttttttttttttttggttctttttttcggagctggggaccgaacccagggccttgcgcttcctaggcaagcgctctaccactgagcwmrakscccagcccttcttcttgtttcttataaaccaattgcgtaaaactcaggaagcggcaaaacgttcaaaagaagatgtgtgtgcacgtgtaatcgcatgtgcaggcaccacgggtcttcttacttgccttgttccctcggccctccctgcctcacctggatgtccctctggctcccccttctgagctgctgtctctccctttctctgtttcttgtcctcacacccatgkcctcatcccctmtatttctccttcccatgtctcttgtgtcaaggagttgagtcctcctccctgtggcgacykcccccctcagaaggtccctgtagtgggagtcagtagtcccttgcccagaacccagttcctacgcctttcctctacatggatcaagcctggcttggccctcacagcctcaggaatctataaagagtaaagagtcactgtggaggaagatctgtgagcagagcctgctgtcgctgcctgtggacccccactctgctgagtgagcccagctcccaccttgtctaggtgggaaccagcctgaatccaggctgtyggaatagcttctttgtacagttcttataataaaccctcacctgatgcctcwrrrawrwrrwmwmmwwmaaacctccgtgtgggtgagggctgagggaggctagaagaagggtgggtgagccagcaatggcaaccaacagggatggtgagtttgaggaagtcagggcaggacaggaactctggggttgaaagctgagttccccctccctccttcagcagccctttctcccggcaaccaagatctg

SEQ ID NO: 263 - DNA, 2413 bp, Rattus norvegicus
gtctcaggcagaggtccagactcagtggaagcagaggagagagcctgaaacctggcgagcaccatgagcaacaaatgcgatgtgatcgtggtggggggcggcatctcaggtatggcagcagccaaacttttgcatgactgtggcctcagtgtggtggttctggaagcacgagactgtgtgggaggcaggacttacacaattaggaataaaaatgttaaatatgtggaccttggaggatcttatgttgggccgacccagaatcgtatcttacgattggccaaagagctaggattggagacctataaagtgaatgaagttgagcggctgatccactttgtaaagggaaaatcatatgccttcaggggcccattcccaccagtgtggaatccaatcacttacctagattataacaacctctggagaacaatggatgagatgggccaagagattcccagtgatgctccatggaaggcaccccttgctgaagagtgggactacatgacaatgaaagagttgctagataagatctgctggaccaactctacaaagcagattgccacactctttgtgaacctatgtgtaactgcggagacccatgaggtttctgcactgtggttcctgtggtatgtgaagcagtgtgggggtacaaccagaatcatatcaacaaccaatggaggacaggagaggaaatttattggtggatctggtcaagtgagtgagcggataaaggatatccttggggacagagtgaagctggagaggccggtgatccacattgaccagacaggagaaaatgttgttgtgaaaaccctaaaccatgaaatatatgaggctaaatatgtgattagtgccatcccacctgttttgggcatgaagattcaccatagtcctcctctgcccattctaagaaaccagctgattactcgtgtgcctttgggttcagttattaagtgcatggtttattataaagaacccttctggaggaaaaaggatttctgtggaaccatggttattgaaggagaggaagctccaattgcgtacacattggatgataccaagccagatgcaggctgtgctgctataatgggatttatccttgctcacaaagctagaaaactggtacgccttactaaagaagaaagactgaggaagctctgtgagctatacgcgaaagttctgaactctcaagaagctctgcagccagtccattatgaagagaagaactggtgtgaggagcagtactccgggggctgctacacagcctacttccctcctggcatcttgacccagtatggaagggttctacgccagccagtgggcaagattttctttgcaggcaccgagacagcttcacattggagtggctacatggagggggctgtagaggctggagagagagctgccagagagattcttcatgccattgggaagattccagaggatgaaatttggcagccagaaccagaatctgtggatgtcccagcaagacccattaccaacaccttcctggagagacacttgccttctgtaccaggtctactaaagctgcttggattgaccaccatcttgtcagcaacagctcttggtttcctggcccacaaaaagggtctgtttgtacgtttctaaagatgggctttaggaccatatccacaggtttctcattcagtgtgtcacaaaagcttttggaaggagttgggataaaaatctgacaaaggtgcagagattatggagtgagaaagcacagtaacttggtctccattttggctatcttttagcatcgctgtggtccactcattttcaactttcctgcactctgaatattgagaacagatacacaggctctctcacaacctacctgccctatgcacatagttgtttttcaaaaccctatgcctttgtgcttgtctttcttctggtgtgttaggtcctcacctatatcaagttcttcatcattgtacctagaatcctgtcttgttagaaccagmasgmrktagacactgtagcttattgtctactttagagttaaataaaccaaatgcaacagaagtgraatctaaccacacaaggcctacacaaagctactggtatttgggtgactggaacacaagctgatgcttttctcacctcccaaggttcattcccctgtgatcctcctccaccttatgtcatagtcattcacggatcattgttcttgtggatttactctgtattaactggtaytgtgttactcagtagattcttctaggcttgctattttgtgtagtgttgccagctgattctaatttttcttgagaatgggagtcttgtctttgtcatttcttttttscmtsttycwgtatsmttycwykmatwgatkkaagasawrmttaaayarktrwmaataaakmtkttykaccataaaaaaaaaaaaaaa

SEQ ID NO: 264 - DNA, 2462 bp, Rattus norvegicus
gatggctgcaccatgagcgtctctgcactgagctccacccgcttcacgggcagcatctctggcttcctccaagtggcctccgtgcttggtctgcttctgctgctggtcaaagcagtccagttctacctgcaaaggcaatggctactcaaggctttccagcagttcccatcacctcccttccactggttctttgggcacaagcagtttcaaggtgacaaagaactacagcaaattatgacatgtgtggagaatttcccaagtgcctttcctcgatggttctggggaagcaaagcctacttaattgtctatgaccctgactacatgaaggtgattctcgggcgatcagatccaaaggccaatggcgtctacagattgctagctccttggatcggatatggtttgctcttgctgaatggacaaccgtggttccagcaccggcgaatgctaaccccagccttccactatgacattctgaaaccctatgtaaaaaacatggctgactccattcgactgatgctagacaaatgggaacagctggcaggtcaagactcctctatagaaatctttcaacatatctccttaatgaccctagacactgtcatgaagtgtgccttcagccacaatggcagtgttcaggtggatggaaattacaagagctatatccaggccattgggaacttgaatgacctctttcactcccgtgtgaggaacatctttcatcagaatgataccatctataatttttcttccaatggccacttgttcaaccgtgcttgtcaacttgcccatgatcacacagatggtgtgatcaagctaaggaaggatcagctgcagaatgcgggagagctggaaaaggtcaagaagaaaagacgtttggattttctggacatcctcttacttgccagaatggagaatggggacagcttgtctgacaaggacctacgtgctgaggtggacacatttatgttcgagggtcatgacaccacagccagtggagtctcctggatcttctatgctctggccacacaccctaagcaccaacaaagatgcagagaggaagttcagagtgtcctgggggatgggtcctccattacctgggatcacctggaccagattccctacaccaccatgtgtatcaaggaggccctgaggctttacccacctgttccaggcattgtcagagaactcagcacatctgtcaccttccctgatgggcgctctttacccaagggtatccaagtcacactctccatttatggtctccaccacaacccgaaggtgtggccaaacccagasrygwkkgacccttccaggtttgcaccagactctccccgacacagccactcattcctgcccttctcaggaggagcgaggaactgcattgggaaacamkwkgctaygmgysmgatswmgstgatygtsgycctgaccctgctccgctttgagctactgccagatcccaccaaggtccccatccccttaccacgacttgtgctgaagtccaaaaatgggatctacctgtatctcaagaagctccactaattccgttgtggagctccgaaatctgaaatgagtttcactggcagaaagctgagttggtggtgtgactagccttcttcagaagagtgcttcagagagtcctctcctcctctcttcagtacagatcacccttctcagcactggaatattcctctgctttaaagccagcacccttcccataccccctcttctaaaagccttcccttttacaaatgttcttawgacatcatcaagaccactgaaaaactccaarawaawwwmmmawmwcaatattccttactccatctaacctactaagtcccttttgaattatgaggaataattcaatttgttccatgggctccaaaactcaaggcctgagcattattgtgaaacctttattcagcctaatatcatcttcacaagactgttacctggtacgttcatctaaatctcccctgcatagtctctctacctgactattcctcacacaagtttctttaccttccctcctttctccaataaagtgtccagtgtcctgcacaaaaagctcaaggagaactgattatcaccttctgattcgttcattgatgcattcaaattaaacctccacatagtagagactttttcaactattataaaaaccatcctgagccagacctgcagtcaacagcaagagcaggaagcgcataggaactacacctgcaaccaagctggcacaaagaccaagaattctgaagcagcccaaactcaagatgacatatttttacaagttagagaaaaatcaagatctgagttatcttgacaaactcgggatggaaagtaggagggaggggaaagcaaataaatacttccttattgtgtagcataaaaaaaccgaattcgtaggagggaggggaaagcaaataaatacttccttattgtgtagcataaaaaaaccgaat

SEQ ID NO: 265 - DNA, 4213 bp, Rattus norvegicus
aatattggtttgttaaggcagtttctgtagagsywkcwwmgrgaccagtcgcgcagtccgcgctgctgtcctttccgccttttccgcgcgggtgttcgagcagcgccaaacacgcttcagcacctcggacagcatccgccgcgctcgcccggggctcctagagaacccgggggcgcttgaccgcgcgcgggcggcccgcgsgtcgtacatcgcgaggtcgtcgcactcgcgcaacccagagccaggcccgctgtgcccggagctcatgagcaccatgcacctgctgacattcgccctgcttttttcctgctccttcgcccgcgccgcctgcgaccccaagatcgtcaacatcggcgcggtgctgagcacgcgcaagcatgaacagatgttccgcgaggcagtaaaccaggccaataagcgacacggctcttggaagatacagctcaacgccacttctgtcacccacaagcccaacgccatacagatggccctgtcagtgtgtgaggacctcatctctagccaggtctacgctatcctagttagccacccgcctactcccaacgaccacttcactcccacccctgtctcctacacagctggcttctacagaatccctgtcctgggactgactacccgaatgtccatctactctgacaagagtatccacctgagtttccttcgcacggtgccgccctactcccaccagtccagcgtctggtttgagatgatgcgagtctacaactggaaccacatcatcctgctggtcagcgacgaccacgagggacgggcagcgcagaagcgcttggagacgttgctggaggaacgggagtccaaggcagagaaggtgctgcagtttgacccaggaaccaagaatgtgacggctctgctgatggaggcccgggaactggaggcccgggtcatcatcctttctgcaagcgaggacgacgctgccacagtgtaccgcgcagccgcaatgctgaacatgacgggctctgggtacgtgtggctggtcggggaacgcgagatctctgggaacgccctgcgctacgctcctgatggcatcatcggacttcagctcatcaatggcaagaatgagtcagcccacatcagtgacgccgtgggcgtggtggcacaggcagttcacgaactcctagagaaggagaatatcactgacccaccgcggggttgcgtgggcaacaccaacatctggaagacaggaccattgttcaagagggtgctgatgtcttctaagtatgcggacggagtgactggccgtgtggaattcaatgaggatggggaccggaagtttgccaactatagtatcatgaacctgcagaaccgcaagctggtgcaagtgggcatctacaatggtacccatgtcatcccaaatgacaggaagatcatctggccaggaggagagacagagaaacctcgaggataccagatgtccaccagactaaagatagtgacaatccaccaagagcccttcgtgtacgtcaagcccacaatgagtgatgggacatgcaaagaggagttcacagtcaatggtgacccagtgaagaaggtsatctgtacggggcctaatgacacgtycccaggcagcccacgccacacagtgccccagtgctgctatggcttctgcatagacctgctcatcaagctggcgcggaccatgaattttacctatgaggtgcacctggtggcagatggcaagtttggcacacaggagcgggtaaacaacagcaacaaaaaggagtggaacggaatgatgggcgagctactcagtggccaagcggacatgattgtggcaccactgaccatcaacaatgagcgtgcgcagtacatagagttctccaagcccttcaagtaccagggcctgaccattttggtcaagaaggagattcccaggagcacactggactcatttatgcagccttttcagagcacactgtggttgctagtaggactgtcagttcatgtggtggctgtgatgctgtacctgctggaccgcttcagtccctttggccgattcaaggtgaacagtgaggaggaggaggaagatgcactgaccctgtcctctgccatgtggttttcctggggcgtcctgctcaactccggcattggggaaggtgccccccggagtttctctgcacgtatcctaggcatggtgtgggctggtttcgccatgatcatagtggcttcctacactgccaacttggcagctttcctggtgctggatcggcctgaggagcgcatcacgggcatcaatgaccccaggctcagaaacccctcagacaagttcatctacgcaactgtaaagcagagctccgtggacatctacttccggaggcaggtggagttgagtaccatgtaccggcacatggaaaaacacaattacgagagcgcagctgaggccatccaggctgtgcgggacaacaagctgcacgcctttatctgggactcggccgtgctggagtttgaggcttcacagaagtgcgatctggtgaccacgggtgagctgttcttccgctcaggctttggcatcggcatgcgcaaggacagcccctggaagcagaacgtttccctgtccatactcaagtcccatgagaatggcttcatggaagatctggataagacatgggttcggtatcaggaatgcgactcccgcagcaatgctcctgcaaccctcacttttgagaacatggcaggggtcttcatgctggtggctggaggcatcgtagctgggattttcctcattttcattgagatcgcctacaagcgacacaaggatgcccgtaggaagcagatgcagctggcttttgcagccgtgaacgtgtggaggaagaacctgcaggatagaaagagtggtagagcagagcccgaccctaaaaagaaagccacatttagggctatcacctccaccctggcctccagcttcaagagacgtaggtcctccaaagacacgagcaccgggggtggacgcggcgctttgcaaaaccaaaaagacacagtgctgccgcgacgcgctattgagagggaggagggccagctgcagctgtgttcccgtcatagggagagctgagacgccccgcccgccctcctctgcccctcccccgcagacagacgcacgggacagcggcctggcccacgcagagccccggagcacgacggggtcgggggaggagcactcccagcctcccccaggccgtgcccgcctgcccaccggtcggccggctggccggtccaccctgtcccggccccgcgcgtgcccccgacgtcggagctaacgggccgccttgtctgtgtatttctattttacagcagtaccatcccactgatatcacgggcccgctcaacctctcagatccctcggtcagcaccgtggtgtgaggccccccggaggcgcccacctgcccagttagcccggccaaggacactgatgagtcctgctgctcgggaaggcctgagggaagcccacccgccccagagactgcccaccctgggcctcccgtccgcctgctctgctgcctggcgggcagcccctgcaggaccaaggtgcggaccagagcggctgaggatgggccagagctgagccggctgggcagggccacagggcgctccggcagaggcagggccctgaggtctctgagcagtggggtgaggggcctaagtggccccggtcggaggagtctggagcagaaatggcagccccatccttcctccagccactaccccaagctacagtgggggcctatggccccagcttgctaggtcacccccgacccttcctccagcgcctgctctctgcaacttgatttccacctctctcctgctgcaccaccctcccacgacatttccccaccccattcactgggttgtctctgacctttcccagggctagccttcactgccctagtggcagtgcttcaggggtgctttctggctcccagacatctagggctccagactccaagagggctgagccttctcttctgtccgcagccacaataggcttcctcagacgctggctcgtgatgagtcccgcaccttgggcaccagggagcgccatctgcctcccagtccggtgtcactcaccccactaccttgtacatgaccagctctcccagtgtcccagtgtctgccccagggacaccgggcgcgcacagccacccctaatcccggtattcagtggtgatgcctaaaggaatgtcag

SEQ ID NO: 266 - DNA, 3294 bp, Rattus norvegicus
cggacgcgtgggcagccacacaccccaaggcctccaagatgagctacacgctggactcgctgggcaacccgtccgcctaccggcgcgtcaccgagacccsgtccagcttcagtcgtgtgagcggttccccgtccagcggcttccgctcgcagtcctggtcccgcggctcgcccagcaccgtgtcctcctcctacaagcgcagcgcgctcgccccgcgcctcgcctacagctcggctatgctcagctcggccgagagcagcctcgacttcagccagtcctcttcgctgcttaacggcggctccggcggcgactacaagctgtcccgctcaaacgagaaagagcagctgcaggggctgaacgaccgtttcgccggctacatcgagaaagtgcactacttggaacaacagaacaaggagatcgaggcagagatccacgcgctgcggcagaagcaggcctcgcacgcccagctgggtgacgcttacgaccaggagatccgagagctgcgcgccaccctggagatggtgaatcacgagaaggctcaagtgcagctggactctgatcacttggaggaagacatccaccggctcaaggagcgcttcgaggaggaggcgcggctgcgggwcgayrcsgaggcwgccatcygrsckstrcscawwsmcwtmgmkgastyrwcgrygrytmmggyggmgmtgkacaagaagktkcagtcgctgcaggatgaggtgkcmttcstgcggagcaatyacgaagaggaggtgrccgacctgctggcccagatccaggcgtckcacwtcaccktagagcgcaaagactacctgaagacagacatctccacgkcgctgaaagagatccgctcccagctcgagtgtcactccgaccagaacatgcaccaggccgawgmgtggttcaaatrccgmtacrccaagctcrccgaggcggccgagcagaacaaggaggccatccgctccgctaaagaagagatcgccgagtaccggcgccagctgcagtccaagagcattgagctcgagtcggtgcgaggcactaaggagtccctggaacggcagctcagcgacatcgaggagcgccacaaccacgacctcagcagctaccaggacaccatccagcagctggaaaatgagcttcggggaacraagtgggaaatggctcgtcatttgcgagaataccaggatctccttaacgtcaagatggctctggacatcgagatcgccgcatataggraactactggagggtgaagagaccagatttagcacattttcaggaagcatcactgggcctctgtacacacaccgacagccctcagtcacaatatccagtaagattcagaagaccaaagtcgaggcccccaagctcaaggtccaacacaaatttgtggaggagatcattgaggagactaaagtggaagatgagaagtcakwwwtkkwwkwykyyctsmcwsyymttkcwsmkswattggcagmskctgccaaagaggagaaagaagaggcagaagaaaaggaagaggaaccggaagttgaaaagtctcccgtgaagtctcctgaggctaaggaagaggaggaaggggaaaaggaggaagaagasgaaggccaagaggaagaagaggaggaagatgaargtgtcaagtcagaccaggcagaagagggaggatctgagaaggaaggctcgagtgaaaaggatgaaggtgagcawraaraaraarrdraaactgaggcagaaggtgaaggagaggaagcagaagctaaggaggaaaagaaaacwgagggaaaggtcgaggaaatggctatcaaggaggaaatcaaggtcgagaagcccgagaaagccaagtcccctgtgccaaaatcaccsgtggaagaagtaaagccaaaaccagaagccaaagccggaaaggatgagcagaaggaggaagagaaagttgaggagaaraargaggtagccaaggaatcacccaaggaagagaaggtggagaaaaaggaggagaagccaaaagatgtyccagataaaaagaaggctgagtccccagtgaaagaaaaggccgtagaggaaatgatcaccattactaagtcggtaaaggtgagcctggagaaagacaccaaagakgagaagcctyagcagcagkagaaggtgaaggagaaggcagassmskagkskssyagtsmsswssmwvtbbbtbhywhwhryyybywrkdatyywwkawgkwakwcatagctatyaatggggaggtggarggwaaagagraggakgakcaggramctcmsgagaagggcagtgggcaagargaggagaaaggggtggtcactaatggcttwkatgtgagccykgcggagraaaagaaaggggaggakagaaktkatgacaaagtggtggtgaccamsaaggtakaaaaaatcaccagcsasgrrggcgatkktgctaccaaatacatcaccaaakykgkkactgtcactcaaaaggytgaagagcatgaggagacctttgaggagaagctggtgtcaactaaaaaggtagaaaaggtcacttcacatgccatagtcaaggaagtcacccagsgtgactaagatcggagtccattgcaaaaggttaagccatacaacaatttcaaaatgcatgtgattgacagcttyaaaacagaatgsgttctcccatgagggctccagacawtgkawtttcctttgtgcratatgagggaactgcatgcmagctcarggtgcccccctcctcagtccttgggggaattcaaatgcatgttcatgtatgtacctarggaatttgccagtttcctaagctgttgaaagaggggcactcggggggatgtcttgagatgtattacgcaaagtaccaactgagccaaaaataataagtkraacagaactctcttagccttaagaaagctrtatatgaatacttatgtttacctcactggtgcatttaraakggwcttcagttcatgggagaacctkgctgrcctgcrcagtkcgcamcybtrtgktrabysaygtyaaatgtymcagcmgktcttgctcaataaasgtcatactggarsmmtraaaaaaaraarmaaaamwcgrggsggggccsgkacccawysgccyawagwgagtcgattwacawgcatggcsgsswtamacgksggmtgggaracckgggtacmactatcgckkgaggaaycctytccagctggkwayaagaragcgacgmtgcwwccarsygcgsmgaggatrgaagmgraraytgsamgggrywrraacattcaagagcgactaaaaaaagggggtc

SEQ ID NO: 267 - DNA, 2477 bp, Rattus norvegicus
agaaaataaataaataaccagcacacacgcgcagcccggagcgaggcgcggggctggtggcggcgggaggaggagtgaaggcggcggcggcggaggagggacgcgcggagccggcagtaactttcgagccagcccagagcccggagctccagccgagcggtttgcagcgcggcggcgcggcgctgagtgtctggcccgccggtgcggtcggggtgtgcagtcggacgggaccagcagcgcgtcgctgtccccccctcccggtgactggagatgtccgagcccaaggcgattgatcccaagttgtcgactacggacagggtggtgaaagccgttccatttccgccaagtcaccggctgacagcaaaggaagtgtttgataacgatgggaagcctcgtgtggatatcttaaaagcacatctcatgaaggaaggcaggctggaagaaagtgtcgcgttgagaataataacagagggtgcttcgattctccgacaggaaaaaaacttgctggatattgatgccccagtcacagtttgcggggacatccatggacaattctttgacttgatgaagctctttgaasyksgwggatctcctgccaacactcgctacctcttcttaggggactatgttgacagagggtacttcagtatcgaatgtgtgctgtatttgtgggccttgaaaattctttaccccaaaacactgtttttacttcgtggaaaccatgaatgtaggcacctaacagagtatttcacgtttaaacaagaatgtaaaataaagtattcagaacgcgtttatgacgcctgtatggatgccttcgactgccttcccctggctgcgctgatgaaccaacaattcctgtgtgtacacggtggtttgtctccagagattaacactctagatgacatcagaaaattagaccgattcaaagaaccacctgcttatgggcctatgtgtgacatcttgtggtcagaccccctggaggactttggaaatgagaagactcaggaacatttcactcacaacacagtcaggggttgttcgtacttctacagttacccggctgtatgtgacttcctgcagcacaataatttgttgtccatactccgagcccacgaagcccaggacgcagggtaccgcatgtacaggaaaagccaaacaactggcttcccgtctctaattacgatcttctcggcaccaaattacttagatgtgtacaataataaagctgcagtgttgaagtacgagaacaacgtgatgaacatcaggcagttcaactgctccccccatccgtactggctcccaaatttcatggatgttttcacctggtcgctgccatttgttggggagaaagtgactgagatgctggtaaacgtcctgaacatctgctcagatgatgaactggggtcagaagaagatggatttgacggagccacggctgcagcccggaaggaggtcatsaggaacaagatccgagcaataggcaaaatggccagagtattctcagttctcagagaagagagtgagagcgttctaactctgaagggcctgaccccgactggcayrckmsscagcsragwrctctckgrcgrgrwwcwraykytgsaaagcgctactgttgaggccattgaggctgatgaagccatcaaaggattctcaccacaacataagattaccagcttcgaggaggccaagggcttasaccgaattaacgagaggatgccgcctcgcagagacgccatgccttccgacgccaaccttaactccatcaacaaggctctcgcctcagagactaacggcacagacagcaacggcagtaatagcagcaatattcagtgaccacttcctgttywhtttttttttttgagctgcagggcatgatgggtttgctgcatctcagcagttggatgttcttksmtytgacggtagcttgktygctctkggggggccargaatyggattcarkttacactatywtgaaaaaaaaaaararrrararaswkwgmgrymryawarctatattyysktkagkghggygattaawywymtsyttkgsgtatgcctttaaaaatgcttctaggaaaaaaaaarwhwwaaaaagaaagctratgctagtctatacttcaatgttaggggaatgaacacrttttcctagcgcactggrgacttttagataggttaatgaaaggccttttattctgttactggacacgaaaactttgtctaatttcttatactctattgtacgtttacagtcgcagcactaaaaatggatgacatcaaacatttttaaacagaaaaaaaagatgtrcrrrctaaataassactatttattgataatgttttgctactcttgtcagacaatggctmtaaactgaattaggcmgwmttmaaaaaarwmmraaaaaartaaaaaaaaaacctggggggaaaaaagaatgttgcaaatttgtttaawtghcaaaaaaaaaaaaaaaaaa

SEQ ID NO: 268 - DNA, 1880 bp, Rattus norvegicus
ccgcgacatcccccggatatgcacttcgggaggcccctgctcccgggatgcgagagctagggacctgtccgccctgtgcggagctccagccgccgccgggcgcgcaaccctgagtctaggacgcgttgtggaggaaaggagtcagggcaggtgcctaggcgggctatgctgaaaggaagatgctggccaggaagagcatcatcccggaggagtatgtgctggcccgcatcgcggcggagaacctgcrcaaaccgcgcatccgcgaccgcctccccaaagcccgcttcatcgccaagagcggagcctgcaacctggctcacmagaacatccgagagcaaggtcgcttcctgcaggacatcttcaccaccttggtagacctgaagtggcgtcacacgctggtcatcttcaccatgtccttcctctgcagctggctgctcttcgctatcatgtggtggctggtggccttcgcccacggggacatctatgcttacatggagaaaggcatcacggagaagagtggcctggagtctgccgtctgtgtgaccaatgtcaggtcattcacttctgcgtttctcttctccatcgaggttcaagtgaccattgggtttggagggagaatgatgactgrggagtgccctctggccatcacggttttgattctgcagaacattgtgggtctgatcatcracgcggtcatgttgggctgcatcttcatgaagacggcccakgcccacagaagggcagagacgctgattttcagccgccatgctgtaattgcggtccgtaatggcaagctgtgcttcatgttccgggtgggtgacctgaggaaaagcatgatcattagcgcctcrgtgcgcatccaggtggtcaagaaaaccacgacgccagaaggagaggtggygcctattcaccagcaggacatscctgtggataatcccatcgagagcaataacatcttcctagtggcccctttgatcatctgscatgtgattgataagcgtrgccccctgtacgatatctcagccactgaccttgtcaaccaagacctgraggtcatagtgattctcgagggcgtggtggaaaccacgggcatcaccacgcaagcgcggacctcctacattgcagaggagatccagtggggacaccgcttcgtgtcgattgtgactgaggaggagggagtgtactctgtggactattctaaatttggtaatactgtgagagtggcggcgccaagatgcagtgcccgggagctggacgagaaaccttccatcttgattcagaccctccaaaagagtgaactgtcgcaccagaattytctgaggaagcgcaactctatgagaagaaacaactccatgaggaggagcaactccatccggaggaataactcttccctcatggtgcccaaggtgcarttcatgactccagaaggaaaccagtgcccatcagaatcatgagggcaggacgaccctagacagccactcactgagtcccgatgactgacagaccatcctgagacagtttgctgagwtctkstgaycrragymymggwycwgtcsccmattmaskscwggmmcwcaaswaagggcagagtagagagatgtcctgaattaacacagtgtgtggtgtggtaaaacatggaaactaggcagttgtgtagccttttagtcagagtttggggcttgaatttatttcatatatgagccattggacctcacaggtcatcgggaatatgttcaaatctaaccttaaaagacacatgattctaaccaggtgggctaagttgactgctcccaagaaatctgtgacttggaactctagactcaaagatcaaacgggtacttgcagctctgcttgcctgtttaataaagttctcaaaaccc

SEQ ID NO: 269 - DNA, 953 bp, Rattus norvegicus
gagaagctcaccccaggctgcaccactggcaaaatgcaggccctactattcctgatggctcttctcttgccttctggagctggagctgaggagattattggtggtgtggagtctattccacactcccgcccttacatggcccatctggacatcatcactgagagaggtttaaaggacagctgtggtgggtttctcataacccgccaatttgtgctgactgctgcacactgcagaggaagagaaatcacagtcacccttggagcccatgacgtgagcaagcgagaatacacacagcagaagataaaagtagaaaaacaattcattcataaaaattacaacttccttcccaatcttcatgacatcatgttactgaagcttgaaaaacaagttgagttgactcctgctgtggatgtagttcccctgcctagtccttctgactttattcaccctgggacattgtgttggactgctggatgggggcgaactggagtgaaagatcctacctcagatacactgagagaggttgcactgagaatcatggatgaagaggcctgtaaaatctatagacattatgacaacaacttccaggtctgcgtgggcctttccacaaggttacaaacagcatacactggagactctggtgggccgctactgtgtgctggtgtggtccatggtattgtatcttatgggcatccagatgcaacgccccctgcagtcttcacccgaatcgccccctatgtgccctggattaatacagtcttaagggaaagtagctgaaaagcttgacctgcctgcgacagactctccaagcctgaggtcttatagtatcctttgggttcaacatagtttgtccccaacctgtccccagctctctctttgaggctctcaaagatacacaagtctgtgatgatggattgttccctgtaaagcacctcaataaagacataatttcc

SEQ ID NO: 270 - DNA, 2746 bp, Rattus norvegicus
  misc_feature (2342)..(2342): n is a, c, g, or t
  misc_feature (2394)..(2394): n is a, c, g, or t
  misc_feature (2396)..(2396): n is a, c, g, or t
  misc_feature (2416)..(2416): n is a, c, g, or t
  misc_feature (2456)..(2456): n is a, c, g, or t
ccttatgtagaaatgtcctccttagcctcagacatttgaacactaggtacccagttggtactgctgtttgggaacacttagctggtatcagttattgttattttctctgtacagaatcatgcttaaccagtttcatatgtgcattagtggaaaatggagaatcatgaaacttttcttcaagaatctataataaagtcagggtaataagcatgctcgttagatattcacagtggattttaaattcttccaactatgatctgtgagatactgacagttctttttgtttcaccacccttagaaaaagaataatggtcttttataattgagtaaagatgtgtgactgacatgtatgttttctgttctttgttttgtattggacaagagtaaaataaggagctataaagcatatgttattgaacaaaatctgttggaatgtttagtatagaaaataaacattttaagtatgcatgatctttgtggtatgtaaatatatttctggttattggggcaatgtagcagaagagctgtcagttagagacctgcctatgttatatagtatgattttgttaaaaataaacatatttcattgagtatataaatatcataagtaatatatgacttaagtcatatatggaggagttttcttgaatcttaaaattaatatattaattctgaagaattaccacacattagaaaatatttgtttacttttattatcagtaattgggcaccaatccttagtattagccagaaattcaaatgggcactgtataaaggtcaaagtaaatgatatcttatatttatctctatcaaaggacaaagatcacttgatagagagcaagtgggattaaagattccctaatggactaatcaatgatgctcaaagaggtgcatgttgtttcagcatgttataaaatctctgtgctgcctgatcacaackgcatcagtaaggagggtctcsatggatctggtcactttccwsgtasktactckcwcmkstckcattckcststcackctggrgacagagctckaggrgaagrragctccctcctggccccrstcctctcccaatwattggtaatttcctccagatagatgtgaagaacatcagccaatccttaaccaagktwwswawwryckrtkrycctgtrwtmactctgyatwwgggmtmayagcccactgtcatattgcatggatatgaagcaataaaggaagctstgattgataacggggagaagttttctggtagaggaagctatccaatgawtgaaaatgttactaaaggttttggcattgtttttagcaatggaaacagatggaaagagatgagacgattcacaatcatgamctttcggaatttgggaattggaaaaaggaacattgaggaccgtgttcaagaggaagcacagtgcctagtggaagaactgaggaaaacaaaaggctcaccctgtgacccctccttratcctgaactgtgctccatgcmatgtcatctgctccattactttccagaatyattttgattataaagataaggaaatgcttacsttcatggaaaaagtgaaygagaatctcaagattatgagctycccatggatgcaggtctrcaatagttttccttcactcattgactattttcctggaactcatcacaaaatagcaaaaaatattrattatatgaaaagctatttgttgaagaaaatagaagaacaccaggaatcattggatgttacaaaccctcgtgattttgttgattattacctgattaaacaaaaacrggcaaacaacatcgaacawtcagaatattcacatgaaaatctgacatgcagtatcatggatctcattggtgcagggacagagacaatgagcacaacattgagatatgctctcctgcttctgatgaagtacccacatgtcacagctaaagtccaggaagagattgaccgtgtgattggcagacatcgcagcccctgcatgcaggatagaaaacacatgccctacacwgatgccatgattcatgaggtmcagrgattsattractttgtcccgaccaacywgccccatgcagwkashwrwsacwtkmmatwcvsrraytrcctvatycvkrarggracaaargtkttaacmtcaytgacwtcagtghtgcatgasrgcaaggagttcscmaayccrgagatgtttgacyhtgkcmactttbtagatgrgawtggaaactttavgaaawgtgabwacttkttgcytttbtcdgcaggaaaasgmrckwgkgttggagaggscytgscccgcatgcagttgtttmtattcttgacarccattttacagaactttamcytgaaatstntggttcamccaarggacattgatasgakgscagttytgratggttttgcytntntgccacccabttaccakytntgsttcattcbttcytgawtagatcaggcattktggcttntastgtgttgchtkbtgcaatccccttcaggtttttayccagtccyttccctbtatcatccatcctsactyttgtbttaagatccagaaagcacatgcagtttytggagttatagcmcaaatccamttgtattatytctttcawrtaacaatttatgatcccttgtgtcattgkgtatccattcctgagttaaaataaagcttcmctataaaataawaaaaaaaaaaaaaaaaaaaaaaaaaatgtgtggcggccgcaagcttattcctctttagtgaggggcattttag

SEQ ID NO: 271 - DNA, 2330 bp, Rattus norvegicus
aagcttgtgtgcacaagcaaaaatacctctatgcggttttagatgtggatgctaattcctagacaatagttgtgtgtgtgtgtgtgtgtgtgtgtgtgtgtgtgtgtgtgtgtgtgtagatagagtgtggaagcataaatgagatgtttgagcatagcaaagcatatcatatgtgtgcatttaggttatataaataaattccattagttttgagacaactgagactccacaattatcaactgcacacaaaatctcctggcagctgtaacttgtgtgcacctctagctcctttttgcattttccttcttgtggtactggggaagaggagagttaggaaagaaacacaagcattcctcaggccccacttccctaaaacatgttccatccaacctctccaactgtctggaatatccttctctaccccccaccccatagccctcccgatgcagtgcgaaagtcggtgggtaattgggtccagattggaggtgtttaaatattcatgaggctggcaggggactgggagggggcgacggtctagaaatgggggtaggggctatgggaagtgattagtcactggaagctagtgaacaattctgagaacgggacccgggcagaaagaagaaaaaagattgggtggggagtggaggagagagaggagaaggaaaaggagagaggaaagaggaggaaggggggggagagagagagagagagagagagagagagagagagagagagagagagagagagagagagagagagagagagagagagagagaaatgcatatgcggtgagcaatagctgatcgctgtagaccttacagttgctgctaactgccctggtgtgtgtgagggagagagagggagagagagggagagggagggagggagggagggagagcgcgctagcgcgagagagcgagtgagcaagcgagcagaaaagaggtggrgagggggggaataaggaagagaggaggaaaggagagaaggcaggaagaaggcaggggaagataccaccatgctgtgctgtatgagaagaaccaaacaggtwgarmwraatgatkwkkwycamwwswttgaacwagwtggtgwmawaccrgagkayaakrytywtaaggctgcaaccaaaattcaggctagcttccgtggacacataacaaggaaaaagctcaaagacgagaagaagggtgatgcaccagctgctgaggccgaggccaaggagaaggatgatgctcccgttgctgatggtgtggagaagaaggagggagatggctctgctactaccgatgcagccccagccaccagccctaaggctgaggagcccagcaaggcaggagatgcaccttctgaggagaagaagggcgaaggggatgcggccccttcagaggaaaaggccggctcagctgagacagaaagtgctgctaaagctaccactgataactcgccgwcctccaaggccgaagatggcccasccaaggaggagcctaaacaagccgatgtgcctgctgctgtcactgatgctgctgccaccacycctgctgcagaggatgctgccaaggcagcgcakcctbcaacggagactgsakaaagcagccaagctgaggaggagaaagamgctgtagatgaasccaaacctaargaaagtgcccgacaggatgrgggtaaagaagaccccsrggctgvccaagaacatgcctgractttaagaaacggytttccacgwtgbccycasmtgaaccctgtctctcstgccctttcwcarrtscactctgaagwttcytctcctgtcctgctsacgtgwgtgagcytgtcctctystammtatgarmyctmtctctctgygtggyamacattwaaaaaaamaaaarmwvrarasakcycrwgycsaaywgtgtggcttaaacatttgtttcttggkgttgtwatggcgagwttttggtaatgatgatgcagtcatcttgkgaaattcttgcactgtaccccsgtkttttgatctggtgcgtgtggccctgtgggagtmcactttcctctctatttctctctgttccaagwgtgtgkgtgcaatgttccgttctgaggagtccaaaatattaagtgaattcaaaaaaccatttctgtttcctcattttcaatgtgatggaawgmacrwaaaggttamaaaawtttaaaaaaaraaaccggtttgttttaaaaataaataaataaagcaaatgtgccaattagcgtaacttaagsctgtrrggcycctttttcratctsaatatyaatawatcatgasagtaatcvwamaaaaraaaaaaaaaarractcgagactagtyctctctctctctc

SEQ ID NO: 272 - DNA, 6257 bp, Rattus norvegicus
ggtaccgggcccttggtcctatggaggcttgacgccccagtgtaggggatgctagggcaatgagttgggagtaggtgagtgtgtggaagagcaccctcatagaagtatgggggaggggagatggggggttttcagaggggaaaccaggaagggggtatcacttgaaatgtaaacaaataaaatggctaatagataattttataaatgtctccgcaggccagtctggtgaagcattttgtcacttgaggttcccactcctcaggtgactctagcttgtgtgaagctggcatagaaactaacccacacagcattcaaaggaggtaagacaagggcttttctaaatggatatcactaatcactggggatgaccaaagggagagtttgaagaagatgtatatggtcagagaagattgactttaatcaaactgcttagactattgaagacaagtctgtccctcctctgccttcgccatccagaacagaatgcccaaaagatagtaaaaaaaaaaaatgaaaataattttaggtactaatttcctatgtgatgctttttaaacagaaggtggggtcagagacaggaggcacaacagagacaggccatggcagtgcgttctgctcggcgtctcactcagcgcctactatgttcatttaactacatttctttttctttttctttctttctttttttttttttttttttttttttttttggttctttttttcggagctggggactgaacccagggccttgcacttcctaggcaagcgctctaccactgagctaaatccccaaccctactgtgttcgtttagatgccacatacacatagtctctttggtgacctgaaagtgggtattaaatgttcccttttataaatagggaaaccgtctcctgctttccattacatcacaatgacccaagcaagagaaagaggcaggacattaaaaagttaacccgaagccaacccctgggcacttgggtctggacaactccagaagaaagtacctgaagagataaagggaaacctaaataaaagggtctccctgagtgggtaggacttattctcctgggccaagtgtttgcaggagacttcgcatataaaacaagccccttccacaaagccttgcagtgatttagaggctctgtaatctgtttggctgggtctgcctaagatgagtgctacaaaaaaactgacattttcttgggcactggtgcatttaatcaactgggtgcgtgtgtgtgtgtgtgtgtgtgtgtgtgtgtgtgtgtgtgtgtgtgtgtgtgtatcctctcctgctctcaagccacagatcatgatgcctgccatttcagaagtagagacaggaagatcagacattcaaggtcatattttgacccatagtgagtttgaggccagcctgagctatagagtctgtctataaaaactaaatgcaaacatccacataaaaagaaagtgggcactagaccctctctggctcagactgcttacctgaaggacttgaaatctcttctcattcagagtgacactcatatgtttgtgggcctgtgttgttgagacattctgagcttacttctttgtaattccccatgatcatcaagtggttaccaaacttggtgtggtgtccttcctcctggacaccagtttctcctgtcagagaaaagctttgcttgctatgtagcatagaagctgcccccatctccctggaagatgctcatacctctgttgggctcttaaagccaccctgctcactaacgctcatgataggatccgatatgaggtctcctgccacggtggaatctgatctacgccctcccacacttctggtgacagcttcttccagctcactgctgctaccctccaaaagaacctggcccagttggccctggctctatgctaggagagaatctgggtattatcaaactatgcccctttgagatgcacacagtgaacatgacctttccttccttgatgggcttcttttccttctgggatactgggagtttggaaggaggccactgatacccaggatctaggtttctgggcctggggaaaaaaatcatcagtggatctagtcattagtacccaggaaagcttaaggccaacacagcttctaggaaatgagctcctatttgccccactggaccaaatgtgtaagagctatgcagctacgtcacgcagtgtggggtcccttggaaccaatcataaacaggttgacagaaactatcaagtctggccacaaggagacaggaaatctaaaatgcacctagtttagagctaaaaattctggatatgacctttccacgatctatctctttaaaaatgcaccatagctttctgagctgacagcgctcctgcaaacttggcgaacgttcctaagatgcgccagacattctgcaagaaatgtgagaagcgccaaccccatgaggtgacacagtacaggaagggcaaggactctctgtgtgcccagggaaagcggcgttttgacaggaaacagagtggctatggtgggcccgttttctgcaaaagaggctaaaactacaaaggagatggtgctgagactggagtgcattgagcccaactgcagatctcagaggatgctgggtattaagaaatacaagcactttgaactgggaggtgacaagaagagaaagggccaagtgatccagtttttttaagccgattttgttatgaagacaataaaatcttgacctttcaaaaaaaaatgtatccatagctggcagtggtggcaaacacttttaatcccagtactccggaggcagaggcagatggatctttgattttgaggccagcctcatctacagagtgagttctaggacagccagtgctatatagaaaacccatgtcttggaaaaaaaacaaaaaaaggtgaacggttggaagcaagaaggcagactggatgcaagaagatattgcaatacagaaatttggatatatacaatctctggggggggtgttataattctttcccttaatggacagttctagagtgattctaggtaggaatgatccagcacagagactgaaagtaattggctcacaaacaacaaaattctggaaaaagcggaagtatgggcatcaaagcacagaagtcgaagaatttgtgagctgtacagtaagtagaacagtctaggaaagatgctaattggttatgtgggtgcaaggggttcgaatcagctttgattaaaaaagcaagttaaagggactggcactgcagcccctgccctccctgagaggcctctatcatactattgcagcaccgcgtgaactctaacctacctagagagtcctaacagtgtgaaattccggaagatgaagtgaatttcccaaccaacaccctgtggtgcctgccccatcgagcgctgtagactttcttgggccaggtggtatttacttgtttgcgatcagccgccgcctttcagacagctcccatcacatcagtgtttttcaagatagtgtaattagcttagcttagcttctgttgtggcacagaacgctggtctgcgctgctggtgactagctctgtaaccttctaagtaagtgacataatttctaagcggctgtgcttctgcttcacagagtggttaacaacacctctagctcatgaaatgtatccccagagaggctaaagttcagacttagcctggagatgcaaactctgtttggaatgtctcctgtcaagcgctgtaatcacgccagactcccgggactagctcctatcatctccgaacccgccccaccccgccactccccactgccggtgcccgttccccaaccccccccccccccccgccagtcacaaagctcctcacttttcttctgtccaaagtcggttcctttagggcatgcttctcagacatttgagatctttcacacatgcatagggctcccctcagcacgagtcttctctcttctctcttctctcttctctctctctctctctctctctctctctctctctctctctctctctccctttcaaacacacgtactggcgcgcgcgcgcgcgcgcacacacacacacacacacacacacacacacacacacgcgcaaatgcacactcacctgtctggagagagtggaggggaccaggatggcagcataggtgagtctgtttggtgctcgggggacatgcttctcccttctccgactgggtttcctaatcctcctccgccacagtcccacccagctcctcagcccctcccctcagtatcccctgtctaaagagtgccactgagtctcactctcactccaccctcctctgcaggagccaaccatcaagcagcagtctctggactagaaatccaagagcataaaacgctccgccgagctgccgcatctgctcctgcctgcgctcaccctctggtgggagccgagagcggtgggaacacacggcttagctgggctttccaattcctgcaggcgacgcccatggtcctggatggcaccttcaagacaacttagggaggtctactctctccagttccaaaagaaagtttggacaaagtgaatttggggtgcatttgggagatggcagctgcttcctctgtgtcacctctcagaagcccctgcctccaacccactccaaccttcccacactgacacccagctcccagtccctctttttctttctttggtccctgagcctctctggggtcagggatgttggtcctgttcccttctcctttcattgtcctttccatctgtctgctgagctgtctcacctgtttctactttcaccccatcgtcacccctcacctcccttctctccacctctaaacctttctctctcattccattttatctatcaaagttcttacttgcacccatacctccatccaccttcccctccttctctccctgaaattctaactatgaattctgagccttcttggactgccaccccctcccctgggggcaccctgcctgtccccaatgctaccacaccatggctaggtagggatgaagagctagccaaggtggagatcggtatcctagctactgtcctggttctggccacaggaggcaacctggctgtacttctgactctgggccgccatggccacaagcgctcccgcatgcatctgttcgtgctgcacttggccctgaccgacctgggcgtggcgcttttccaggtactgcctcagctgctctgggacatcacctaccgcttccagggctctgacctcctctgccgggctgtcaagtatctacaggtgctcagcatgtttgcttccacttacatgctgctggccatgacactggaccggtacctggctgtctgtcaccctcttcgaagcctccggcagcccagccagtctacctaccctctcattgctgctccctggttgctggctgccatcctcagcctccctcaagttttcattttttcattgcgagaggtgatccagggctcaggggtgctggactgctgggcagatttctacttttcctggggcccgcgggcctacatcacctggaccaccatggctatctttgtgctgccggtggcggtgctctcagcttgctacggcctcatctgccacgagatctacaagaacctgaaagtcaagacccaggctggcagggaggagaggaggggctggcggacttgggataagtcctcatcttctgcagttgctactgcagccacgagggggctaccttcccgggtcagcagcatcagtaccatctccagggcaaagatccgaaccgtgaagatgacctttgtcatcgtgctggcctacattgcttgctgggcacctttcttcagtgtccagatgtggtctgtgtgggatgagaatgcccccaatgaagattctaccaatgtggctttcaccatctccatgcttctgggcaacctcagcagctgctgcaacccctggatctacatgggcttcaacagtcgcctgttgccacgttccttgagccaccatgcctgctgcacgggctctaagccccaagtgcacaggcaactctccaccagcagcctcactagccgtcgcaccacgctgctgacccatgcctgtggttcccctactctccgactcagccttaacctcagcctccgtgcaaagcccagacctgcaggctcactgaaggatttagagcaggtggacggggaagccactatggagaccagcatcttttagagaagattccctggactctggttctgtacatctcaggcacccggaatgtggactagccggctcagggatggtaggaagtggagct

SEQ ID NO: 273 - DNA, 2622 bp, Rattus norvegicus
ttttacataacacggaaatgactctttattaagtctgatcaaaggcttattgttcggtagttagaaatcatggtctctcctcgcaggcatgtggctcgtgaacaacagtccgatgagcgtttgatttgggtccaaccaaaaccttccttggctccatctctttctcacttgcacagacctccatggggacagcctcggggggctacaattttgctttccttctgggtctgttgtctgcagcaagcaggaggcaaggaggaggtatctgtgggaataaggctagaagcctagacacgtgctggtgaagggagtggtgtgtgcgtgcacgtgcgtgagtgtatgcatgtgcatgcgtgtgcgtgcgtgcgtgcgtgcgtgtgtgtgtgtgtgcgcgtgtgtgtgtgtgtgtgtgtgtagtcattcactcccttgttgaggccctcatagcagaggccaacaagagtgaaaaggtggtctagccttggagataacagctctgacagagcatctaaggctggctcagaccagatggtctagcaataaakwkkttywkytkkkytktywtkkcattctataaatatttattgaggacctactaagkgccagcactccgtcagacatgaaggtgagaaggtgcactcaaaaccmcagkgcctgctctttaagtkattccaggtcagtggtgggagaggggtctccctgsaraggttggtggggggaggggytctccytkkaraggttggkgrggggarggctwmtmmytsrakaggwyavagtsrrgtycmskytgarggtgcacctggygaavaggactgtggggacaggrtccaccakagccaggaacagaaacttctttgtattttgagactctcyggrgatgtgctacgcatctggaattacaaatggcaggtcccgctgtggcctctgaggcccatctttcttcwtgtcctcagactctcatgtactggacattggcacccaagtataggaagttcttgtggatctggaagtcgaggtcgtsgwgcttaatacgccttggtagagggagggggaagcccttggccagctcatcgttgacatcagggtagaggctgttgagaaggtagtagttgaggaatgcctggaacaggttcacattgaacatgccgactttggattcgatcagtctcacttgcgccttctctggatgcagcatcccggwraccttgctgttgycaaaagttaatgagacgaatacattcgtgaccacgccaagccggaagacagattcgcgggcggagctgggcaggatcacaaagccttcaatctccatctgtggggccaaggacagattcccaggactgacattcagaagtggggcagagaccactgttccaagaagctccaagttcatgtcggggtactttctggttatcagaggagtgaaggggcggaaggccttggtgttcagccggatgttggagtcaggcggtaacatgtcatctgtgatggtaaagttcaggtacccggcctggtggtaaacccgggtggctatgttgaaggcctgatctgagatggcaaagtagaccatttgtttactgtcctcaggtaggctcatggtcggggtgggggtagtgactggggagcggtgattccgattaaaaatttcacccttaaacatcacatccagcgtctgggcctttgcttggggagccgccaccaaactgtagtcaatgcccaggatagtgtcgatatccgctgtgactggcagagtttggagataaggctgcagatcagaggtcacagacttctggatcatctcacwmrtsttactttccaatactttctggagcttggactcgatctggttgtggaaaagattcagcagccaccccacatttcctgatacgtgcaattccaaatcacgaatgcggttgctgcatccagaggcggtgactgtgggccgttctgagggatccacgcccaggaggaggtccactgaaatagtgacacttttgacatccaggtcaaaggagccgtgaagtttcacgaaggatctgcgcactttccatttgccccggacgctgatcgaagagtcagagatggagagactcaggcctcggcctgggagcggcttcagggacgagccacgcagctgacagctctggatctccaggctatgaaactcgtactgtccacggcccacagccttgatcttgaagtccccgctgaagtcaggcagtgtgatcttgtacagctctctctgcagactcaacagcccctccttggccgcgtactccaggcccttgtcggtgatcctgaccaccatggcggggttgacaccctgagtccttggtatagacaggagcagtagccccagcaatgtaggaagcagaggcccagtcgcagacttcatcctggatgctccgtgggtgagtgaggactgtgaccgtgaaagtgttcaaaaagactgcagacggaagctgggagccgtttgcctctgggaagaccgccgagtctggagagctgcacgggctcaccacagatgagaagttcacggaaggggtgtacagggtagaactggacaccaaatcgtactggaaggctcttggcatttccccattccgtgaatacgcagaggtg

SEQ ID NO: 274 - DNA, 6021 bp, Rattus norvegicus
ctctcagcttctgctactcctctccctggctgctcttctctccgtccagctgcacctctgtggtgcctcattccagccgtggtccaaattctctgtgaaaagattaaccggagtttaagagtgayaggatgacggatgcccagatggctgacttcggggcggcmcsatacctccgcaagtcagagaaggagcgcctagaggcccakacccggccctttgacatccgcacagagtgcttcgtgcctgatgacaaggaggagtatgtcaaggccaagatcgtgtcccgggaagggggcaaggtcactgccgaaactraaaacggcaagacggtgactgtgaaggaggaccaggtgatgcagcagaaccctccgaaattcgacaagatcgaggacatggccatgctgaccttcctgcatgagccagctgtgctctacaatctcaaggagcgcwakgcrrcctggawrawstrtmcckacwcwggmmkmytcwgtgycamygwmwaccsskwkaagtkgctgccagtgtacaatgcggaagtggtagctgcctaccggggcaagaagaggagcgaggctccaccccacatcttctccatctctgacaacgcctatcagtacatgctgacagatcgggagaaccagtccatcctcatcactggagaatccggagcggggaagactgtcaacacgaagcgtgtcatccagtactttgctagcattgcagccataggggaccgtagcaagaaggacaatcctaatgcaaacaagggcaccctggaggaccagattatccaggctaaccctgctctggaggcctttggcaacgccaagactgtccggaatgacaactcctcccgctttgggaagttcatcaggatccactttggagccacaggaaagctggcttctgcagacatagagacctaccttctggagaagtcccgggtgatcttccagctaaaggctgagaggaactaccatatcttctaccagatcctgtccaacaagaagccggagctgctggacatgctgctggttaccaacaacccgtacgactatgccttcgtctctcagggagaggtgtctgtggcctccattgatgactccgaggagcttttggccactgatagcgcctttgatgtgctgggcttcacagcagaggagaaggccggtgtctacaagctgacaggcgccatcatgcactatgggaacatgaagttcaagcagaagcagcgggaggagcaggcggagccagacggcacagaagatgctgacaaatctgcctacctcatggggctgaactcagccgacctgctcaagggtctgtgtcaccctcgggtgaaggtgggtaacgagtatgtcaccaaggggcagagtgtacagcaggtgtactattccatcggggcactggccaagtcagtgtacgagaagatgttcaactggatggtgacacgcatcaacgcaaccctggagaccaagcagccacgccagtacttcataggtgtcctggacatcgccggctttgagatctttgatttcaacagctttgagcagctgtgcatcaacttcaccaatgagaagctgcagcagttcttcaaccaccacatgttcgtgctggagcaggaggagtacaagaaggaaggcatcgagtgggagttcattgacttcggcatggacctgcaggcctgcatcgacctcatcgagaagcccatgggcatcatgtccatcctggaggaggagtgcatgttccccaaggccacagacatgaccttcaaggccaagctgtacgacaaccacctgggcaagtccaacaacttccagaagcctcgcaatgtcaaggggaagcaggaagcccacttctctctggtccactatgctggcaccgtggactacaacatcttgggctggctggagaagaacaaggaccctctcaacgagacggtggtggggctgtaccagaagtcctccctcaaactcatggccacactcttctccacctatgcttctgctgataccggtgacagtgggaaaggcaaaggaggcaagaagaaaggctcatccttccagacagtgtctgctctccaccgggaaaatctgaacaagctgatgacaaacctgaggaccacccatcctcactttgtgcgctgcatcatccccaatgagcggaaggctccaggggtgatggacaaccccctggtcatgcaccagctgcgatgcaacggagtgctggagggtatccgcatctgtaggaagggcttccccaaccgcattctttatggggacttccggcagaggtatcgaatcctgaacccagcagccatccctgagggccaattcattgatagcgggaaaggggctgagaagctgctgggctccctggacattgaccacaaccagtacaagtttggccacaccaaggtgttcttcaaggcggggctgctggggctgctggaggagatgcgagatgagaggctgagccgcatcatcaccagaatccaggctcaagcccgaggccagctcatgcgcattgagttcaagaagatggtggagcgcagggacgccctgctggttatccagtggaacatccgcgccttcatgggggtcaagaattggccgtggatgaagctctacttcaagatcaagccgctgctgaagagcgcagagacagagaaggagatggccaacatgaaagaggagttcgggcgagtcaaagatgcactagagaagtctgaggctcgccgcaaggagctggaggagaagatggtgtccctgctgcaggagaagaatgacctgcagctccaagtgcaggcggaacaagacaacctggcagatgccgaggagcgctgcgaccagctgatcaagaacaagatccagctggaggccaaggtgaaggagatgaccgagaggctggaggacgaggaggagatgaacgccgagctcacggccaagaagcgcaagctggaagacgagtgctcagagctcaagaaagatatcgatgacctggagctgaccctggccaaggtggagaaggaaaagcacgcaacagagaacaaggttaaaaacctgacagaggagatggccgggctggacgagatcattgccaagctgaccaaggagaagaaagctcttcaagaggcccaccagcaagccctagatgaccttcaggctgaggaagacaaggtcaacacactgaccaagtctaaagtcaagctggagcagcaggtggatgatctggagggatccctggagcaggagaagaaggtgcgcatggacctggagcgagcaaagcggaagctggagggtgacctgaagctgacccaggagagcatcatggacctggagaacgacaagcttcagctggaggaaaagctcaagaagaaagagtttgacatcagtcagcagaacagtaaaatagaggacgagcaggccctggcccttcagctgcagaagaaactgaaggaaaaccaggcacgcatcgaggagctggaggaggagctagaggcggagcgcacagcccgggccaaggtggagaagctgcgctcagacctgacccgggagctggaggagatcagtgagaggctagaggaagccggtggggccacatctgtgcagatagagatgaacaagaagcgcgaggccgagttccagaagatgcggcgggacctggaggaagccacgctgcagcatgaggccacagccgcggccctgcgcaagaagcacgcagacagcgtgsccgagctgggcgagcagatagacaatctacagcgggtgaagcagaagctggagaaagagaagagcgagtycaaactggagctggatgacgtcacctcymacatggagcagatcatcaaggccaaggcaaacctggagaaagtgtcccggacaytggaggaccaggcsaatgaataccgggtgaagttggaagaagcccagcgctccytcaatgackkcacsasrcagcgagccaagctgcagacagagaayggcgagytggctaggcaactggawgaraaggaggcwytkatytsbcagctgacccgrggcaagctcwcstatacccagcagmtggaggacctcaagaggcagctggaggaggargkcaaggccaagaatsccytggcccacgcamtgcagtcagcccggcatgaytgcgacctgctgcggraacagtaygargargaaayrgarsccaaggcygagctgcagcgtgtcctgtccaagsccaactcagaggtggcccagtggaggwccaagtmtgagacggacgccatacagaggacggaggagctggaggaagccaagaagaagctggctcagaggcttcaggatgctgaggaggcagyssaggccgtcaacsccaagtgctcctckctggagaagwccaagcacaggctgcagaacgagatcgaggacctgatggtggatgtggagcgctccaatgcgrvcgccgcasccctggacaaraagcagaggaacttcgacaagatcctggctgagtggaagcagaagtatgaggagtcccagtcagagctggagtcttcccagaaggaggcgcgctccctgagcacagagctcttcaagctcaagaatgcctatgaggagtctctggagcacctgkagaccttcamgcgggagaacaagaacctccaggaggagatctcagacctgactgaacagctggghbmasbkggkwararbrtscacgagctggagaagatccgmaarcarctggaggykgadmwkctsswmstgcmgtcagccctggaggaggytgaggcctcyctggagcatgaggagggcaagatcctccgagcycagctggagttcamccagatyaaggsagagatygaaaggaagctggcagagaadgacgaggagatkgagcaggccaagcgcaaccacctgcgggtggtggrctcyctrcagacctccctggatgccgagacrcgcagccgcaacgaggccctgcgggtgaagaagaagatggagggcgacctcaatgagatggagatccagctcagtcaggccaatagaatagcctyagaggcccagaagcacttgaagaacgcccaagcccacttgaaggacacccagctccagctggatgacgcagtccgtgccaatgacgacctgaaggagaacatcgccatcgtggagcggcgcaacaccctgctgcaggcggagctggaggagctgcgggccgtggtggagcagacagagcggtctcggaagctggcagagcaggagctgatcgagaccagcgagcgggtgcagctgctgcactcccagaacaccagcctcatcaaccagaagaagaagatggatgcagacctctcccagctccagacagaggtggaggaggcggtgcaggagtgtaggaacgcagaggagaaggccaagaaggccatcacagatgccgccatgatggccgaggagctgaagaaggagcaggacaccagcgcccacctggagcgcatgaagaagaacatggagcagaccatcaaggacctgcagcaccggctggacgaggcagagcagatcgccctcaagggtggcaagaagcagctgcagaaactggaggcccgggtccgggagctggagaatgagctggaggctgagcagaagcgcaatgcggagtcggtgaagggcatgaggaagagcgagcggcgcatcaaggagctcacctaccagacagaggaagacaagaagaacttggtgcggctgcaggacctggtggacaagctgcagttgaaggtgaaggcctacaagcgccaggctgaagaggcggaggaacaggccaacaccaacctgtccaagttccgcaaggtgcagcacgagctggatgaggcagaggagagggcggacattgccgagtcccaggtcaacaagctgcgggccaagagccgtgacattggcgccaagcagaaaatgcacgatgaggaataacctgtccagcagaaagagcctcgctgttgctatcccacaataaatatgaatgcttgactttgcctgtaaaaaaaaa

SEQ ID NO: 275 - DNA, 5941 bp, Rattus norvegicus
ccgctcagtcatggcggatcgagagatggctgcatttggggccggagcccccttcctgcgaaaatctgagaaggagcggcwsgaggcgcagaccaggccctttgacctcaagaaagatgtttttgtgcctgatgacaaagaagagtttgtcaaggccaagatcgtgtctcgagagggtggcaaagtcaccgctgagacagagaatggcaagacggtgactgtgaaggaggaccaggtgatgcagcagaaccctcccaagttcgacaagatcgaggacatggccatgctgaccttcctgcacgagccggctgtgctctacaatctcaaggagmgstacgcttcctggatgatctacacctactcaggcctcttctgtgtcaccgtcaacccctataagtggctgccagtgtacaatgcgsaagtggtagctgcctaccggggcaagaagaggagcgaggctccaccccacatcttctccatctctgacaacgcctatcagtacatgctgacagatcgggagaaccagtcmakcytmatcaccggagaatccggagctggtaagaccgtcaacaccaagagggtcatccaatattttgctgttattgctgccattggggaccgcagcaagaaggaccagaccccaggcaagggcaccttggaagatcaaatcatccaagccaaccccgctctggaggcctttggcaatgccaagacagttcggaatgataactcctcccgatttgggaaattcattcgaatccattttggggcaacaggaaagttggcatctgcagatatagagacctaccttctggaaaaatccagagttattttccagctgaaagcagaaagagattatcacattttctaccaaatcctgtctaataaaaagcctgagcttctagacatgctgctgatcaccaacaacccctacgattatgcgttcttctcccagggagagacgactgtggcctcaatagatgactctgaagagcacatggccaccgatagcgcctttgatgtgctgggcttcactccagaagagaagaactccatttacaagctgacaggcgccatcatgcactttggaaacatgaagttcaaacagaagcagagggaggagcaggcagagccagacggcacggaagaagctgacaagtcagcctacctcatgggactgaactcggctgacctgctcaaggggttgtgccaccctcgagtcaaagtgggcaacgagtatgtcaccaaagggcagaatgtccagcaggtggcatatgccatcggggcactggccaagtcagtgtacgagaagatgttcaactggatggtgacacgcatcaacgcaaccctggagaccaagcagccacgccagtacttcataggtgtcctggacatcgccggctttgagatctttgatttcaacagctttgagcagctgtgcatcaacttcaccaatgagaagctgcagcagttcttcaaccaccacatgttcgtgctggagcaggaggagtacaagaaggaaggcatcgagtggacgtttattgacttcggcatggacctgcaggcctgcatcgacctcatcgagaagcccatgggcatcatgtccatcctggaggaggagtgcatgttccccaaggccacggacatgaccttcaaggccaagctgtacgacaaccacctgggcaagtccaacaacttccagaagcctcgcaatatcaagggaaagcaggaagcccacttctctctgatccactatgctggcaccgtggactacaatatcctgggctggctacagaagaacaaggaccctctcaatgagacggtggtggggctgtaccagaagtcctccctcaagctcctaagtaatctgtttgccaactatgctggagctgatgcacctgtagacaagggcaaaggcaaagcaaagaaaggctcatcctttcagaccgtgtccgcactgcacagggaaaatctgaacaaacttatgacaaacckgcrckmsrcgcaccctcactttgtacgctgcatcatccccaatgagacgaagtctccaggggtgatggacaaccccctggtcatgcaccagctgcgatgcaacggagtgctggagggtatccgcatctgtaggaagggcttccccaaccgcattctttatggggacttccggcagaggtatcgaatcctgaacccagcagccatccctgagggccaattcattgatagccggaaaggggctgagaagctgctgggctccctggacattgaccacaaccagtacaagtttggccacaccaaggtgttcttcaaggcggggctgctggggctgctggaggagatgcgagatgagaggctgagccgcatcatcaccagaatccaggcccagtcccgaggtgtactttccagaatggagtttaagaagctgctggagcgcagagactccctgctgattatccagtggaacatccgcgccttcatgggggtcaagaattggccgtggatgaagctctacttcaagatcaagccgctgctgaagagcgcagagacagagaaggagatggccaacatgaaggaggagttcgggcgagtcaaagatgcactagagaagtctgaggctcgccgcaaggagctggaggagaagatggtgtccctgctgcaggagaagaatgacctgcagctccaagtgcaggcggaacaagacaacctggcagatgccgaggagcgctgcgaccagctgatcaagaacaagatccagctggaggccaaggtgaaggagatgaccgagaggctggaggacgaggaggagatgaacgccgagctcacggccaagaagcgcaaactggaagacgagtgctcagagctcaagagagatatcgatgacctggagctgaccctggccaaggtggagaaggaaaagcacgcaacagagaacaaggtgaaaaacctgacagaggagatggctgggctggacgagatcattgtcaagctgaccaaggagaagaaagctctacaagaggcccaccagcaagccctagatgaccttcaggctgaggaggacaaggtcaacactctgaccaaggccaaggtcaagctggagcagcaagtggatgatctggagggatccctggakcaggasaagaaggtgcgcatggacctggagcgagcaaagcggaagctggagggtgacctgaagctgacccaggagagcatcatggacctggagaacgacaagcagcagttggatgagcgactcaaaaagaaggactttgagttaaatgcactcaacgccaggattgaggatgagcaggccctgggcagccagctgcagaagaagctcaaagagcttcaggcacgcatcgaggagctggaggaggagctggaggctgagcgcacagcccgggccaaggtggagaagctgcgctcagacctgtcccgggagctggaggagatcagtgagaggctagaggaagccggtggggccacatctgtgcagatagagatgaacaagaagcgcgaggccgagttccagaagatgcggcgggacctagaggaggccacgctgcagcatgaggccacagctgcggccctgcgcaagaaacacgcggacagcgtggccgagctgggcgagcagatagacaatctacagcgggtgaagcagaagctggagaaagagaagagcgagttcaagctggagctggatgacgttacctccaacatggagcagatcatcaaggccaaggctaacctggagaagatgtgccggaccctggaggaccagatgaatgaacaccggagcaaggctgaggagacacagcgttctgtcaatgacctcaccmgccagcgggccaagctgcagacagagaatggggagctgtccagacagctggwtgagaaggaggctcttatctctcagctgacccgaggcaagctcacgtatamcmagyrgctksagsacctcragakksagcwrkarsaggmkgtsawgsccwagaatgccctgrcscrcgcactgcagtcagcccggcatgattgcgacctgytgcgggaacagtaygaggaggaaacagaagccaaggctgagctgcagcgtgtcctgtccaaggccaactcagaggtggcccagtggaggaccaagtatgagacggacgscayrmrgrggacggaggagctggaggaagccaagaagaagytggctcagaggcttcaggatgctgaggaggcastggagsccgtcaacsmcaagtgctcctcgctggagaagaccaagcacaggctgcagaacgagatsgaggacctgatggtggatgtggagcgctccaatgcgdmcgccrcarmcytggacaaraagcagaggaacttcgacaagatcctggytgaktggaagcagaagtakgargarwmmmarwmararctggagtcttcccagaaggaggcgcgctccctgagcacagagctcttcaagctsaagaatgcctatgaggagtctctggagcacctggagaccttcawgcgggagaacaagaacctccaggaggagatctcagacctgactgaacagctgggmkcaaskgggaararyrtscacgagctggagaagrtcckmwrgcwwytkgwsgcwgrgmwgckgsrgcygcagtcagccctrgaagaggctgaggcctcyctggagcatgaggagggcaagatcctccgagcccagctggagttcaaccagatyaaggcasagatcgaaaggaagctggcagagaargacgaggagatggagcargscaagcgcamccacctgcgggtggtggactcyctgcagacctccctggatkscgagacgcgcagccgcaacgaggccctgcgggtgaagaagaagatggagggcgacctcaacgagatggagatccagctcagtcatgccaaccgcatggctgctgaggcccagaaacaagtgaagagcctccagagtttgctgaaggacactcaaatccagctggatgacgcagtccgtgccaatgacgacctgaaggagaacatcgccatcgtggagcggcgcaacaacctgctgcaggcggagctggaggagctgcgggccgtggtggagcagacggagcggtctcggaagctggcagagcaggagctgatcgagaccagcgagcgggtgcagctgctgcactcccagaacaccagcctcatcaaccagaagaagaagatgsatgcagacctctcccagctccagacagaggtggaggaggcggtgcaggagtgtaggaacgcagaggagaaggccaagaaggccatcacagatgccgccatgatggccgaggagctgaagaaggagcaggacaccagcgcccacctggagcgcatgaagaakaacatggagcagaccatcaaggacctgcagcaccggctggacgaggcagagcagatcgccctcaagggtggcaagaagcagctgcagaagctggmggcccgggtccgggagctggagaatgagctggaggctgagcagaagcgcaatgcggartcggtgaagggcatgaggaagagcgagcggcgcatcaaggagctcamctaccagacagaggaagacargaagaacctactgcgactgcaggacctggtggacaagctgcagttraaggtgamggcytacaagcsccaggytgargaggcggaggaacagsccaacaccaacctgtccaagttccgcaaggtscwscacgagytggwtgaggcagaggagagggcggacattkccgagtcccaggtmaacaagytgcgggccaagagccgtgacattggcsccaagggcctgmmtgwrsmgtagatcttgykctacccaaccctaaggatgccystsrwgccbtgrgacctggagcctttgaaacagcmccttwggcagaaacmcmrtraagcaattttccttcargccmaaaaaaaaaaaaaaaaa

SEQ ID NO: 276 - DNA, 3230 bp, Rattus norvegicus
ggctaggaagcccgcttcacgtccccacgcttgttccctccacctcgctctcctgagagcagagagcgcgcggtgtgcagactcggagcattccgggaggatgaggcggggacccagcccaagttgggtgcatcttgcgggcgtgaggccacaactgggtttcggcatgaattaagaagcttgaaagatggagcgcagcacagtccttatccaacccgggctctggaccagggacaccagctggacactcctctatttcctgtgctacatcctccctcagacctcccctcaagtgctcaggatcggagggatttttgaaactgtggaaaatgaacctgttaatgttgaagaattagctttcaagtttgcagtcaccagtattaaccgaaaccgaaccttgatgcccaataccacattaacctatgacatccagagaattaatctttttgatagttttgaagcctcccgaagagcatgcgaccagctggctctcggggtggccgcactcttcggcccttcccacagctcctccgtcagtgctgtacagtctatttgcaatgctctggaagttccacacattcagactcgctggaaacacccttccgtggacagcagagacctattttatatcaacctctacccggactatgcggctatcagcagggcggtcctggatttggtcctctattacaactggaaaacagtgacggtggtgtatgaagatagcacaggtctaattcgtctgcaagagctcatcaaagctccctccagatacaacattaaaatcaaaatccgccagcttccccctgcgaataaagacgccaaacctctgctcaaggagatgaagaaaagcaaagagttctatgtgatatttgattgttcgcacgaaacagcwgcggaaattcttaagcagattttgttcatgggcatgatgactgaatattatcactacttcttcacaaccctggacttgtttgctttagatctggaactctataggtacagcggtgtaaatatgactggatttcggwwgctgaatattgacaaccctcacgtgtcatccatcattgagaagtggtccatggagaggttgcaggccccgcccagacccgagactggtcttctggatggcatgatgacaactgaagcagcgctgatgtacgatgctgtgtacatggtagccattgcgtcccaccgtgcctctcagctgaccgtcagctccctgcagtgccatcgacataagccatggcgccttggacccagatttatgaacctcatcaaagaggctcggtgggacggcttgactgggcggatcaccttcaataagaccgatggcttgagaaaggattttgacctggacattatcagtctcaaagaggaaggaactgaaaaggcctctggtgaagtgtctaaacacttgtataaagtgtggaagaagattgggatttggaactccaacagtgggctgaacatgacggatggcaacagagacaggtccaacaatatcacggactcgctggctaaccgcacactcattgtcaccactattctggaagagccctacgtgatgtacaggaaatccgataagcccttgtatggaaacgacaggtttgaagsatattgcctggatctgctgaaagaactgtccaatatcctgggttttctttacgatgttaaactggttcctgatggcaaatatggagcacagaatgacaaaggggaatggaatgggatggtaaaagaactcatcgaccacagagctgacctggcagtggcccctctcaccatcacatacgtacgggagaaagtcattgacttctccaagcccttcatgaccctgggcattagcatcctttaccggaagcccaatggaaccaacccgggtgtcttctccttcctcaaccccctatctccggacatttggatgtacgtgctgctcgcctgcctaggagtcagttgtgtactgtttgtgattgcgaggttcacaccctacgagtggtataacccccacccatgcaaccccgactcagacgtggtggaaaacaatttcactttgctaaatagtttctggtttggagttggagctctcatgcagcaaggatcagagctgatgcccaaggctctatcgaccagaatagttggaggaatatggtggtttttcaccctaatcatcatttcatcctacacggccaacctggctgccttcttgacggtagaaagaatggaatcccccatcgattccgcagacgatctggccaaacaaaccaagatagaatatggggcagtcagagatggctcgacgatgaccttcttcaagaaatcaaagatctccacctatgagaaaatgtgggctttcatgagcagtagacagcagagcgcactggttaaaaacagtgacgaggggatccaaagggtgctcaccaccgactacgcactgctgatggagtccaccagcattgagtatgtgacgcagaggaactgcaacctcactcagatcgggggcctcatagactccaaaggctatggagtggggacgcctatcggctccccttaccgggataaaattacgattgccattcttcaactgcaagaagaagggaagcttcatatgatgaaagagaagtggtggagggggaatggctgccctgaagaagacagtaaggaagccagtgctctgggagtggaaaatatcggcggcatcttcattgttctggctgcaggactcgtgctttctgtgtttgtagccattggagaatttttatacaaatcacggaagaacaatgacgttgagcagtkwctmwstktcwatgccwtsatrsmmkakctgkkwrkatcyctcaagwrksrgaaarmmttaaagaaaaagtcaagaactaagggcaaatcttctttcacaagtatccttacttgtcaccagagacgaactcagagaaaagagacagtggcgtgatcaaagaacacacykgtaagaagaaaaagcccacacgtccgctgcacatatttggaggacagatttcagaggactatgtctttatccataaccccagtcgtggacagagggggaagaaatgcacaatttttaaagctcacatagatattacttgagaagtgaaactgattcttttcagatgaatttgtatgcacacttattttgaatttttccatttcctccgataaattgctatgtgtgctttctaaataataataaacaagcggactttgtttttcat

SEQ ID NO: 277 - DNA, 6529 bp, Rattus norvegicus
tagcttgcttctgctaatgctaccccaggcctttagacagagaacagatggcagatggagtttcttattgccatgcgcaaacgctgagcccacctcatgatcccggaccccatggttttcagtagacaacctgggctaagaagagatctccgaccttatagagcagcaaagagtgtaaattcttccccaagaagaatgagaagatggagctcccctttgcgtccgtgggaactaccaatttcagacggttcactccagagtcactggcagagatcgagaagcagattgctgctcaccgcgcagccaagaaggccagaaccaagcacagaggacaggaggacaagggcgagaagcccaggcctcagctggacttgaaagmctgtaaccagctgcccaagttctatggtgagctcccagcagaactggtcggggagcccctggaggacctagaccctttctacagcacacaccggacattcatggtgttgaataaaagcaggaccatttccagattcagtgccacttgggccctgtggctcttcagtcccttcaacctgatcagaagaacagccatcaaagtgtctgtccattcctggttctccatattcatcaccatcactattttggtcaactgcgtgtgcatgacccgaactgatcttccagagaaagtcgagtacgtcttcactgtcatttacaccttcgaggctctgattaagatactggcaagagggttttgtctaaatgagttcacttatcttcgagatccgtggaactggctggacttcagtgtcattaccttggcgtatgtgggtgcagcgatagacctccgaggaatctcaggcctgcggacattccgagttctcagagccctgaaaactgtttctgtgatcccaggactgaaggtcatcgtgggagccctgatccactcagtgaggaagctggccgacgtgactatcctcacagtcttctgcctgagcgtcttcgccttggtgggcctgcagctctttaaggggaaccttaagaacaaatgcatcaggaacggaacagatccccacaaggctgacaacctctcatctgaaatggcagaatacatcttcatcaagcctggtactacggatcccttactgtgcggcaatgggtctgatgctggtcactgccctggaggctatgtctgcctgaaaactcctgacaacccggattttaactacaccagctttgattcctttgcgtgggcattcctctcactgttccgcctcatgacgcaggactcctgggagcgcctgtaccagcagacactccgggcttctgggaaaatgtacatggtctttttcgtgctggttattttccttggatcgttctacctggtcaatttgatcttggccgtggtcaccatggcgtatgaagagcagagccaggcaacaattgcagaaatcgaagccaaggaaaaaaagttccaggaagcccttgaggtgctgcagaaggaacaggaggtgctggmagccctggggattgacacgacctcgctccagtcccacagtggatcacccttagcctccaaaaacgccaatgagagaagacccagggtgaaatcaagggtgtcagagggctccacggatgacaacaggtcaccccaatctgacccttacaaccagcgcaggatgtctttcctaggcctgtcttcaggaagacgcagggctagccacggcagtgtgttccacttccgagcgcccagccaagacatctcatttcctgacgggatcacscctgatgatggggtctttcacggagaccaggaaagccgtcgaggttccatattgctgggcaggggtgctgggcagacaggtccactccccaggagcccactgcctcagtcccccaaccctggccgtagacatggagaagagggacagctcggagtgcccactggtgagcttaccgctggagcgcctgaaggcccggcactssacactacagggcagaagagcttcctgtctgcgggctacttgaacgaacctttccgagcacagagggccatgagcgttgtcagtatcatgacttctgtcattgaggagcttgaagagtctaagctgaagtgcccaccctgcttgatcagcttcgctcagaagtatctgatctgggagtgctgccccaagtggaggaagttcaagatggcgctgttcgagctggtgactgaccccttcgcagagcttaccatcaccctctgcatcgtggtgaacaccgtcttcatggccatggagcactaccccatgaccgatgccttcgatgccatgcttcaagccggcaacattgtcttcaccgtgtttttcacaatggagatggccttcaagatcattgccttcgacccctactattacttccagaagaagtggaatatcttcgactgtgtcatcgtcaccgtgagccttctggagctgagygcatccaagaagggcagcctgtctgtgctccgtaccttmcgcttgctgcgggtcttcaagctggccaagtcctggcccaccctgaacaccctcatcaagatcatcgggaactcmgtgggggccctgggcaacctgacctttatcctggccatcatcgtcttcatcttcgccctggtcggaaagcagcttctctcagaggactacgggtgccgcaaggacggcgtctccgtgtggaacggcgagaagctccgctggcacatgtgtgacttcttccattccttcctggtcgtcttccgaatcctctgcggggagtggatcgagaacatgtgggtctgcatggaggtcagccagaaatccatctgcctcatcctcttcttgactgtgatggtgctgggcaacctagtggtgctcaaccttttcatcgctttactgctgaactccttcagcgcggacaacctcacggctccagaggatgacggggaggtgaacaacttgcagttagcactggccaggatccaggtacttggccatcgggccagcagggccatcgccagttacatcagcagccactgccgattccrctggcccaaggtggagacccagctgggcatgaagcccccactcaccagctcagaggccaagaaccacattgccactgatgctgtcagtgctgcagtggggaacctgacaaagccagctctcagtagccccaaggagaaccacggggacttcatcactgatcccaacgtgtgggtctctgtgcccattgctgagggggaatctgacctcgacgagctcgaggaagatatggagcaggcttcgcagagctcctggcaggaagaggaccccaagggacagcaggagcagttgccacaagtccaaaagtgtgaaaaccaccaggcagccagaagcccagcctccatgatgtcctctgaggacctggctccatacctgggtgagagctggaagaggaaggatagccctcaggtccctgccgagggagtggatgacacgagctcctctgagggcagcacggtggactgcccggacccagaggaaatcctgaggaagatccccgagctggcagatgacctggacgagcccgatgactgtttcacagaaggctgcactcgccgctgtccctgctgcaacgtgaatactagcaagtctccttgggccacaggctggcaggtgcgcaagacctgctaccgcatcgtggagcacagctggtttgagagtttcatcatcttcatgatcctgctcagcagtggagcgctggcctttgaggataactacctggaagagaaaccccgagtgaagtccgtgctggagtacactgaccgagtgttcaccttcatcttcgtctttgagatgctgctcaagtgggtagcctatggcttcaaaaagtatttcaccaatgcctggtgctggctggacttcctcattgtgaacatctccctgacaagcctcatagcgaagatccttgagtattccgacgtggcgtccatcaaagcccttcggactctccgtgccctccgaccgctgcgggctctgtctcgattcgaaggcatgagggtagtggtggatgccctcgtgggcgccatcccctccatcatgaacgtcctcctcgtctgcctcatcttctggctcatcttcagcatcatgggcgtgaacctcttcgccgggaaattttcgaagtgcgtcgacaccagaaataacccattttccaacgtgaattcgacgatggtgaataacaagtccgagtgtcacaatcaaaacagcaccggccacttcttctgggtcaacgtcaaagtcaacttcgacaacgtcgctatgggctacctcgcacttcttcaggtggcaaccttcaaaggctggatggacataatgtatgcagctgttgattccggagagatcaacagtcagcctaactgggagaacaacttgtacatgtacctgtacttcgtcgttttcatcattttcggtggcttcttcacgctgaatctctttgttggggtcataatcgacaacttcaaccaacagaaaaaaaagctaggaggccaggacatcttcatgacagaagagcagaagaagtactacaatgccatgaagaagctgggctccaagaaaccccagaagcccatcccacggcccctgaataagtaccaaggcttcgtgtttgacatcgtgaccaggcaagcctttgacatcatcatcatggttctcatctgcctcaacatgatcaccatgatggtggagaccgacgagcagggcgaggagaagacgaaggttctgggcagaatcaaccagttctttgtggccgtcttcacgggcgagtgtgtgatgaagatgttcgccctgcgacagtactacttcaccaacggctggaacgtgttcgacttcatagtggtgatcctgtccattgggagtctgctgttttctgcaatccttaagtcactggaaaactacttctccccgacgctcttccgggtcatccgtctggccaggatcggccgcatcctcaggctgatccgagcagccaaggggattcgcacgctgctcttcgccctcatgatgtccctgcccgccctcttcaacatcggcctcctcctcttcctcgtcatgttcatctactccatcttcggcatggccagcttcgctaacgtcgtggacgaggccggcatcgacgacatgttcaacttcaagacctttggcaacagcatgctgtgcctgttccagatcaccacctcggccggctgggacggcctcctcagccccatcctcaacacggggcctccctactgcgaccccaacctgcccaacagcaacggctcccgggggaactgcgggagcccggcggtgggcatcatcttcttcaccacctacatcatcatctccttcctcatcgtggtcaacatgtacatcgcagtgattctggagaacttcaacgtrgccaccgaggagagcacggagcccctgagcgaggacgacttcgacatgttctatgagacctgggagaagttcgacccggaggccacccagttcattgccttttctgccctctcagacttcgcggacacgctctccggccctcttagaatccccaaacccaaccagaatatattaatccagatggacctgccgttggtccccggggataagatccactgtctggacatcctttttgccttcacaaagaacgtcttgggagaatccggggagttggactccctgaagaccaatatggaagagaagtttatggcgaccaatctctccaaagcatccyaygarccaatagccaccaccctccggtggaagcaggaagacctctcagccacagtcattcaaaaggcctaccggagctacatgctgcaccgctccttgacactctccaacaccctgcatgtgcccagggctgaggaggatggcgtgtcacttcccggggaaggctacrttacattcatggcaaacagtggactcccggacaaatcagaaactgcctctgctacgtctttcccgccatcctatgacagtgtcaccaggggcctgagtgaccgggccaacattaacccatctagctcaatgcaaaatgaagatgaggtcgctgctaaggaaggaaacagccctggacctcartgaaggcactcaggcatgcacagggcaggtyccaatgkctttctctgctgkrctaactccttccctmtggaggtggcaccaacctycagcctycwmcaatgcatgtcactggtcatggtgtcagaactgaatggggacatccttgagaaagcccccaccmcawtaggaatcaaaagccaargatactcctccattctgacgtscsttycgagktcccagaagatgtcaktsmtccctkctgywtgtgaccagagacgtgattcaccaacttctcggagccagagacacatascaaagacttttctgctggtgtcgggcagtsttagagaagtcacgtargggttggyactgagaattarggtttgcatgmctgcatgctcacagctgscggacaatacctgtgagtcggscattaaaawtmatatttytaaagbtaaaaaaaaaaaaaaaaaaaa

SEQ ID NO: 278 - DNA, 1724 bp, Rattus norvegicus
  misc_feature (1696)..(1696): n is a, c, g, or t
cgctgaacgctctcatcatcctaccgtcatgtctaagtcagagtcccccaaggaaccggaacagctgcggaagctcttcattggagggctgagcttcgaaacaaccgacgagagtctgaggagccattttgagcarwggggaacactcaccgactgtgtggtaatgagagatccaaacaccaaaagatccagaggctttgggtttgtcacatatgccactgtggaggaagtggatgctgccatgaatgcaagaccacacaargtggatggaagagttgtggaacctaagagagctgtgtcaagagaagattctcagagaccaggtgcccacttaactgtgaagaagatctttgttggcggtattaaagaagacactgaagaacatcacctacgagattattttgagcagtatgggaaaattgaagtgattgaaattatgactgacagaggcagtggaaaaaagaggggatttgcgtttgtcacctttgatgaccatgactctgtggataagattgttattcagaaataccatactgtgaatggccrcaactgtgaagtaagaaaggctctgtssaaacaagagatggctagtgcttcatccagccagagaggtcgaagtggttccggaaactttggtggtggtcgtggaggtggtttcggtggcaatgacaattttggtcgaggagggaacttcagtggtcgtggtggctttggtggcagccgtggtggtggtggatatggtggcagtggggatggctataatggatttggcaatgatggaagcamkwkkggaggtggtggaagcyacrakgattttggcaaykrcamsarccagtcrkcamrwkktggaccgatgaaaggaggaaactttggaggcaggagctctggcccttatggtggtggaggccagtactttgctaaaccacgaaaccaaggtggctatggaggttccagcagcagcagtagctatggcagtggcaggaggttctaattacagccaggaaacaaagcttdgcargagasccagasamgwgrcagggaagytacaggttacaacasayttgtgaactcagccaagcacagtggtggcagggcctagstgytacaaagamgacatgttttagacaatastcatgtgtgtgggcaaaaactccaggactgtayctgtkactaattgtataacaggttattttagtttctgttctgtggaaagtgtaaagcattccaacgaaggkttttactgtrgacctttttcacccatgctgktgattgctaaatgtaaaagtctratcatgacgctgaawaaawrwrwmdwwwwttkkdwhwwwwaawrwrmwrwrwaaarttagtytactytgaasccatcttggtaaacttccccaacagtgtgaagttagaattccttcasggtggtgccaarttccatktggratttawttatggktgcttgggtggrsaabccattgtcttcamaaaccttggtgttgcyaaactgccagttactgytgtaacwtaatgartktcaccatttaragggtcatccaagcaagatcacaatttggttataaaatggttgttggacacctatgwakasaaaattgaataacggyctcagataaaataasakatgggaatgaagcttgygtatcatccatkrtcatgtgtrctcaataaacgmttkaattctmwwrwrwrnvraaammwmdwrmmraahhctygtgccg

SEQ ID NO: 279 - DNA, 6097 bp, Rattus norvegicus
gagactgcctgcccctctctgtgactttcctgtgtgtgtgcgtgtgtgtgtatgtgtgtgtatgtgtgtgcgcgctcgtgtgagagaggagagagggagaagagagctcgagagagggtgattgyrygagtgcatgggagggtgctgatattcccagacaccaggactacagcggcagctcagctaaaaactgcattcagccagtcctcgggacttcrsgagsagggacaggacgcaaggcatcaacagccaccagctacaactgggaaataaggattcttctgccttcacttcgtgtttttagcagctccttgctaaatatcgacctcacaatgcagaggatctaatttgctgagkaaaacagtcaaagaaggaagaggaagaaagggaaacgaggggatattttgtggatgctctacttttcttggaaatgcaaaagattatgcatatttctgtcctcctttctcctgttttatggggactgatttttggtgtctcttctaacagcatacagataggggggctatttccaaggggcgctgatcaagaatacagtgcatttcgggtagggatggttcagttttccacttcggagttcagactgacaccccatatcgacaatttggaggtwrccaacagtttcgcagtcaccaatgctttctgctcccagttttcaagaggagtctacgcaatttttggattttatgacaagaagtctgtaaataccatcacatcattctgtgggacactccatgtgtccttcatcacacctagcttcccaacagatggcacacatccatttgtcatccagatgcgacctgacctcaaaggagcactccttagcttgattgagtactaccaatgggacaagttcgcatacctctatgacagtgacagaggcttatcaacactgcaagctgttctggattctgctgcagagaagaagtggcaggtgactgctatcaatgtggggaacatcaacaatgacaagaaagatgrgasckrcmgatcgctctttcaagatctggagttaaaaaaagaacggcgtgtaatcctggactgtgaaagggataaagtaaatgacattgtggaccaggttattaccattggaaaacatgttaaagggtaccattatatcattgcaaatctgggattcactgatggggacctgctgaaaattcagtttggaggagcaaatgtctctggatttcagattgtagactacgaygattccctggtgtctaaatttatagaaagatggtcaacactggaagagaaagaataccctggagcacacacagcgacaattaagtatacttcggccctgacgtatgatgctgtccaagtgatgactgaagcattccgtaaccttcggaagcagaggattgaaatatcccggagaggaaatgcaggggattgtttggccaacccagctgtgccctggggacaaggggtcgaaatagaaagggccctcaagcaggttcaagttgaaggcctctctggaaatataaagtttgaccagaatggaaaacgaataaactacacaattaacatcatggagctcaaaacaaatggaccccggaagattgggtactggagtgaagtggataaaatggttgtcaccctaactgagctcccatcaggaaatgacacgtctgggcttgaaaacaaractgtggtggtcaccacaatattggaatctccatatgttatgatgaagaaaaatcatgaaatgcttgaagggaatgagcgttacgagggctactgtgttgacttagctgcagaaattgccaaacactgtgggttcaagtacaagctgactattgttggggatggcaagtatggggccagggatgccgacaccaaaatttggaatggtatggttggagagcttgtctacgggaaagctgacattgcaattgctccattaactatcactctcgtgagagaagaggtgattgacttctccaagcccttcatgagtcttggaatctctatcatgatcaagaagcctcagaagtccaaaccaggagtgttttcctttcttgatcctttagcctatgagatctggatgtgcattgtgtttgcctacattggggtcagtgtagttttattcctggtcagcagatttagcccctacgagtggcacactgaggaatttgaagatggaagagaaacacaaagtagtgaatcaactaatgaatttgggatttttaatagtctctggttttccttgggtgcctttatgcggcarggatgcgatatttcgccaagatccctctctgggcgcattgttggaggtgtgtggtggttctttaccctgatcataatctcctcctacacggctaacttagctgccttcctgactgtrgagaggatggtgtctcccatcgaaagtgctgaggatctgtctaagcaaacagaaattgcttatggaacattagactctggctccactaaagagtttttcaggagatctaaaatcgcagtgtttgataaaatgtggacttatatgaggagtgcagagccctctgtgtttgtgaggactaccgcagaaggagtagccagagtccggaaatccaaaggaaagtatgcctacttgctggagtccacaatgaacgagtacatcgagcagaggaagccttgtgacaccatgaaagtgggaggaaacttggattccaaaggctacggcatcgccacacctaaaggatcctcattaggaamyscrgtwaayctygcagtaytraaactsartgarcaaggcststtrgacaarytgaaaaacaaatggtggtacgayaaaggwgartgyggagcsrrggastcgkgawsyaaggaaaagaccagtgccctcagtctgagcaacgttgctggagtattctacatccttgtcgggggccttggtttggcaatgctggtggctttgattgagttctgttacaagtcaagggccgaggcgaaacgaatgaaggtggcaaagaatccacagaatattaacccatcttcctcgcagaattcccagaattttgcaacttataaggaaggttacaacgtatatggcatcgagagtgttaaaatttaggggatgaccttgagtgatgtcatgaggagcaaggcaaggctgtcaattacaggaagtactggagaaaatggacgtgttatgactccagaatttcccaaagcagtgcatgctgtcccttacgtgagtcctggcatgggaatgaatgtcagtgtgactgatctctcgtgattgataggaaccttctgagtgccttacacaatggaaccttctgagtgccttacacaatggtttccttgtgtgtttattgtcaaagtggtgagaggcatccgatatcttgaaggcttttctttcagccagaattcttaactatgtggagttcaccttgaattgtaaggaaagataaattacaaacagagcatcattttctacttccgatatcagaggaagcgtggtggacatgcacagctaacatggaaatactatcatttaactgaagtctttgtacagacaacaaacccgtttccgcagccactattgttagtctcttgattcataatgacttaagcacacttgacatcaactgcatcaagatgtgacctgttttataaawaaaaarraaaaaaacatttaaaataaaaaaatatttttaggtattttcacagacaaactggcttttaaataaatttgcttccgtactggttggttaagacaaatacaaaaacaaaaacaaaacaaaacaaaaaccaaaaaaaacaaaacaaaacaaaacaaataataaaaaaatgataaagtcaaactgagtgggaagtgattgaaaaaaaaggtctgtggtatcagttccgtattttttcaaagccaaatatgtaaatggtgaggaaggaaacagaggagaatccagtcgtgtaatttaatattgttattaaaactttaatgtatcctattctttaacctttggtgttaatatgaaactacttggtgatgcttgacatttgaaataaacatttttctattgttttatttgcaagtggtccaattaattttgcttagctacagtttggtcataaatccagtgatctaaagacaggaatgcatagtccctaagattcctaagaaaaggcccccagttaaaagactggaatattttttctctgacaagtagaatttcccccaaatagtctatctaaagctattttttctgtacatcatactgtataatagtaaaatatttgttaattaaaaagcatttaatctatatagataaatgacttatagtttaaaaatcagatttattatcaaatgtcagaaggcgtgatttctgctcttgaagtatttaaggttgtgtaggagcagtaatcaatatagataaagtcagaaatggcttgaaggtatcaactgttcagacacccgtactggccaaattctgtaatctaagtatgcatcttcagttttaaaattataaaaaccaacatcagtttttgaatactttagtgacctagaaatagtttctttccatttccatctataaaatcagccctaatttttatttatgccccaaatagaaggggcactttaataagtgtaatatggatactctcccatctctgtaactgttcactgaagagattatactgttttatttgatgaatttaagccatccatcttcccttcattaaaatgccttttatttttatttccactaatgtgttccaaatgagattagtttagggttaaaagcacctgacacacagtagctatctttaagatttatgttatttttttctcataaaaattctatgtaatatttggtgtctgaccaagtggttggtagagcatccttattgactatttttagagatcagaaatgtaagatttaacagtagccacttacattctacatggtaacatgtagttcgtgatgatcttcactaaattttascatycctsctatwwattscgagatcattcaaaataatttgagtgcattactcatcagggatgctggaggtacattttaagttttaataataaatgctagaatgaccaaattgcwgactaattatttccatattgtacttaaaaktagtttttaaaaattattttaaaaaaagatgactatatacaatcaatgctatttattgtacctctgggcgtactyttccaaaaatygagcttatsaattttwctctgtcaagcttgaactaatgkaaataatcgaaatamtgtaaagktatattttcatgtttktatagatatgacatgacaagaacatataatgtaagagtatctcaagtgtggataatgttgattggctaacacagagctcagtcttakgcagtaaaacctagttyaatatccatgtaacaatgcatcagwatattgctgtawacatgtgtctgtgcatagaagtgatwaatgctcaaataagagtggtgacagctatctcaaggttttttttaattcattttatataaactgttrtgraaagvccaaaatattatgaactatyttatgtaaatttacaawtgtcctttaatgtacattttgtttacagtatagtaccttattctctgctgtgttaagtgggtgtcgtactccaaggagacaaacactttytacaacttctattgaagacactggsrkywcsarttttttcatgtgtastatgtcagaaaatgcttttgattttatttttaaatmtaacatctgatggctttytcagagtgttgtggaaacttcagtcatacataaaatatgttmttataaaatgccaammwmhwwwwawwmwrwttttcctcaatggkacaacaatctaataatgagaaaacagaaagtgtatsttatattyttcccaaataaatctagatgtytgtagtgaarrarrrmawmwmwrmtcagtttgttagaaaagtatgatagagtcaaggcagaatgtstttttaatttaaatgaagagaattggtmgttgtggtamgtmatgmtcmttaagcactttggacatagagagaaatgtggcaattgattaaatsaccaattytgcatacaggcattgtgtastgtcaaaaaaaaaaaaaaaaa

SEQ ID NO: 280 - DNA, 2971 bp, Rattus norvegicus
gtaatggagtgtacgcaaaatcctctgtctgtggactcgcaccagagcctcccagaaaacctgggcgatctgcgccatcgtcttcaatgcctctctgaaaagcctttagcaagactgagagaaagagaaaagagagcgcgccagagagaggagcaaagaagatgaggattatttgcaggcagattgtcttgttgttttctggattttggggactcgccatgggagcctttccaagcagcgttcaaataggtggtctcttcatccgaaacacagaccaggaatacactgcttttagactggcaatctttcttcataacaccagccccaatgcatcggaagctcctttcaatttggtacctcatgtggacaacattgagactgccaacagttttgctgtgacaaacgccttctgttcccagtattctagaggggtgtttgccatttttggactctatgacaagagatccgtgcataccttgacctcgttctgcagtgctctgcacatctctctcatcacaccaagctttcccactgaaggggagagccagtttgtgctgcagctaagaccttcactgagaggtgcactcctgagcctcctggatcactatgagtggaactgtttcgtcttcctgtatgatacagacagggggtattcaatacttcaagctataatggaaaaagcaggacaaaatggatggcatgtcagtgcaatatgtgtggaaaattttaatgatgtcagctacaggcaactgctagaagagcttgacagaagacaagagaagaaatttgtgatagattgtgagatagagaggcttcaaaacattttagaacaaattgtgagtgttgggaagcatgtcaaaggctaccattatatcatcgcaaatttgggtttcaaggatatttctcttgagagatttatacatggaggagcaaatgtaacaggattccagttggtagattttaatacacccatggtaaccaaactaatggatcggtggaagaaactagatcagagagaatatccaggttctgaaacacctccaaagtacacctctgctctcacttatgatggagtcctggtgatggctgaaactttccgaagtctcagaagacagaaaattgatatttcaaggagaggaaatgctggggactgtctggcaaaccctgctgctccctggggccagggaattgacatggagaggacactgaagcaggttcgaattcaagggctgactgggaatgttcaatttgaccattatggacgtagagttaattacacaatggatgtgtttgaactaaaaagcacaggacctcgaaaggttggctactggaatgatatggataaattagtcttgattcaagatatgcctactctgggcaatgacacagcagctattgagaacagaacagtggttgtaaccacaattatggaatctccctatgttatgtacaagaaaaatcatgaaatgtttgaaggaaatgacaagtacgaaggctactgtgtagatctggcatcggaaaktgcaaaacatattggtatcaaatataaaattgccattgttcctgatggaaaatatggagcaagggacgcagacactaagatctggaatgggatggtaggagagcttgtgtatgggaaagcagagattgctattgcccctctgacaatcacattggttcgagaggaagtcatcgatttttctaagccttttatgagtttaggcatctctatcatgatcaaaaaacctcagaaatctaaaccaggagtcttttccttcttggaccctctggcctatgagatctggatgtgcatagtgtttgcatacattggtgtcagtgtggtcttgttcctagtcagtaggtttagcccatatgagtggcacacagaagaacctgaggatgggaaggaaggacccagtgaccagcctcccaatgaatttggcatctttaacagcctttggttttccctgggtgcctttatgcaacaaggatgtgacatttcacccagatccctgtcaggtcggattgttggaggcgtgtggtggttcttcacactcatcattatatcgtcctacactgctaatctggctgcattccttactgtggagagaatggtctcccccatagaaagtgcagaagacctggccaaacaaacagaaattgcctatggaacacttgattctgggtcaacaaaagaattcttcagaagatcaaaaatagcagtgtatgaaaagatgtggacctacatgcgatcggcagagccgtctgtgttcactagaactacagctgagggcgtggctcgtgtccgcaagtccaagggcaaatttgcctttctcctggagtccacgatgaatgaatacaytgagcagcgaaagccctgtgacacgatgaaagtgggaggaaacctggattccaaaggctatggtgtagcaacgcccaagggttcctcattrrgaamtsctgtwaacctygcmgttttraaactsartgarsmaggcstcttrgacaarytgaaaaacaaatggtggtacgayaaaggwgaatgtggascsrrggastcgkgawscaaggacaagacgagtgccttgagcctgagcaacgtagcaggcgtcttctacattctggttggcggcctgggcttggcaatgctggtggctttgatagagttctgttacaagtccagggcagaggcgaagagaatgaagctgactttttccgaagccayaagaaacaaagccaggttatccatcactgggagtgtgggagaaaacggccgtgtgctkacccctgactgccccaaggccgtacacacaggaactgcaattagacaaagttcgggattggctgtcattgcatcggacctaccataaaaaccaaaaaaataattgagtgccttaatcaaactgtgttggtgactgactgaaacgcagccctgagggaaaggccaagagtgggtcttgactaaatccat

SEQ ID NO: 281 - DNA, 2041 bp, Rattus norvegicus
caatttgctgagcctgtcacctttgttccaggagccaaaccagcaatgtcttcccctgcacagcctgcagttcctgccccactggccaacttgaagattcaacacaccaagatctttataaacaatgaatggcacaactcattgaatggcaagaaatttcctgtcattaaccctgcaactgaagaggtcatctgccatgtggaagaaggggacaaggcagatgttgacaaagctgtgaaggctgcaagacaggctttccagattggctccccctggcgcaccatggatgcttcagagagaggatgcctgctgaacaagctggctgacttaatggagagagatcgcgtgctgctggctacaatggaatcaatgaatgctggaaaaatctttactcatgcataccttttggatacagaggtcagcataaaagccttaaagtactttgcaggctgggcagacaagattcatggccaaacaattccaagtgatggagatgttttcacttatacaagacgtgaacctattggggtgtgtggccaaatcattccttggaatggtccgttgattttattcatttggaagataggcgctgcccttagctgtgggaacactgtgattgtgaagccagcagagcaaactcctctcacagctctttacatggcatctttaataaaagaggcagggtttcctcctggtgtggtgaacgttgtccctggttatggatcaactgcaggggcagccatctcttctcacatggacatagacaaggtgtctttcacaggatcaacagaggttggcaaattaatcaaagaagctgcagggaaaagcaatctgaagagggtcaccctggagcttgggggaaagagcccttgcattgtgtttgcagatgctgacttggatagtgctgttgagtttgcacaccaaggagtattcttccaccagggtcagatttgtgtcgcagcatccagactttttgttgaggagtccatttacgatgaatttgttaggaggagtgtggagcgggctaagaaatacgttctaggaaatcctctggactcaggaataagtcaaggtcctcagattgacaaggagcaacatgctaaaatccttgatctcattgagagtgggaagaaagaaggcgccaaactggagtgtggtggaggacgctgggggaacaaaggcttctttgtccagcctacagtcttctccaatgtgaccgatgagatgcgcattgccaaagaggagatatttggaccagtgcaacaaatcatgaagtttaagtccatagatgaggtgatcaagagagccaacaatactccctatggtctagcagcaggagtcttcacaaaagacctggacagggccatcactgtgtcttctgctctgcaggccgggacagtgtgggtgaattgttatttgactctctctgtccagtgcccatttggtgggttcaagatgtctggaaatgggcgagaaatgggtgaacagggtgtttatgaatacactgagctcaagacagtcgcaatgaaaatatctcagaagaactcctaaagaagccagcagagtgacgagaaactctcagcagtrgctacatgtctcctacaatcaccagcagagggttgttttattacagggtcttctgttgatttcttaaacataaggaatccatcagcattactgtaactcatagaaaayrtatagyttaattcttctaatacatgaccctaatwcatacccaagaagaaagggatacatttaggtacatgctctttgtaacccagtcatgaaaaagtgctttycattgtagctacttgtctacagccctcatttgatgtgatttaaactctgtttctcggtkacttcttgccactactyaccatgcacaactgaaaagtyagccactgttcttggagttattgttctgagtattgtgaaatatttttagaatgacayacctgcttgtcaaatraaatgcttagctgtaawtagagtgcaaagtttaataaaggcaaaatctcacatraaaaaaaaaaaaaaaaaa

SEQ ID NO: 282 - DNA, 2804 bp, Rattus norvegicus
tgtatgacactacatcatgagtgacagtaaaagcgatggccagttttacagtgtgcaagtggcagactcaactttcactgttctaaaacgttaccagcagttgaaaccaattggctctggagcccaaggaattgtttgtgctgcttttgatacagttcttggaataaatgttgctgtcaagaagttaagtcgtccttttcagaaccaaacgcatgcaaagagagcctaccgtgaacttgtcctcctaaagtgtgtcaatcataaaaatataattagcttgttaaatgtgttcacaccacaaaaaacgctagaagaattccaagatgtgtacttggttatggagttaatggacgctaacttatgtcaggttattcatatggagctggaccatgaaagaatgtcatacctcctctaccagatgctttgtggcattaagcacctgcattcagctggcataattcatagggatttgaagcctagcaacattgtagtaaaatcagactgtactctcaagatccttgactttggcctggcacggacagcctgtaccaactttatgatgactccctatgtggtaactcgctactatcgggctccagaagtcatcctgggcatgggctacaaggagaatgtkgayatctggtcwgtsggktgcatcatggsagarmtggtsmwmsrtwrwgtsmtrttccmaggwaswgacyatattgatcaatggaataaagttattgaacagctaggaacaccatccgcagagttcatgaagaaacttcagccaactgtaaggaattatgtggaaaacagaccaaagtaccctggaatcaaatttgaagagctctttccagattggatatttccgtcagaatccgaacgagacaaaataaaaacaagtcaagccagagatctgttatcgaaaatgttagtgattgatccggacaagcggatctctgtggacgaagccttgcgccacccgtatattactgtttggtatgaccccgctgaagcagaagcgccaccacctcaaatttatgatgcccagttggaagaaagagagcatgcgattgaagagtggaaagaactaatttacaaagaagtgatggactgggaagaaagaagcaagaatggggtgaaagaccagccttcagatgcagcagtaagcagcaaggctactccttctcagtcgtcatccatcaatgacatctcatccatgtccactgagcacaccctggcctcagacacagacagcagtctcgatgcctcaaccggacccctggaaggctgccgatgaaacctcgcagatggcgcacttgtctgtgaagractctggcttccatggccctgagcacatggragctggtggaacaaatcaagaagctccatgttctgcatgtaagaaacacgacgccttgcccccactcagttccartrggaykgcywgsgtwkactgtaacatgaggcagacgatgtctggagaaaaagtacaaaccacactgttrgaaattttgttcaagatcattcaggtgakcaattagaatagccgagttctttycmagtcgtgtggtgtccttggtgacagatcatgtgtaactgtggggactcgtatgcatgtgaccacaaatgcttgcttgaacttgcccatgtagcactttgggaatcagtatttaaatgccaaataatcttccaggtagttctgcttcyagaataatctcttaatcctctttagtaatttggtgtctgtccacaaaaaaatagatyatgtgtgtmtgarktggccrctatcatattatcatattttacccactttyayggkatgatttattctgtcttttgtatttcagaaggaatataattaaatttatttawtaawtaaaamwamarmwwwwmwwaaawwwrwrawrwwwwaggctgagaattaccactgctttatatcgacactctgtgtcctttaaactgcccactatgggaaactttacgtacagctttctgcatgacaamgttccaagttgtatttcactctgcttarcgacttatgtcaccttgaatcctgaccacacatttcctttttcttggtcctctgaacttggatctakaatccctcacagaacttcaccttctttakcacaaagcaccccatctcagtakaatgaatcggcagattcctgagccccgctgcctaatgtasagctgacagggtggsytccccavaacggtgggtggktgcmtccttccctgagcccacccatcctttgctcmcctctctttatttaasgtgaaaggtgattgggtctcatarcctttccttttgtagcattgcctaacttgtcwttctcactgacagragccaccacgtccagccagagcacatggtctcttaggagaccgggcttacttaccatgcatgtttgctgctgtccttttccattttgtggaggcatttcctttttctaagggaattcctcagatgttctagaaacattcagaagaacgcagaagaaatattctagagaattrggggwtcattcttgaatattttctgatttaaaactgctcacctgaaattgatactttcagatcctgatcttgtaaattactcgagatttggtaagatgctgagttctctgtgttgttgcagaattggagttgggatgatcataccttggmtacctgcgctcagagcatttccttcttgagcttattttgttaacaattcatatcttgtgttcagttactttgggagytatggagtgtgttatagaaggaaatttgataagaacttttytggaaagtaaaaaaaaaaaaaaaaa

SEQ ID NO: 283 - DNA, 2266 bp, Rattus norvegicus
accactctcttctctagcatcttatcaaaagatgcattgatgaacagtgtcatagtggttccccaataaattttggtcatttttacatctgattttattcaatttgggacccttctcttcaacaaatccatttctattttcatgccttcttttttatatgtgtactactgaatttagaatttaagttcagctagaagaatccatttatttatgtagaggaccgtcatagatgagaactctggggtaacaagtccagcgtattcattttaagatcttctcaaggtgatagaaggtagtttatgtgaactacagataaacacacatgtatgctcaatacaaatacgtatacatgtgcccacaacattcatgtattatgtacttatatgcacaaatatacatacatgtacatatacatgcagacacaccaaaatttacccaagcacatgcacataaacagatgcacacatatacacacatgtgcacatctacacatatgttggtgttagcattcaggggaatagatgaaatcagagaaatacagtatatcacatcactgaaggtaattagagtccagcactgaacttctactcacgcccttgtgtttcccatgttaactttaaatttgaaacacaaaaatagactaatgggaattagkcmgagtgrmkcgwgcsrgtcgagtggytgtytkttywkryctcggaawccggtagcccttgyascatggctgaccaactractgaagagcagatygcagaattcaaagaagctttcyccctatttracarggayggggatsrgacartaacaaccaaggagctggggayggtgatgsggtctctggggcagaaycccacagaagcagagctgcaggacatgatcartgaagtagatgccgayggtaatggcacaatcracttccctgaattyctgacaatgatggcragaaaaatgaaagrcacrgacrktgvagaagaaattagagaagcgttccgtgtgtttgataargayggcaatggmtacatcagtgcagmrgagyttcgccacgtgatgvcaamccttkgagagaarktamcagwtgargaggkygrtkraatgatcagrgrmgcasacatbgrtggkgatggtcargkwawcyaysaasagtttgtrcamrtgrkgacagcgrrgkrrasaccctgkmcagaaggkkktaaatttctkkwacarraykrkwwattkgccttttctytgktkgtaayyyawmygkraarkgtyycccmmytgtmrvaayatgcatgtwtrgwaaytaggmtycmttcyyycatgttyytycccwatcttmtgtcattgyccttcaaccttattttagaaaastgatcaagtaccatgttgcatgtggcttcctctggmtatatytaagccbttykkcacatctacacttagatggagttggtcawagggaacatywgsskyatgmysttttttamagtagcttttdggaaccgkcrgcwtrytgctgttgaagtktggagttktgagcktggacyktggrcagtsgacavsgtgtaytaarrgttgcactactgsaarygggtgttytrkccgrtactcactcgtacrctatttktttgkacygskggkattgtmccagaaacattytcktwtaytgktacttsctttttaaactttgtttagccacttaaggaaratctgcttwtggcacaatttgcctcawatccattcmaagttgtatatttgttttccaatawaaamwmrtgmcaatttwmwmmmmwmwmammmaaaaaawagactaatgggaacatctaagggaatttcagaagtgtgctttatcagtttttcatttaaatttcatttttctcttctgtaaacaatattcaagaaatttcacttatagaatttcctagttatttatgaaatataccttataaatagataaataaatataagtagacatctataatgtataattatatattatatagcacaaaatatataaatatataaatatgtaaattatatgtttattatttattggtatttattttcattttaaattcttataccctttcctggtttcccctctgaaaaacccctattcatcttcctcttttctgcttttgtgagggtactcacccacccgccgaatcccacctcaccacgctagcattcccctaccctggggcatcaagtccctgtaggaccaaggacctcccctcccatggatgacagataatgccatcctctgctacatatgcactggaggcat

SEQ ID NO: 284 - DNA, 1833 bp, Rattus norvegicus
  misc_feature (1820)..(1820): n is a, c, g, or t
cggggggaggcggcagcagtggagatggcggcggcggcggcggctccgggggrygggggcggggagcccaggggaactgctggggtcgtccyggtggtccccsgggaggtggaggtggtgaaggggcagccattcgacgtgggcccaygytacacrcagctgcagtacatcggcgargrygcgkacggcatggtcagctcagcwtatgaccacgtgcgcaagaccagagtggctatcaagaagatyagccccttcgagcatcaaacctactgtcagcscacgytgagagaaayccagatmttgctssgattscgccatgagaatgtcataggcatccgagacatcctcagagcacccaccctggaagcyatgagagatgtttacattgttcaggacctcatggakacrgacctgtacaagctgctwaagagccarcagctgagcaatgaccacatctgctwcttcctctaccagatcctccggggcctcaagtacatacactcggccaatgtgctgcaccgggacctgaagccctccaatctgcttatcaacaccacctgmgaccttaagatctgtgattttggcctkgcccggattgctgaccctgagcacgaccacactggctttctkaccgagtatgtggccacacgctggtaccgagccccagagatcatgcttaactccaagggctacaccaaatccattgacatctggtctgtgggctgcattctggctgagatgctctccaaccggcctatcttycccggcaagcactacctggaccagctcaaccacattctaggtatactgggttccccatcccaagaggacctaaattgtatcattaacatgaaggcccgaaactacctacagtctctgccctctaaaaccaaggtggcttgggccaagctttttcccaaatctgactccaaagctcttgacctgctggaccggatgttaacctttaacccaaacaagcgcatcacagtagaggaagcactggctcacccttacctggaacagtactatgatccgacagatgaaccagtggctgaggagccattcacctttgacatggagctggatgatctccccaaggagcggctgaaggagctgatcttccaagagacagcccgcttccagccaggggcaccagaggccccctaacaagaacagacacccctgtccttttggacctggtctgctctacctgctccttctctgcagattgttagaaaatgaactttgctcaacccggaccccggcagcccaggctggaccaagggtgggcctggcacccctctcactctgctggggtctcctssttcaagaggcttctcccactccagtcccctgccccatctccccttgacctgagtgatgaggtggtcccagagctgatctctgctgctgtgtctttatctatccctgctagccccagctctggtagacggttctggaatggaagggctatgaccgccctaggacctgtgctacagaggggtggagggcactgagtaggctaagctctgccctactcatcctgttggaaccccaccccattttccctgacagaacattcctaaatctcaagggctagtttccctgaggagccagcctaggcctaaccctctccctctcaagctgccacatgtaacgcccktgstgcttmtgtgtgtgggtgawtggatgtggaggyggggcccgtggagagcccgtgcccctccccacctccctgtgcctgtatctaatatataaatatagagatgtgtatatggrgaaaaaaaaaaaaaaaaaaaaaaaaaaacccaaaaaaaaangtctgcgcggccg

SEQ ID NO: 285 - DNA, 1094 bp, Rattus norvegicus
cttagccgcagggggcgccggcgttgcaaagcgggcctgggcgggacgaaccggacctggctccgtaactgcaggagcccagcagtagcagctgcagagcgcggaggcagagcacagcctcagccgccgcctcgccatggcgggtagcagctcgctggaggcggtgcggagaaagatccggagcctgcaggaacaggcagatgccgcggaggagcgtgcgggcagcctgcagcgagagctggaccaggagcggaagctgcgggaaaccgctgaagctgacgtagcatctctgaacagacgcatccagctggttgaggaggagttggatcgcgctcaggagcgtctggccacagctctacagaagctggaggaggctgagaaggctgcagatgagagtgagagaggcatgaaagtcattgaaagccgagcccaaaaagatgaagaaaagatggagattcaggagatccagctgaaagaggccaagcacattgctgaagatgctgaccgaaagtatgaagaggtggcccgtaagctggtcatcatcgagagcgatctggagcgtgcggaggagagggctgagctctcggaaggcaaatgtgccgagcttgaagaagagttgaaaacggtgacgaacaacttgaagtcactggaggctcaggctgagaagtactctcagaaagaagacaagtatgaagaggagatcaaggttctctctgacaagctgaaggarrctgagwmcmrggcygagtywgcagagagakcwgkaaccamrytskmsamhmkcadhkatgacttmsawgataagtttctttgcttctctcctcccaagactcyttcatcaagccggatgtcccacctctytgagctytgcatctgtytgctctccagctgacccaggtttcttthtagtgcccacccaccctagggccaggcacagaccgtgctttytattgtacagaggtkatcctcccagtgtaaaatwaacactgtmcgstarwmmwrwwwrmwawwmmwmwrmwmmwwawttattgacatttttgtctcagcgctcaataaaactacagttctgctttgwrmaaaaaaaaaaaaaaaaa

SEQ ID NO: 286 - DNA, 4347 bp, Rattus norvegicus
gatctggtgggatggggacatctttgtggagacacaggggggcaggggtgggaggaggtatgggatgtggaactgtctggagggtggaccgggaggggagtaaaatctggagtataaaaataaataaattaattaagaatactgttaattgaacaagtcctgaaaaaaaaaaaaagaaaaagaaacgggatggagatgtctctgtggttaagagtgcatactgctcttggagaggcctggagtttacttcccactatgtgtcaggtggcttagcgcgcgcgcgcgcgcgcgcgcgctcgcggtgtgtgtgtgtgtgtgtgtgtgtgtgtgtgtgtgtgtgtgtgtgtgtgtgtgtgtgtgcgtgtgtgtgttgtatatgagtagaatgaacctaagaccttgtgcatactggacaagctatcactgcattgtatccatattccacagagtttagcacccaggtatggcataataataataaatcttattgtaaattggagaaaggacagatttaggttcccttttacagaagcccaggaggcacagccttatttgaaagaaaaagcaactggcataaagtggtggattatgtcactttgtgtgatggtagtaatcacttaattatgtaaaccagagtatcctattgcacaccttaaatgtaggcaataaaagtaaaactttaagcagtaaaaaatactgtagaggccaccgccatgccatccagactgaggaagacccggaaattccggggccacgtgagccacagccacggtcgcattggtaagcaccgcaagcacccaggaggccgcgggaatgctggaggcacgcaattaccacaggatcaactttgacaaatatcatcctggttactttggcaaagtcggcatgagtcattaccacttgaagaggagccagagcttctgcccaactgtcaacctggataaattatggacgttggtcagccagcagacacgtgtcaatgcagcaaaaaacaagagtggagctgctcccatcattgatgtttttccaatcaggctactacaaagttctgaggaaggggaagcttcctaagcaacctgtcatcgtgaaggccaaattcttcagcagaagagctgaagagaagataaagggtgttggaggtgcctgttctggtggcttaaagtcacttcagaggttaattaaatgcaaacattttccatgaaaaaaaaatattgtagaaatgaattagcagttaagagcactggctgctcttccagagaatctcacctgtttgtaactctagttccacagcttctgagaccctcacacagacatacatggaggcaaaacagggttgaactataagataaaaaaccagtgtggtgtatatcccaagtgatgtctgtgagtggcattatgaccattctgttatcccgcattctctgctaaaagggctttgtatgcaaaaggtacctttattatatgagctaattacatgacttaattggtgagtaatcatggctaatattactatagcatgctaaaggaagtatcctaacrrctgggaagatttactgtgtaaaccaatttactttatttacaagtatatggtttaccttcactgctaaaactcagtctaagaatgcaatgatctttggataacatgatttactagattagccctgagtttagattgtatgttgaaactctctggggtatttgaaaaaaagaaaaaaaaagacagtaaatgagtgatatgggagggggtgccttagttggctcatgctgaggcacacctgcccacatctcccccttctcccctcccccgaggtaccggtaccagccatatatgggtctagtataaaagagagcttatttggaggcatgggaaagggggttgagaaggaagttgaggcagagaaagagaagtacagagagagagagaggaaagaaaggagaagaggcaggccaggaatatgtggagaggatgagagaggacttgagaggaaagagagagagggtaagagggactgagggagagggagagaaggagagaaggagagagggagagagagggagagagagagaggaaggttagagagcaaagagaggctagtcatttttatggcaagccaggctcttgtctggatgttgctatgtaacagttgggtagagccaagaaggaatgctaagaagctaactttgggtcccacccctggttagttacacagatttgtggtagtagaaagaggaagaacagttttcacttgtgtattttaacaggtcagggtccacaaagaagaaatattaaagcatatctagttgattggtcacttaggtatcagaagctcatgttgaattggcagctagctagcattataaaagtcctggacagcaagctcacaggagtctccctgagraggctgccatggatccagycctagtcctggtgctcactctctcctctctgcttctcctctcactctggagacagagctttgggagagggaagctccctcctggtccaacacctctcccaatcattggaaacacccttcagatatatatgaaggacatcggccaatcaataaaaaagktwwswrwwktytamgsyyctatatttactctgtatttgggcatgaagccctttgtggtgttgcatgggtatgaagctgtgaaggaagctcttgttgatctaggagaggaattttctggaagaggcagttttccagtatctgaaagagttaacaagggccttggagtcatttttagcartgggatgcaatggaaggagatccggcgtttctccatcatgaccctgaggacttttgggatgggcaagaggaccattgaggaccgtattcaagaggaggctcagtgccttgtggagswaytkmssamkascwaaggtgccccttttgatcccacctttatcctgggctgtgctccctgcaatgtgatatgctccattattttccagaatcgcyttgattataaagatccgacttttcttaacttgatgcacagatttaatgaaaacttcaggcttttcagctccccatggctacaggtmkgcaakrctttycytkcmakwakysatyacttccctggaagtcataaccaagtacttaagaatttcttctatataaaaaactatgttttggagaaagtaaaagaacaccaagagtccttggacaaggacaatcctcgggacttcattgmwyrwktmwtgawcmaratrrawcaggaaaagcacaatccgcagtctgagtttacccttgaaagcttggtggctactgtaactgacatgtttggagctggcacagaaacaacaagtaccactctgaggtatggactcytgctgctgctgaawcayktskwtgtcasagctaaagwcmagrrrgwgrkrgaacrtgtaattggcagaaaccggagcccctgcatgaaagacaggagccagatgccctacacggatgctgtagtgcatgagatccagagatatattgaccttgtccccacaaacctgcctcatttagtgacacgtgatataaaattcagaaactacttcattcccaaggkwascwwtgtgatagtatcgctgtcatccatactgcatgatgacaaagaatttcctaatccagagaagtttgaccctggtcactttctagatgagagaggtaactttaagaagagtgactactttatkyyrttmtyagcaggaaagaggatatgtgcaggagaagccctggctcgcacggagctgtttttgttcttcaccaccattttacagaattttaacctgaagtctctggttgatgtaaaagacattgacacaacaccagctatcagtggatttggccatttgccccctttttacgaggcttgttttattcctgtgcaaagggcagactctctaagctctcatctgtaatgtctcttctgagggtcctgtctacttcattcttggtactatagtagctttaactcacatatccccatttccttcggatccagtgaacatcaaacctcattgagttgagttccctgagtcaatatatagttctattcctgttccctatatcttgtgacgttccctatatcttgtgacattcccatgcagtacttacatagttagtgctaatacttgtatgacttcattactgttaatactgttttcactatataaaagcaaaatattttagaatatgagaattcagagtcatctgttcccttcatgtgctaaataaatactaatttttggaccagttcatagactcttttttttaatgggtataatgtaaggaagaagtaaagaaaacaaactctcaggagaccatatttgtcttcatttatacaaaaagggaccga

SEQ ID NO: 287 - DNA, 1393 bp, Rattus norvegicus
atgtgtgacgaggacgagaccaccgctcttgtgtgtgacaacggctctggcctggtgaaagctggctttgccggggatgatgcccccagggctgtgttcccatccatcgtgggtcggccccgtcaccagggtgtcatggtcggtatgggtcagaaggattcctacgtgggcgacgaggcccagagcaagcgaggtatcctgaccctgaagtaccccattgaacacggcattatcaccaactgggacgacatggagaagatctggcaccacaccttctacaatgagctgcgtgtggcccccgaggagcacccgaccctgctcactgaggcccctttgaaccccaaagctaaccgggagaagatgactcaaatcatgtttgagacyttcaacgtgcctgctatgtatgtggctattcaggcggtgctgtctctctatgcctccggccgwaccaccggcatcgtgttggattctggggacggtgtcacccacaacgtgcccatctatgagggttatgccctgccacacgccatcatgcgtctggacctsgctggtcgcgaccttactgactacctgatgaaaatcctcaccgagcgtggctattccttcgtgaccacagctgaacgtgagattgtgcgcgacatcaaagagaagctgtgctacgtggccctggacttcgagaatgagatggccaccgctgcctcttcctcctccctggaaaagagctatgagctgcctgacgggcaggtcatcaccatcggcaatgagcgcttccgttgcccggagacgctcttccagcsttcctttatcggtatggagtctgcggggakscatgagaccrcctacaacagcatcatgaagtgcgacatcgacatcaggaaggacctgtacgccaacaacgtcatgtcagggggcaytmccatgtaccccggtatcgctgaccgcatgcagaaggagatmamagytytggctcccagcmccatgaagatcaagatcwtcgccccccbkgmrcgsragtastcakwgtggatcggcggyyccatcytggcctmgctgtccaccttccagcagatgtggatcmccaagcaggrgtaygacgagsccggcccytccattgtgcammrmaaawrhttytaggcgcacccgcgtytktgtacgcgcthtytytcctcaggasgacaatcgaccatcgtkhtwtggttgcagggtggccccatcctccsccgtggstccatbgccsccahtgcadccggsgcctgtttttgacgtgtacatagatwcactcgttttaccycattttgttatttttcaaacaaagccctgtggaaggaaatggaaaacttgaagcmttaaagccmsccmttytgttttgctcchmhaaaaaaaaaaaaawaaa

SEQ ID NO: 288 - DNA, 1365 bp, Rattus norvegicus
cccggagctgtcgatcggggacaaagcgcgrscgcccgcgccccccgakccgcccgagccggggccarccccccgcgactgayatgatgtttccgcaaagccggcmsycsggckccycccascyvcccsagcrgskcmagyycrcmmccyccgactcmtgygwccgcatcaaggatgagttccagctgctacaagcgcagtaccacagcctgaagctggagtgtgacaakctggmcagcgagaastcagagatgcamaggcmytacgtcmtgtactatgagatgtcwtacggmttgaacatcgagmtgcacaaacwggyygammtygyshmgwgsckgamtggsatytgcgcccadgttcwaccstmytygtsycrggagcatcagcagcaggtcctgggagctatcgagagagccaagcaggtcacggctcmcgagctgaactccatcatccgacagcagctccaggctcaccagctgtcscagctccaggcgctggccctgcccctgacaccgctgcctgtcsggctccagccgcmmyymstscckgcggtcagcgcaggcacaggcytgctgtcactctctgcyctgggctctcagacccacctctccaaggaggacaagaacggacacgatggggacacccmccaggaggatgatggagagaagtccgattagctcctggggagagggagggggaggggggataccaggggagacaggcacagagagcacagkgttbtgagggccacactgcacacagctcggtccctacccaagctwccacctccagtcctggttccagctgtgcaccstgggcytrggakacgccagagggacagcccaggytwcagggaaaattccccacyktcaacatttcsccggghkacagccaccaatctsggcccagaatgtacacaacgstagccgcycctktscaccstgtgcacccsgaatttgccccctkkcmcswkvyvysyttcvtrcaytkcacmcskgytasrsccasmmmyctcsscccagstcamccagcthtggttccctcaaccgcggaaagaaagcattggytcgggactgcagtgggggtgggcaccccacaaacttccctctccccttccccaaataaacgtgagggttaaarrwmrrwwwrwwwawwawwwmwwwttcgtcccagtactctatagctaccatctaagagagaaaaagaaggaagccctggagcgagcgagggtctgtctgtgcatatagttagatttttctggtcgcctcgctttgcaccgagaggtggagggccgctgtactgagggtggggtctagctgtgccttcaaaataaaaacatgaaaaggtcaaaaaaaaaaaaaaaaa

SEQ ID NO: 289 - DNA, 5908 bp, Rattus norvegicus
tctkggccaatrcattggtgccctgatcctctgtaccaggaagacagggtgaagatggaggagaggtactacccggtgatcttcccggacgagcggaatttccgccccttcacttccgactctctggctgccatagagaagcggattgctatccaaaaggagaggaagaagtccaaagacaaggcggcagctgagccccagcctcggcctcagcttgacctaaaggcctccaggaagttacctaagctttatggtgacattccccctgagcttgtagcgaagcctctggaagacctggacccattctacaaagaccataagacattcatggtgttgaacaagaagagaacaatttatcgcttcagcgccaagcgggccttgttcattctggggccttttaatcccctcagaagcttaatgattcgtatctctgtccattcagtctttagcatgttcatcatctgcacggtgatcatcaactgtatgttcatggcgaattctatggagagaagtttcgacaacgacattcccgaatacgtcttcattgggatttatattttagaagctgtgattaaaatattggcaagaggcttcattgtggatgagttttccttcctccgagatccgtggaactggctggacttcattgtcattggaacagcgatcgcaacttgttttccgggcagccaagtcaatctttcagctcttcgtaccttccgagtgttcagagctctgaaggcgatttcagttatctcaggtctgaaggtcatcgtaggtgccctgctgcgctcggtgaagaagctggtagacgtgatggtcctcactctcttctgcctcagcatctttgccctggtcggtcagcagctgttcatgggaattctgaaccagaagtgtattaagcacaactgtggccccaaccctgcatccaacaaggattgctttgaaaaggaaaaagatagcgaagacttcataatgtgtggtacctggctcggcagcagaccctgtcccaatggttctacgtgcgataaaaccacattgaacccagacaataattatacaaagtttgacaactttggctggtcctttctcgccatgttccgggttatgactcaagactcctgggagaggctttaccgacagatcctgcggacctctgggatctactttgtcttcttcttcgtggtggtcatcttcctgggctccttctacctgcttaacctaaccctggctgttgtcaccatggcttatgaagaacagaacagaaatgtagctgctgagacagaggccaaggagaaaatgtttcaggaagcccagcagctgttaagggaggagaaggaggctctggttgccatgggaattgacagaagttcccttaattcccttcaagcttcatccttttccccgaagaagaggaagtttttcggtagtaagacaagaaagtccttctttatgagagggtccaagacggcccaagcctcagcgtctgattcagaggacgatgcctctaaaaatccacagctccttgagcagaccaaacgactgtcccagaacttgccagtggatctctttgatgagcacgtggaccccctccacaggcagagagcgctgagcgctgtcagtatcttaaccatcaccatgcaggaacaagaaaaattccaggagccttgtttcccatgtgggaaaaatttggcctctaagtacctggtgtgggactgtagccctcagtggctgtgcataaagaaggtcctgcggaccatcatgacggatccctttactgagctggccatcaccatctgcatcatcatcaataccgttttcttagccgtggagcaccacaacatggatgacaacttaaagaccatactgaaaataggaaactgggttttcacgggaattttcatagcggaaatgtgtctcaagatcatcgcgctcgacccttaccactacttccggcacggctggaatgtttttgacagcatcgtggccctcctgagtctcgctgatgtgctctacaacacactgtctgataacaataggtctttcttggcttccctcagagtgctgagggtcttcaagttagccaaatcctggcccacgttaaacactctcattaagatcatcggccactccgtgggcgcgcttggaaacctgactgtggtcctgactatcgtggtcttcatcttttctgtggtgggcatgcggctcttcggcaccaagtttaacaagaccgcctacgccacccaggagcggcccaggcggcgctggcacatggataatttctaccactccttcctggtggtgttccgcatcctctgtggggaatggatcgagaacatgtggggctgcatgcaggatatggacggctccccgttgtgcatcattgtctttgtcctgataatggtgatcgggaagcttgtggtgcttaacctcttcattgccttgctgctcaattccttcagcaatgaggagaaggatgggagcctggaaggagagaccaggaaaaccaaagtgcagctagccctggatcggttccgccgggccttctccttcatgctgcacgctcttcagagtttttgttgcaagaaatgcaggaggaaaaactcgccaaagccaaaagagacaacagaaagctttgctggtgagaataaagactcaatcctcccggatgcgaggccctggaaggagtatgatacagacatggctttgtacactggacaggccggggctccgctggccccactcgcagaggtagaggacgatgtggaatattgtggtgaaggcggtgccctacccacctcacaacatagtgctggagttcaggccggtgacctccctccagagaccaagcagctcactagcccggatgaccaaggggttgaaatggaagtattttctgaagaagatctgcatttaagcatacagagtcctcgaaagaagtctgacgcagtgagcatgctctcggaatgcagcacaattgacctgaatgatatctttagaaatttacagaaaacagtttcccccaaaaagcagccagatagatgctttcccaagggccttagttgtcactttctatgccacaaaacagacaagagaaagtccccctgggtcctgtggtggaacattcggaaaacctgctaccaaatcgtgaagcacagctggtttgagagtttcataatctttgttattctgctgagcagtggagcgctgatatttgaagatgtcaatctccccagccggccccaagttgagaaattactaaggtgtaccgataatattttcacatttattttcctcctggaaatgatcctgaagtgggtggcctttggattccggaggtatttcaccagtgcctggtgctggcttgatttcctcattgtggtggtgtctgtgctcagtctcatgaatctaccaagcttgaagtccttccggactctgcgggccctgagacctctgcgggcgctgtcccagtttgaaggaatgaaggttgtcgtctacgccctgatcagcgccatacctgccattctcaatgtcttgctggtctgcctcattttctggctcgtattttgtatcttgggagtaaatttattttctgggaagtttggaaggtgcattaacgggacagacataaatatgtatttggattttaccgaagttccgaaccgaagccaatgtaacattagtaattactcgtggaaggtcccgcaggtcaactttgacaacgtggggaatgcctatctcgccctgctgcaagtggcaacctataagggctggctggaaatcatgaatgctgctgtcgattccagagagaaagacgagcagccggactttgaggcgaacctctacgcgtatctctactttgtggtttttatcatcttcggctccttctttaccctgaacctctttatcggtgttattattgacaacttcaatcagcagcagaaaaagttaggtggccaagacatttttatgacagaagaacagaagaaatattacaatgcaatgaaaaagttaggaaccaagaaacctcaaaagcccatcccaaggcccctgaacaaatgtcaagcctttgtgttcgacctggtcacaagccaggtctttgacgtcatcattctgggtcttattgtcttaaatatgattatcatgatggctgaatctgccgaccagcccaaagatgtgaagaaaacctttgatatcctcaacatagccttcgtggtcatctttaccatagagtgtctcatcaaagtctttgctttgaggcaacactacttcaccaatggctggaacttatttgattgtgtggtcgtggttctttctatcattagtaccctggtttcccgcttggaggacagtgacatttctttcccgcccacgctcttcagagtcgtccgcttggctcggattggtcgaatcctcaggctggtccgggctgcccggggaatcaggaccctcctctttgctttgatgatgtctctcccctctctcttcaacatcggtctgctgctcttcctggtgatgttcatttacgccatctttgggatgagctggttttccaaagtgaagaagggctccgggatcgacgacatcttcaacttcgagacctttacgggcagcatgctgtgcctcttccagataaccacttcggctggctgggataccctcctcaaccccatgctggaggcaaaagaacactgcaactcctcctcccaagacagctgtcagcagccgcagatagccgtcgtctacttcgtcagttacatcatcatctccttcctcatcgtggtcaacatgtacatcgctgtgatcctcgagaacttcaacacagccacggaggagagcgaggaccctctgggagaggacgactttgaaatcttctatgaggtctgggagaagtttgaccccgaggcgtcgcagttcatccagtattcggccctctctgactttgcggacgccctgccggagccgttgcgtgtggccaagccgaataagtttcagtttctagtgatggacttgcccatggtgatgggcgaccgcctccattgcatggatgttctctttgctttcactaccagggtcctcggggactccagcggcttggataccatgaaaaccatgatggaggagaagtttatggaggccaacccttttaagaagctctacgagcccatagtcaccaccaccaagaggaaggaggaggagcaaggcgccgccgtcatccagagggcctaccggaaacacatggagaagatggtcaaactgaggctgaaggacaggtcaagttcatcgcaccaggtgttttgcaatggagacttgtccagcttggatgtggccaaggtcaaggttcacaatgactgaaccctcatctccacccctacctcactgcctcacagcttagcctccagcctctggcgagcaggcggcagactcactgaacacaggccgttcgatctgtgtttttggctgaacgaggtgacaggttggcgtccatttttaaatgactcttggaaagatttcatgtagagagatgttagaagggactgcaaaggacaccgaccataacggaaggcctggaggacagtccaacttacataaagatgagaaacaagaaggaaagatcccaggaaaacttcagattgtgttctcagtacattccccaatgtgtctgttcggtgttttgagtatgtgacctgccacatgtagctcttttttgcatgtacgtcaaaaccctgcagtaagttaatagcttgctacgggtgttcctaccagcatcacagaattgggtgtatgactcaaacctaaaagcatgactctgacttgtcagtcagcaccccgactttcagacgctccaatctctgtcccaggtgtctaacgaataaataggtaaaagaaaaaaaaaaaaaaaaaaaaaaaa

SEQ ID NO: 290 - DNA, 7216 bp, Rattus norvegicus
ccaagatggcgcccaccgcagtcccgcccgccgcagcctcggcgcctctgcagtccggccgcgcctcccgggccccgcgctagggccgctgccgcctcgcccgccgccgccgccgccagctgacctgtcccggacacataactaacgaagctgctgcaggatgagaagatggcrgcgcggctgctcgcaccaccaggccctgatagtttcaagcctttcacccctgagtcgctggcaaacatcgagaggcgtattgccgagagcaagctcaagaaaccaccaaaggcggatggcagccaccgggaggacgatgaagacagcaagcccaagccaaacagtgacctggaggctgggaagagtttgcctttcatctacggggacatcccgcaaggcctggttgcggttcccctggaggactttgacccttactatttgacgcagaaaacctttgtagtattaaacagagggaaaactctcttcagatttagtgccacacctgccttgtacattttaagcccttttaacctgataagaagaatagctattaaaattttgatacactcagttttcagcatgatcatcatgtgcaccatcctgaccaactgtgtgttcatgacctttagtaaccctccagaatggtccaagaatgtggagtacacattcacagggatttacacatttgaatcactagtgaaaatcatcgcaagaggtttctgcatagacggcttcaccttcttrcgagacccgtggaactggttagacttcagtgtcatcatgatggcatatgtgacagagtttgtggacctgggcaatgtctcagcgctgagaacattcagggttctccgagctttgaaaactatctctgtaattccaggcctgaagacaatcgtgggcgccctaatccagtccgtgaagaagctgtcggacgtgatgatcctgacagtgttctgcctgagtgttttcgccctgattggcctgcagctcttcatggggaaccttcgaaacaagtgtgtcgtgtggcccataaacttcaacgagagctacctggagaacggcaccagaggctttgactgggaggaatatatcaacaataaaacaaacttttacatggttcctggcatgctagaacccttgctctgcgggaacagttctgatgctgggcaatgcccagarggattccagtgcakkaaagcaggaaggaaccccaactacggttacaccagctttgacaccttcagctgggccttcttggcattattccgccttatgacccaggactattgggagaacttataccagctgaccttacgagccgctgggaaaacgtacatgatcttctttgtcttggtcatcttcgtgggttctttctatcyggtgaacttgatcttggctgtggtggccatggcttatgaggaacagaaccaggcaacactggaggaggcagagcaaaaagaggccgagttcaaggcaatgctggagcaactcaagaagcagcaggaggaggcacaggctgctgcaatggccacctcagcgggcactgtctcggaagacgccattgaagaagaaggggaagatggggtaggctctccgaggagctcttctgaactgtctaaactcagttccaagagcgcgaaggagcggcggaaccgacggaagaagaggaagcagaaggagctctctgaaggcgaggagaaaggggacccggagaaggtgtttaagtcagagtcggaakacggtatgagaaggaaggccttccggctgccagacaacaggatagggaggaagttttccatcatgaatcagtcgctgctcagcattccaggctcgcccttcctctcccgacataacagcaaaagcagcatcttcagcttccggggacccggtcggttccgggaccccggctctgagaatgagttcgcagacgatgaacacagcaccgtggaggagagcgagggccggcgtgactcgctcttcatcccgatccgcgcccgcgagcgccgcagcagctacagtggctacagcggctacagccagtgcagccgctcgtcgcgcatcttccccagcctgcggcgcagcgtgaagcgcaacagcacggtggactgcaacggcgtagtgtcactcatcgggcccggctcacacatcgggcggctcctgcctgaggtgaaaatagataaggcagctacggacagcgcaacgactgaggtggaaattaagaagaaaggccctggatctcttttagtttctatggaccaactcgcctcctacggacggaaggacagaatcaacagcataatgagcgtggtcacaaacacgctagtggaagagctggaagagtctcagagaaagtgcccaccgtgctggtataagtttgccaacactttcctcatctgggagtgtcacccctactggataaaactgaaggagatcgtgaacttaatcgtcatggacccttttgtagacttagccatcaccatctgcatcgttctgaatacgctatttatggcaatggagcaccatcccatgacaccacagttcgaacacgtcttggccgtaggaaatctggtgttcaccgggatcttcacggcggaaatgtttctgaagctcatagccatggacccctactattatttccaagaaggctggaacatttttgacggatttattgtctccctcagtttaatggagctgagtctcgcagatgtggaggggctctcagtgctgcggtctttccgactgctccgagtcttcaagctggccaagtcctggcccaccctgaacatgctgatcaagatcatcgggaactccgtgggtgccctgggcaacctgaccctggtgctggccatcatcgtcttcatcttcgccgtggtggggatgcagctgtttggaaagagttacaaggagtgcgtctgtaagatcaaccaggagtgcaagctcccgcgctggcacatgaacgacttcttccactccttcctcatcgtcttccgagtgctgtgtggggagtggatcgagaccatgtgggactgcatggaggtggccggccaggccatgtgcctcattgtcttcatgatggttatggtcattggcaacctggtggtgctgaatctattcctggccttgcttctgagctccttcagcgcagacaacctggcggccacagacgacgacggggaaatgaacaacctgcagatctcagtgatccggatcaagaagggcgtggcctggaccaaagtgaaggtgcacgccttcatgcaggctcacttcaagcagcgggaggcggatgaagtgaaacccctcgacgagctgtatgagaagaaggccaactgcatcgccaaccacacgggcgtggatatccaccggaacggcgacttccagaagaacgggaacggaaccaccagcggcatcggcagcagcgtggagaagtacatcatcgacgaggaccacatgtccttcattaacaacccaaacctgaccgtccgggtgcccattgctgtgggcgagtctgacttcgagaacctcaacacagaggatgttagcagcgaatcagaccctgaaggcagcaaagataaactggacgataccagctcctcagaaggaagtaccatcgacatcaagcctgaggtggaagaagttcccgtggagcaacctgaggaatacttggatccggacgcctgctttacagagggttgcgtccagcggttcaagtgctgccaggtcaacatcgaggaaggactaggcaagtcgtggtggatcttgcggaaaacctgcttcctcattgtggagcacaattggtttgagaccttcatcatcttcatgattctgctcagcagtggcgccctggcctttgaggacatctacattgagcagaggaagaccatccgcaccatcctggagtatgcggacaaggtcttcacctacatcttcatcctggagatgttgctcaagtggacmrcstacggcttcgtcaagttcttcaccaatgcctggtgctggttggacttcctcattgtggctgtctctttagtcagccttatagctaatgccctgggctactcggaactaggtgccataaagtcccttaggaccctaagagctttgagacccttaagagccttatcacgatttgaagggatgagggtggtggtgaatgccttggtgggygccatcccctccatcatgaatgtgctgctggtgtgtctcatcttctggctgattttcagcatcatgggagttaacctgtttgcggggaaataccactactgctttaatgagacttctgaaatccggttcgaaatcgatattgtcaacaataaaacggactgtgagaagctcatggagggcaacagcacggagatccgatggaagaatgtcaagatcaactttgacaatgtcggagcagggtacctggcccttcttcaagtggcaaccttcaaaggctggatggacatcatgtatgcggctgtagattcccgaaagccagacgagcagcctgactacgagggcaacatctacatgtacatctacttcgtcatcttcatcatcttcggctccttcttcaccctcaacctgttcatcggtgtcatcatcgacaacttcaaccagcagaagaaaaagtttggaggtcaggacatcttcatgacagaggaacagaagaagtactayaatgccatgaaaaagctgggctccaagaagccacagaagcccatcccccgacccttgaacaaaatccaagggattgtctttgatttcgtcactcaacaagcctttgacattgtgatcatgatgctcatctgccttaacatggtgacaatgatggtggagacagacactcagagcaagcagatggagaacattctttactggattaatctggtctttgtcatcttcttcacctgcgagtgtgtgctcaaaatgtttgccttgagacactactayttcaccattggctggaacatctttgactttgtggtggtcatcctctccattgtgggaatgttcctggctgatatcattgagaagtacttcgtctccccaaccctattccgagttatccgattggcccgtattgggcgcatcttgcgtctgatcaagggcgccaaagggatccgcacyctgctctttgcyytratgatgtcgctgcccgccctgttcaacatcggcctcctgctcttcctsgtcatgttcatcttctccatttttggsatgtccaayttygcataygtgaagcacgaggcyggyatygaygacatgttcaacttygagacatttggcaacagcatgatctgyytgttycaratcacaacstcwgctggytgggatggcctgctgctgccmatcctraaccgcccccctgactgcagcytrgayaargarcacccagggagtggcttyaarggrgaytgtgggaacccctcrgtgggcatcttcttctttgtragctacatcatcatctcyttcctrattgtsgtgaacatgtrcatygccatcatcctggagaacttcagygtrgccacmgaggaragygcmgaccctctgagtgaggatgacttygagacyttctatgagatctgggagaagttygacccmgaygccacccagttcatygagtactgtaagctggcagactttgcmgaygccytggagcaycckctccgagtrcccaagccmaayaccatygagctcatcgcyatggayctgccmatggtgagcggrgatcgcatccactgcttggacatccttttygccttcaccaagssrgtcctgggagayagyggggagttggacatcctgcggcagcagatggargagcggttcgtggcatccaatccttccaaagtgtcttacgagccwatcacaaccacwctgcgkcgcaassaggaggaggtrtctgcagtggtcctgcagcgtgcctacmggggacayttggcwaggcggggcttcatctgcaraaagayrrcytcyaayaagctggagaatggaggcacacacmgrgasaaraargagagcaccccrtcyacagcctccctcccstcytaygacagygtmacwaarccwgamaaggagaarcagcagcgkgcrgaggarggmagaagggaaagagccaaragrcaaaaagasstcagrgartccaagtgytagaggagrsraaakkmagmttaymcmgkctraacactsgcaagtgaaagmttgtttacaaacttccgaatmtyaysratgcagarcagctgtgsagackctmrctgtactggaagayctataccaaacrtmgtctgcttacaygtracayrgykgcatcytgagcrgtgactgcyrgggacaaaggacccygctccctrgactyacagatytyctawygcttgggcagryggttactgcatgttccacactyagtcaatgcaacttaggacwaaactaaccaggatacaaaacmkaggmggcygccgsgaccagcakatywccgytgcagccaaatggattttattttttcattttrttgattctcagaagcagaaagcatcactttaaaagttygtttgttcatgcaaacwatatttgmattcttacattagttaagctaagcagcaaaaagaaaacacacrcacacaswcacaywwagcccactgycatttaatygtcwgtttctttracataaasmgcatcttctccacaygrgckkcacgtggtttggagatgggtgggggaaaacaatcaggtktcttcaggctgaggaggacttgctcaggccratyccaaayattgtgctcgttcaatgcrtagaartgayytgcatgatggcatgcygtgwtcagaagtcatgcatgagayccayacaccaargacactastamtcywgtcccwtscaswggtcagcctkyggacaggacccagccctgcaccgttcactgtatttggagaaaatggtaagagttccayaccggctrcartyctytsagttcktarraktcyttcrtacaccttctgggtagggaracaamyaacyaattgacyamyaccamcaacaacaawaaacaaacccaatccaacaagcagatggatccgttgcgtgtatatgtttaacagacatctctaacatacagccattgttgcacattttgcaagatgaactatttaatgctgctctgtgtccagtacatgggggagactttgatcccaaatggcttgtactatttatgtcactgtaaaaccaaatcctagggct

SEQ ID NO: 291 - DNA, 1212 bp, Rattus norvegicus
ctcgaggccwmgrmytckrmrckmssggagtcgctgcgtccgcgcagtccggaactcgtgtggccaccgcgkgaacagagagggtccgttgtaacctgttgagtaactatggaggactatatcaaaatagagaaaatcggagaagggacttatggtgtggtatatmaaggtagacacaggactactggccagmtcgtggccatgaagaaaatcagacttgaaagcgaggaagaaggagtgcccagtacggcaatccgggmaatctctctgttaaaagaacttcgacatccaaatataktcagcctgcaggatgtactcatgcaggmctccaggctgtatctcatcttcgagttcctgtccatggatctcaagaagtacctggactctatccctcctggcmmgttcatggattcttcgctcgttaagagwtacttgtaccaaatcctccakgggattgtgttttgtcactcccgacgagttcttcacagagacttgaaacctcaaaatctattgattgatgacaaaggaacaatcaaactggcagatttcggccttgccaragcgtttggaataccgatwakagtgtwcacacacsargtagtgacgctgtggtaccggtcgccagaggtgttgctgggctcggctcgctactccaccccggttgacatctggagcatagggmccatatttgcagagctggcgaccaagaagccgcttttccacggcgaskcasagakbgaccagctcttcaggatcttcagagctctgggcacccmtaacaacraagtgtggccagaagtagagtccytgcaggactacaagaacactttccmcaagtgkaasccgggragcctcgcgtcccacgtcaagaacctggatgaaaacggcytggacttgctctcgaaaatgctggtctatgatccagccaaacgaatctctgsaaaaatggcccttaagcacccatactttgacgacttggacaatcagatcaagaagatgtaaccctctggaagtcccgccctgctgtggcagggaagatcgtggcgtttactgttggctcttcctgtcttgtatagttttctyytcyytgyctgtaaaccatcatctggacttttcctattttccwacgtataacttaattaacatgtaaawattattccatatgaawwwaaawmhaawwmwgtawawrwrwrrraaaaaaaaaaaaaaaaa

SEQ ID NO: 292 - DNA, 4572 bp, Rattus norvegicus
gggctcgcaagggcttcgcaggctggacattgtgcttgctggatttttcccggatgctcccggactaacatggatgtcccaccatcccttgcagtggaagcttgctccttggcgcagtgagagtgaagaacatgcagcgactgctaatgggtttgggaagcggagactccttcctctttctgtgaccatgccgtgattgtgtctgcggccactactccacgcatcttccttctcgtccaagcccggagcctaacgctagatcggggaagtgggtgccgcgcgcgcaggcacggaaacatcatgaagattatttccccagttttaagtaatctagtcttcagtcgctccattaaagtcctgctctgcttattgtggatcggatattcgcaaggaaccacacatgtgttaagattcggtggtatatttgaatatgtggaatctggccccatgggagcagaagaacttgcattcagatttgctgtgaataccatcaacagaaacaggactttgctgcccaacaccactttaacttatgatactcagaagatcaatctctatgacagttttgaagcatctaagaaagcttgtgatcagctgtctcttggggtggctgctatcttcggtccttcacacagttcatcagccaatgctgtgcagtccatctgcaatgctctgggggttccccacatacagacccgctggaagcaccaggtgtcagacaacaaggattccttctacgtcagtctctacccagacttctcttccctgagccgcgccatcttggatttggtgcagttttttaagtggaaaactgtcacagttgtgtatgacgacagcactggtctcattcgcttgcaagagctcatcaaagctccatcgaggtacaatcttcgacttaaaattcgtcagctgccagctgataccaaagatgcaaaacctttgctgaaggagatgaaaagaggcaaggagttccacgtgatcttcgactgcagccatgagatggcagcaggcattttaaaacaggcattagctatgggaatgatgacagaatactatcactatatatttacaactctggacctctttgctcttgacgtggagccctacagatacagtggcgtaaatatgacagggttcaggatactaaatacagagaatacccaagtctcctccatcatcgaaaagtggtctatggaacggttacaggcgcctccaaaacctgactcaggtttgctggatggatttatgacgactgatgctgctctgatgtatgatgcagtgcacgttgtgtctgtggctgtccaacagtttccccagatgacagtcagctccttgcaatgcaatcgacacaaaccctggcgctttgggacccgcttcatgagtctaattaaagaggctcactgggaaggtctcacaggcagaataacatttaacaaaaccaatggattacggacagattttgatttggatgtgatcagtctcaaggaagaaggtctggagaagattggaacttgggatccagccagtggcctgaatatgacagaaagtcagaaaggaaagccagcaaatatcacagactcattgtctaatcgttctttgattgttaccaccattttggaagaaccgtatgttctgtttaagaagtctgacaaaccactctatgggaatgatcgatttgaaggctactgtattgatctcctacgagagttatctacaatccttggctttacatatgagattaggcttgtggaggatgggaaatatggagcccaggatgatgtgaacggacamwsgarkggaatggttcgtgaactaatcgatcataaagctgaccttgcagttgctccactggctataacctatgttcgtgagaaggtcatcgacttttcaaagccgtttatgacacttggaataagtattttgtaccgcaagcccaatggtacaaacccaggcgtcttctccttcctgaatcctctctcccctgatatctggatgtatgttctgctggcttgcttgggtgtcagttgtgtgctctttgtcatagccaggtttagtccctatgagtggtataacccacacccttgcaaccctgactcagacgtggtggaaaacaattttaccttgctaaatagtttctggtttggagttggagctctcatgcrgcaaggttctgagctcatgcccaaagcactctccaccaggatagtgggaggcatttggtggtttttcacacttatcatcatttcttcgtataccgctaacctagccgcctttctgactgtggaacgcatggagtcgcccattgactctgctgacgatttagctaagcaaaccaagatagagtatggagcagtggaggacggcgcaaccatgacgttttttaagaaatcaaaaatttcaacgtatgataaaatgtgggcgtttatgagcagcaggagacagtctgtgcttgtcaaaagcaatgaggaagggatccaacgagtcctcacctcggattatgctttcttaatggagtcaacaaccatcgagtttgttacacagcggaactgtaacctcacgcagattggcggccttatagactccaaaggctatggcgttggcactcctatgggctctccatatcgagacaaaatcaccatagcaattcttcagctgcaggaggaaggcaagctgcacatgatgaaggagaaatggtggcggggcaatggctgcccagaggaggagagcaaagaggccagtgctctgggggtgcagaatattggtggtatcttcattgtcctggcagccggcttggtgctctcagtttttgtggcagtgggagagtttttatacaaatccaaaaaaaacgctcaattggaaaagaggtccttctgtagcgctatggtggaagagctgagaatgtccctgaagtgccagcgtcggctcaaacataagccacaggccccagttattgtgaaaacagaagaagttatcaacatgcacacatttaacgacagaaggttgccaggtaaagaaaccatggcatgaagctgggaggccaatcacccaagcacaaactgtcgtcttttttttttttttttccaaacaatttagcgagaatgtttcctgtggaaatatgcaacctgtgcaaaataaaatgagttacctcatgccgctgtgtctatgaamwararamwmwrwratctaagcagtttcagtgatcagacttgatttacaagcaccgtggatcaaccaagttacacggggttacactgtttatcataggttcctcccttcctttgagtgaatgttacatgcaaatgttgtggctggtttcaaatgcagtccagggagaaactgctggttccttctgaagctcagctgtcgtcaggagatggaatgccggtgcccaaaagggtaaccaataaaaatgccataaaaattttaaaaaaatgcgtgagatcggcaaaaattatagtgttacaagaaacagtacagtcccatggtcaccaacacaatagaggtgataatgttactagcccccaatactcagtaaaatcgtcatctgaatagataatatgtgttcatagaatgtgaaaaaaaatgtaatgcgagacacaccagtatcaatagaagtggaactgaaggcagaacatcatcagttacttttctttttcaatagtctgtgtcatggattgtgatatagatggcaattatcaagccaataattttttttctgaaaatacctatggcaaatattttaataggcaacttgctcccacaaatccctactctaacctcccccagaaatataaaaggaaccattggtttagagattggtatgtaagagatgatgttttgcaagccttgtcgtgcattgtaaaagggctcagtgttactggttacagggaagactgaagctttcaccctgacattctsarakgtcaaccgaaactctccttcctcctgtaaaggaccttgatggggcagattccattgatcaaagaatggggacttgtcacctatacaatggtacgtgacagaactttgaggtggactgcatttaataatagtcacaatgttaaaagaacaaaattcttgagcagttttttttttttgttttgttttgttttcaaaaaatgttcaggtttatttgtggaaatgcaagatttctataaaatagtttttgtatggaaatttttgtaatactttttatcaacaaaataagaacacatgtttctgtcaggggtgtgaggtcaagcatgaacggtagtgcgtgtgcaccaccaacgtttggtgaaactatttttatcaagaaaaaggaatcatasaagagaaatattttcaagttagatactataaaagctaggtgcactaccaccacggcttgtcgcgccacacccctgagtccacaaggtggataacatattgtaatgaacagttgtgtgtaaaatggcaaaagacacagacctcttgacaacattgtgaaaacagttgagtgcacacagtttgctgtttgaatccaatgcacaaaaattttacaaaaatccattaaaattatgtccgttttaawwycaaaaaaaaaaaaaaaaa

SEQ ID NO: 293 - DNA, 4228 bp, Rattus norvegicus
cggcmgcgcgcccccctccggggccggagccctgtcggcgycccgccttctccggggagcgcccggcgggagcggccggaccccgggctcgcgcgggagacgacgcgccacaaactttgccttttattgttcctakccctttaagtgcaasgggctctgttgggctggaaaaatgtccytcttcaatttccgtrrgatcttcahkttggggagcgakaagaaraagaaacagtacgaacacgtgaagagagacctgaaccccgaggagttttgggagattatcggagagctgggcgacggagcctttgggaaagtgtataaggcccagaataaggagaccaatgttttagctgctgcaaaggtgattgacaccaaatctgaagaagaacttgaagattatatggttgagattgacatattagcatcttgtgatcacccaaacatagtcaagcttctagatgccttctattatgagaacaatctttggatcctcattgaattttgtgcagggggagcagtagatgccgtgatgcttgaacttgagagaccattaactgagtcccaaattcaagtagtttgcaagcagacattagaggcgttgaattacctacatgacaataaaatcatccacagagatctaaaagctggcaatattctctttaccttagatggagacattaaattagcggattttggagtgtcagctaagaataccaggacaattcaaaggagggattcatttattggcacaccgtattggatggctcctgaagtcgtcatgtgtgagacatcgaaggacagaccctatgactacaaagcggacgtttggtccctgggaatcactttaatagaaatggctgagatagagccgcctcatcatgagctaaacccaatgcgagtgctgctgaaaatagcaaagtcggagccccccacactagcacagccatccagatggtcttcaaattttaaggactttctaaagaaatgcttggaaaagaatgtggatgcgcggtggaccacatcccagctgttacagcatccctttgttaccgttgattccaacaaaccagtccgagaattgattgctgaggcgaaggctgaagtaacagaagaagttgamgrysgcaaagrggaagatgacgatgatgagacagagagtgctctgccaatacctgcgaataaacgcgcctcctctgacctcagcattgccagctctgaggaagataagctttcacaaaatgcttgtattttggaatctgtgtcagaaagaacagaacacaatacttctggggataaatttagcaacaaagttcttagtgagaagcctactcctgagggacctgagaagrctgtggatgtggatgggcctgcaaatgatgttaacttagaaactgtggctgaaccaaatgaccaagcggtaggattccatgagaatgggagagagaagaaaagacccmaactggaaagtcaaccagatacagaagaccaacaaactgtggatgttaatttagtcggtgaaggaaatgacagcaatatagtaattttagaaacaaacactgaytgtctgaaaccagagswmgwsagaaatgaagaaaaccaagagataattgagaataaacttacacaatctgaagaaattaaagatatacatattcaaacaatggacttagtttctcaagaaactggagaaaaagaggcagattttcaggcaattgacaatgaagttgggtttacaaaggaagaaacccaagagaaattgggaaaagatgataaaactcacaaagttgtgatcagtgatataaccagtgaggtgggaacagacgagcctccaggtgatacccagaagtctgctgagcagagccaggatgcagagggtggggctggggaagaagccccggagcctgcccagacactaacagagaaggccactgagggccctgaggctcatggtgctgaggaagagcctcgtagtggagagagagtagaggataagcagctagagcagcagtctgcagtgtgtgaaggtgagggacaggtaaccagcacttcagagagcacacgggcaaccacggaggaaccagagactgacgaagttgaccaagtcagcgagtcaaatagcattgaggaactagagagacttggagttactggtgctgaggaacaggctctagggagcaaaggggaggctgctacggagctagatttkgagagagaagaaaatgcacaggractgccagttaaagcagagccccaagctcctgcagcatcgcaggccagcgaacctccccctgtcttaatacccagtattaatattcattcggaaaacacagaaaataaaggagaaatgggtgctttgccaaaacctgaaaccatactgccaccagagcctgaaaatggaaagggaaatgacacggactcagggactgggtccactgtggagaacagcagcagtgacctgaacttgtccatctctagcttcctgagcaaaaccaaggacagtggctcggtgtctctgcaggagacaagaagacagaagaaaacattgaagaaaacacgtaaatttattgttgatggagtagaagtgagtgtgacaacatcaaagatagttacagacagcgactctaaaaccgaggaattgaggtttctcaggcgtcaggaacttcgagagctaaggcttctccagaaggaagagcagaaagcccagcagcagctcaacgggaaattgcagcagcagcgcgagcagatcttcaggcgctttgagcaggagatgctgagtaagaagcgacaatatgaccaagaaattgagaatctagagaagcagcagaaacagacaattgaacgactagaacaagaacacacaaaccgcctgagagacgaagctaagcgcatcaaaggagagcaggagaaggagctgtccaaattccagaatatgctaagaaaccgaaagaaggaggaacaagaatttgttcagaagcaacagcaagagttagacggcgctctgaaaaagatcatccagcagcagaaggcagagttggccwryattgagagagagtgcttgaataacaagcagcagctcctgagagcccgagaagctgcaatttgggagcttgaagaacgacatttacaagaaaagcaccagctgcttaaacagcaacttaaagatcagtatttcatacagagacatcagctgcttaaacgccatgagaaggaaacagaacaaatgcagcgttacaatcaacgacttattgaagaattgaagaacagacagactcaggaacgagctagactgcccaagattcagagaagtgaagccaagacacgaatggccatgtttaaaaaaagtttgaggattaactcaacagctacaccagaccaggaccgtgaaaaaattaaacagtttgctgcacaggaagaaaagagacagaaaaatgagagaatggctcagcatcaaaaacatgagagtcagatgcgggaccttcagttgcagtgtgaagccaacgtccgagagctgcaccagctgcagaatgaaaaatgccacctgttggttgaacatgagactcagaaactgaaggagttagatgaggagcacagccaagagctcaaggagtggagagagaagctgaggcccaggaagaagacactggaggaagagtttgccaggaaacttcaggaacaggaagtgttctttaaaatgaccggggagtccgaatgcctcaacccctcagcgcagagccggggctgtttacaaacgtctcaccccagcagtaccagggcaccagcgtgggcaggatgaagcacatgagcaggaggccgggcttgtaatacctcctctggaacatcaccagcttctcagctttcaggtcagacatgtccagctttccgcccttctctttgacagccgggtgtttgcgcacaagcagccaacccacgtgagagaagaaaaagccacggcgggagttgtgagggtcggcgtgtgtctctgagaacttgtggtgggcgcggtgatcccggggcccattcgtacacatcgttctggaatgccatggtgttggcgatgatgagaaagagcctcaggggcagccgagccttgtaagtcctgtggctccacaggcgatgagccccggctgtgatgcccagggcgctgattacgtagtacaaatatgcaaagaggcaggtgtagaccttgcaggaggggaccagtgtgatcccgtacagggctccaatgtgc

SEQ ID NO: 294 - DNA, 3618 bp, Rattus norvegicus
  misc_feature (3524)..(3525): n is a, c, g, or t
cggtccttccgacacacgagctccaagccgctcctctcttttcctaaagcccttcaaggcagtcttcggtttccttctttccagccgaccctcttcagccccgcgaagatggtggaccgcgagcaactagtgcagaaagcccggctggccgagcaggcggagcgctacgacgatatggccgcggccatgaagaacgtgacagagctgaatgaaccactgtccaacgaggaacggaacctcctgtcggtggcctacaagaacgtggttggggctcgccgctcctcctggagggtcatcagcagcatcgagcagaagacgtctgcggatggcaacgagaagaagatagagatggtccgagcctaccgggaaaagattgagaaggagctggaggccgtgtgccaggacgtgctgagcctgctggacaactacctgatcaagaactgcagcgagacccagtacgagagcaaggtgttctacctgaagatgaaaggggactattaccgctacctggctgaagtggccactggggagaaaagggcgaccgtggtggagtcgtccgagaaggcctacagcgaagcccacgagatcagcaaggagcacatgcagcccacccaccccatccggctgggcctggcgctcaactactccgttttctactacgagatccagaacgccccagagcaagcctgccacctggccaagaccgccttcgatgacgccatcgccgagctcgacactctgaacgaggactcctacaaggactccactctgatcatgcagctgctccgagacaacctaacgctctggacgagcgaccagcaagacgacgacggcggcgaaggcaacaactaaggccccaggtggactggcagcgcacgctgatgctactactgcagtctttattttttcccatgagttgggggtcgggtgggggmrsgaragggagggctgaccttcccagggagaaacccacgactgtcctgtctttgattgcctctttgacatttttgccaaaataccactagtggaaagtcaggctagctatgctggtatcggagtagcagcctcacaggcgccgggactgttgtgcaggtcgtgcaagtggagctgtctgcctttagtttaacttattgctagacggtagggttctaagcagaaagaccggatggatggccctctcgttcagtgcgttctgtggttccagtaaggattcttctgtccacacrcsmksgtcttcagttccgtggctgttttctctctgtggctctgctgttttctwtttmtcttttctcctttctttccccggggtgtataccagagaarkkagarwmwaaawwammmaagtggacaggcttagagtggaaggcacaacctttattgacgagtcagacgtggccctgtacttagaagtctctgatrkrywsmcmgkrkwaamamwaaawwrwarwttacagtatttctacacgacagccatacatgacaccaagccattggttctgagttttcctttgtcagtcggctttacgtctgtgtccaggtcggtctggctgtccatcagctctcgtcatggggagagtcagcttcccggagttttggttgatgggcgcttggcaggtggctgttggggaatacttttttttttttttcttctcggttcttctttactctctaaggcaagcccatcacaaaaatagaaaccgttaagtaccacacacacacagagaamacagagaaaattcaggtctgtatgtcattatcagagactcctgctctcagcagccagggctccatcctcagtgtcactgccgctwgaatgtttctctgcacttgagtctgcccgtaccccgtgctagcagcacgcaggtatctaggtgtcgggcaagattgcagaggtgggaggttaacgagacttggaacatccggtgccagcagctgagccaacaggaaaccactgggaagaggcagttctggtcctaaaccagttgtccctgccacccctccaacccccagcactccttccccaagtgctcagtggagggtaccgaggttcagcaggaggcgctgctcacccctgtctgacctaagctttcctggttttcctttctgaatgaaatcgtagttgatgragatwrrmtkcwmaygaratcaytgywmamrwramawwraarraagctgtgctgctatgccctacatggtccgtctcagcccttggtccctcattctcactgtggataaatcttcccataaacgtgccctgttgcatgcagagtgtgcagtttgtctcctggagaacccatgctctcatggcttcccaagatggcagcaccctagacttgctttacttgtcttcagaggcccagcagccactttatcttatactgaaaccaagctcccacttaagttgagtcacgcttaacaggawgctggtgacgyggctgtagaagaakkacgcccctctgcacagtcctagcatgccctccctcagaggcccctcctcatgctggwgtgcaaacacccactaaccgaggcccacggaagaccgcagcggaggaagcttggccaccagagccatggacagaggggttgggcttcacccggytgskttgtctccatgtcggcagtgagcatgtctgtcccgcttgtactgwttggaaatgacctactggaattgcaaaacctagtttctctttaaatttcagccttgacctttgctgwgttctagaaaagtcatgtgagggtagaactgaagagggagagcggkagacctgacgtgagcgtggatggktccttctccttyccttactgktgagaagcgcacctgcctytratgctgdctycgdtgscgcggktgscccacctattgatacagtawtgdgcatgctgrtgkygbatttctatacggkagctgacatttattaccttacactgkaggcgktatgyattcctatgacaacaaaacttawgacttcaaamtctytttamactttytttttttaatttaahtytttccyyycaggggtaaagkwtgbtttaccaaaaatagtggktgkaacaaawkgatctgdtttggatgdtgctatagtgacatgcagttctctatttwgdwwwcggrgggaggggacaaaagaaacaccagtgktagcttactcttaatgtctggygkwtgkcatggtgaaattataactattacarkgktggrgaacgccgcggasskwctctgaacgamctctgtgctttyytgtcmtgktatgcagkgraactatttttarggtctaatcaagkgatttttycccccccamctycgwgtttcgbtaaggamttatttcgcacacggaccattcttmgcagtttcctcagtgatggaatattcatgartgtgagtcattatktagccgtcgtacatbgarsaamtmrrctkamaraaacctgggggcggccacgctatgtgctagcggcgtacagagggacgtgacaatgagcccctgttcggtcgcccagtcgaatgtttgaccacattatttggnntcggagcgcgacgacaaccacatagacagcacgccatcacaccagcgacaggaacgatacaccgggaagccggcacgaggaacacgcacagac

SEQ ID NO: 295 - DNA, 1940 bp, Rattus norvegicus
ggaattcggcacgaggtgatttccagcttttggaagccccggtgctttacgaaatcacggtagccggagagccatggagatggaacagttgaccttccgagatgtggctgttgacttctctccggatgagtgggaatgcctggaccctcctcagcagaggctgtacagggacgtgatggtagagaactacagaaacctggtctctgtggctctttctcatcattgtacccagaacttttcaccagaacagatcctaaaatattccttcacaaaaggaactaatggaagttgtggccttaaaagtttatacttaagggaagattgtatatatatagatgagagtaaagcccaccatggtagagatatgcaatgtctaattacaagcaataccaaagatgtcattgacagcagagatcaagaacacaaaaccgctctgacaataactcctgtgaggccagatactttggatgagccaagtatctataactgtaaatatccacaggaaagttttcagcatgacttaactttgaaagaaagtttggaagatctgatagatgggttaatgtttcacccaaacagttccatagataaagaattaagaagcagaggactgatatcaacaagtgatcaaattgagactttctatactgaaagatccttactcttcagtcagcaaatagctatctcctatgacccaaagcacaattctattgattatggattgcctgctattgatccattatcacatagcccaaatggcgatacagatgtgtgggaaagccctttcatgtataaggaaactagcaaagattttagtagtgaatctttactaaataactgcaatgatattatcttagagaaatctagtcagtataacaaaatatgtaacgactttgaccattgctcaagtcccaacaaatatcagtatactcttccaaagaagcctttcaattgtgataatttctttactcaatgttcaaagctttctatccatcaatatgttcaagataattgttacaagagtatcgattgtgacacaatgtttaataaaactttaaatgttattacacataaaawwmarmawwmmcagaaatcctacaaatgtaatgaatgtggcaaagcttttaaatattgctcaagttacagaaaacacagaataattcacacaggagaaaaacccttcaaatgtaaagtatgtggaaaatcctttacccaatgtgcaagccttaaaaaacatcagagaatccacacaggagagaaaccctacaaatgtgaagaatgtggcagaagctttaaccactactcaattcttggtcagcaccagaggattcatacaggagagaaaccctacaastktrmmcagwgtgggaaatcstttactcaatgttcaagccttcagaaacaccaagtmrkccacactggagagaagcccttcagmtktgcagartgtggsaartcstttacgcaaaactcaacccttagtcaacaccagagaattcatactggagaaaaaccttacaaatgtgaacagtgtggaaaggcytttacccaatgttcaagccttagaaaacaccagagaattcacactggagagaaaccctacaaatgtgaagaatgtggcagagcctttaactgccgttcatcttttactaaacacacaagagaattcacacaggagagaaaccttacaaatgtaaagactgtgacaaagctttcatccactgcacaaaccttactcaacaccggagaatccatacaggagagaaaccatacaaatgtaatgaatgtggaaartcctytagtcagtgttccaaccttagaaaacatgagagaattcatacatgagtaaaactarcaaatgtaaagawtttmgtaaatctkttatccatakkcaaaaaaaaaaaaaaaaaaaaaaaaaaaaaaaaaaaaaaaaaaaaaaa

SEQ ID NO: 296 - DNA, 1399 bp, Rattus norvegicus
  misc_feature (1267)..(1268): n is a, c, g, or t
agggaggctctctgcaataggtgcccggcccagbdtttttttcaaaatgtsyactgtscacgaaatcctgtgcaagctcagcttggagggtgatcawtctacacccccawgtgcctatgggtcggwcaaaccctacaccaacttcgacgctgagagggatgctttgaacattgraacagcaatcaagaccaaaggcgtggacgaggtcaccattgkcaacattctgactaaccgcagcaatgcacagaggcwggacattgccttcgcctaccagaggmggaccaaaaaggwactgccatcggcgatgaagtcggccttgtctggtcacctggagaccgygatgytaggcctgttsaagacamctgctcagtacgatgcctctgagctcaaagcctycatgaagggcctgkggactgatgaggactccctcatcgagatcatctgctcaagaaccaaccaggagctgcaggagattaaccgagtgtataargaaatgtwcaagascgwkcygrakwmrgacaysakctstgacacatctkkwkratyccgmaagctkktggkcgcccttgcaaarggtrwacsgscagaggatggttctgttattgamtacsagcwgawtgaccargatgcccggkakstctatkatgckgkkktgaagrrgaaaggamccgatgtccccaagtggatcagcatcatgactgagcgcagtkwgtgccacctcmwgaaagtgktcgwaaggymcarragytacagtccttatracwtgctggagagcmtywsraawgagkycaaaggagacctgkagaacgmyttmhtsracyyrsywyagkgmattyrgmhmragbcchwgwaytykgcygassgrytgtatsactccatgaaggkcawgsgbmctcgagrcamggtcytgattagaatcadgvwykcdmgcagwsragwsswcatgttgmwmatcagmtctgmattcamgmggaamtatgscwhayycctkymstacwtyatycagcmmkacactamvggtgayyrvcavrwggmgctgctgtacctgtrtkkwssrvhcswctgaagggcwtggcatggtggattgbccagaagtkgscmtacctgkgccccaasytaatgttmtagagamtcagcytgscactaatggmsccstkramtyctccyygtgwagmwkmcgacmgagstsscgamccawhccccatytwagytgcsttkgsstggsyttyccctcatyctctcytwtatsccaaagaaatgaacatynnagggagtkggrcgtaccgkctgkgacatgrracmcttcctcatatgtgtmgtgaataaascatttktacyttdraammavvmammaaaaaaaaaaaaaaaaaaaaaaaaaaaaaaaaaaaaaaaaaaaaaa

SEQ ID NO: 297 - DNA, 2680 bp, Rattus norvegicus
aaagggggatgtgctgcaaggcgattaagttgggtaacgccagggttttcccagtcacgacgttgtaaaacgacggccagtgccaagctaaaattaaccctcactaaagggaataagcttgcgrsmgcrgmtggcgggcgacgctggagacgctttcgcccgcgaggtagttggccgacgttgagcgaggacgaaagtgctggcgggtggccgcggcgtccccgcsagccccccacgasgccgggcgggcggctggctgtcggatttcgccgcgattcccccggaggctctttgcaaagctgcttgaaacttctcccaaactcgccatggatgtkscgrcsgckgcggckgycgcttttgtrgckctctkgctyctgtmcccgtggcctctcctggggtcggtccragsscagttctcagcaggtggctgyacttttgatgatgggccargggyctgysactaccaccaggatttatacgatgactttgagtgggtccatgtcagtgcgcaggaaccccattmcctgcsysccgaawtgcctcaaggttcctatatggttgtggactcctcaaatcatgatcctggararaaagccmgmctkcagctgcctacmatgrrggagaatgacacycackgyattgatttcagytacctgttgtacagccagaagggcttgaacccgggcactttgaacatcctggttagggtgaataaacaacctcttgctaatccaatttggaatgtaactggattcrstggtmrtgatkggcttcgggmtgarctrgctgtgagcmckttttggcctaatgaawacagagtaatatttgaagctgaagtctcaggakgragaagtggttatattgccatygayracatccaagtcytsagttatccttgcgataagtctccwcatttcctccgcctkggtgatgtggaggtcaatgcwgggcagaatgctacatttcagtgcattgcwacagggagagatgctgtacataataagttatggctgcagagacgcaatggagaagacataccygtagcccagacyaagaacatcaatcacagaagatttgctgcctctttcagattgcaagaagtgacaaaaaccgaccaggatttgtaccgctgcgtaactcagtcagaacgaggttccggggtttccaattttgcccagctyattgtgagagaaccacctagacccatcgctcctccccagctgcttggtgttgggcccacttacttgctgatccaactaaatgccaactctattattggcgatggtcccatcatcctgaaagaagtcgagtatcgaatgacgtcaggatcttggacggaaacccatgcmgtcaatgctccaacmtacaagttatggcatttagatccagatacagaatacgagattcgcatcctgctcaccagacctggagaagggggaactggactcccaggaccaccactaatcaccagaaccaagtgtgcagaacccatgcggacgccaaagactttgaagattgctgaaatccaggcaaggcgcatcgctgtggactgggagtccttgggctacaacatcacccgctgccacactttcaacgtcaccatttgctaccattacttccgaggccacaatgagagcagggcagactgcttggacatggaccccaaagcccctcaacacgttgtaaaccatctgccaccttacacaaatgtcagcctcaagatgatcctaaccaacccagaggggaagaaggacagcgaagagacaatcatccaaactgatgaagatgtgcccgggacttgtgccagtcaaatccctccaaggaacatcctttgaaaacaagatcttcctgaactggaaagagccattggaaccaaatggaattatcactcagtatgaggtgagctttagcagcataaggtcatttgaccctgctgtcccagtggctgggcccccgcagacggtatccaatttgtggaacagcacacaccatacctttatgcatcttcaccctgggaccacctaccagttcttcataagagccagcaccgtcaaaggcttcgggccagccacagccatcaacgtgaccacaaatatctcagccccamgmkkacctgactatgaaggcgttgatscmtctctgaatgaaactgccaccaccatcactgtactgctgagacctgcacaascgcaaaggtgccccwatcagtgmttatcaaattgtggtggagcagctacacccacatcggacsaagcgtgaagccgggaccatggaatgctaccgggtaccggttacgtaccagaactccctgagtgggggcgcasmctattactttgctgcagaactcccccctgggaatcttcctgagccagctcccttcaccgtgggcgacaaccggacctataaaggcttctggaaccctcccctggctccccgcaaaggatacaacatctatttccaagcgatgagcagygtggagaaggaaactaaaacccagtgtgtgcgaattgctacaaaagatggtagttccctcttcaactcttctctgcctgttcctcctcaatcccactgttgaactcactgaagatcagaaaagttgttcagtatttttgaagcaagaaacaaaatgcggggagaatggagctgagttatttttattttctctgagttggagtatttg

SEQ ID NO: 298 - DNA, 626 bp, Rattus norvegicus
  misc_feature (154)..(154): n is a, c, g, or t
acttagagccattagtgtagggctggtatgtatcttamgrraygwggswgtkcksywbsdgvswdvdkggcrkmtttskmggcykghtgggaacrgsayttctaaaaaawymvgyaygwskggaaggctgtggtgmaaggccatttttgctggnyacaagsgrggcctcmggaaccaaagrgagcacacggctcttcttaaaattgaaggtgtttatscscgagwtgaaactgagtyctacttasgyaagaggtgtgcttatgtrtacaaagcaaaaaacaatmcagtgactcctggargymraccawacaaaaccmgrgtgatytggggraawgtaactygggcccatgkaaayagtggcrtggttcgtrccaaattccgaagcaaccttcctgcaaaggccattggwcacasaatccgtgtratrctgtamccatcccggatttaaactaatggrgrgtwaataaataaaarwarawwwrwrmwhwwrwawwwwwwwmmhawmwrwmmwaaaaaaaaasarwygyggcygyaagmwyakwcsmkwagccatttaaggctgagcctgtaaagaccagaagctagaaatacaaggagcatcaggcagaggggagtgaggtgagcag

SEQ ID NO: 299 - DNA, 4770 bp, Rattus norvegicus
gacctgacagagctgacagaaccagctcctggcaccaaccagcgccaacccagcaagaaagcctcaaagggcaagggactccgtgggagcgccaagatttggtccaagtcgaactgaaaggacttgtttcttccctgggaatgtggggtcccagctcccggaattccaggaatccttttttaaaaatatcttgataatatttatataagctattcatatctgtgatcctaaccagggaattccgtgaaaagcctatcgagcttggtgatgctggttgcccaaaaaagaatttcagttcaactttaagcttaccatcagaacaacaaatcaaaatgtaaacttaaaatatagccgacacaaatggtctggcggcggcggcggaggaggaggcggaggcgcaggggggacccggggcggctaggctgcccagagttgcgcgctcctctgcggggctgcggccactagcaaggcgctgccgggcaagagccacagcccgccgcgggccgggaaagagggacgcgaccccggcccgcccagaccactcctgctctcctcgccgcccgcgcttcatgaaccgcaagtttccgcggcggcggcggcggctgcgggacgcggagcagaatcccggggagcgggcagagcgcggctttagcccgacggagggcacgggcgagaaccagatctccccgaacacagtgggaactgccacccgccacgccgctgcctgccctagccgaccggcgccgaggagggagccgaaaaagtatggctgaggaggcggtgcctagcgagtcccgggccgccggccggccgagcttggaactttgtgccgtagcactccccggccggcgggaggaggtggggcaccaggacacggctggccaccgccggccccgggctcactcccggtgctgggctagagggctactgctgcttctttggctgctggaggctcctctgcttttgggggtccgagcgcagccggcgggccaggtatccgggccgggccagcaacgtccgccgccgccccagccacagcagggcgggcagcagtacaacggcgaacggggcatctccatcccggaccacggctactgtcagcccatctccatcccgctgtgcacggacatcgcgtacaatcagaccatcatgcccaacctgctgggccacacgaatcaggaggacgccggcctggaggtgcaccagttctacccgttggtgaaggtgcagtgctcagccgagctcaagttcttcctgtgctccatgtacgcgcctgtgtgcacggtactggagcaggcgctgcctccctgccgctccctgtgcgagcgcgcccagggctgcgaggcactcatgaacaagttcggcttccagtggccagacacgctcaagtgcgagaagttccctgtgcacggcgcaggagagctgtgcgtgggccagaacacttccgacaaaggcaccccgactccctccttgctgccggagttctggaccagcaatccgcagcacggcggcggtggttaccgcggcggctacccgggaggtgccggccccgtggagcggggaaagttctcctgcccgcgcgccctcagggtgccttcctacctcaactatcactttctgggggagaaggactgcggcgcgccctgcgaacccactaaagtatacgggctcatgtacttcgggcctgaggagttgcgcttttcgcgcacctggataggcatctggtcggtgctgtgctgcgcctccacgctcttcacggtgctcacgtacctagtagacatgcggcgcttcagctacccggagcggcccattattttcctgtccggctgttacacagcggtggcggtggcctatatcgccggctttctgttggaggaccgggtggtgtgcaacgacaagtttgcagaggacggggcgcgcacggtggcgcagggcactaagaaggaggggtgcaccatcctctttatgatgctctacttcttcagcatggccagctccatctggtgggtaatcctgtccctcacctggttcctggcagccggcatgaagtggggccacgaagccatcgaggccaactcacaatattttcacctagccgcctgggctgtaccagccattaaaactataaccatcctggcgctgggccmartggatggcgacgtmmtgmgtggartgtgttttgtggggctcaataacgtggatgctctgcggggctttgtgctggcgccgctcttcgtctatctgttcatcggcacctctttcctgctggctggtttcgtgtcgctcttccgcatccgcaccatcatgaagcatgacggcaccaagacagagaaactggaaaagctcatggtgcgcatcggagtcttcagtgtgctctacaccgtgccggccaccatcgtcatcgcctgctacttctatgagcaggcctttcgggaccagtgggagcgcagctgggtggcccagagctgcaagagttatgccatcccttgccctcacctccaaggaggtggaggcgtcccaccacacccacccatgagccccgactttacagtcttcatgatcaagtatctcatgacgctaattgtgggcatcacatcaggcttctggatctggtccggcaagacactgaattcctggaggaagttctacacgaggcttaccaacagcaaacaaggggagactaccgtctgaaacccagaatcttacctgcccttttctggccggatcccagctatcgcctgaaagctagctccaaggaattcctgccaagcctagtcactccaggcttcctcgccagacacacacttttgcaggctcctttttcaacaaacagcacaggttctgcaaaagcttccgtccctggggtaaaggaacgagagggcccaactgctagaggggtttgtttgtgtggacagacctctctagccctcgctccgatactaggactgtacccttttatgattgtaaataacctgtgtaagatttttgtacgtatatttgtatttaaatattatcgaatacgcgttttttctttttaaaaatgtttaattatttagggcgatttaagcatctcggagcttttctcacttgctgtttcctgcggactgtagaggaagtaacacagaacacatttgatgagtgctttgccctgtgccctcatccttgttatgggagcatgggcctggctcttgcactgagggctgtgacagkggckgcctctccagggtcaattccttcaggttcttwccgcccctcccctttcttgcttgcagtgggaaatttyamggkgcagaactccataaagtttccagatcccgaggtgggccccgctattccagttcctccccctttcagctgtagagtgtggagggctgtccctgagacttcatgatgctgcttttttgagaatcacctttcaacttcattagaggcccyagcatgggcacagccagttaacccagcctccctctactctggtgtccctcgcccagtttctttctccttccacctaagttggtcagagggaatgcagtcaccagtaccaaactttggaaagtctgactttttaatggatgagctcatatttactttctagtgtctggaacctgctatgggtctggtccccatcgtggaaagtgcagcaagctttgtgggttgggacagatataaaacgttagttctaattgcattctgatgtctggcaatcaatctcctttcttcccccggtgatgctgcttgcttcttgcttttacccttctatgagatgcagacatcgaggtcacccggcaagtttggtgaaggagttggtttttaccttcctaaacgggatagtagaacatgaccagaacatgaaaactgaaggagatttcagtggagcgcagttcctccaagtgaaacggctgttttctggttttaaccgaactgcaattagacataaatcagtcgtcaacaatctaaaagttstacactatcaacattatgcttacttctcagcagcacattctgagggaggagcagtcacacccccacagaaagcctgggacttccgaagacagaggaggtggactgactgatgggtgagrgaawcaaacrcaaactgggcatgcatgctgaaggggaagtgtgtccattcstactgcgtcccwtctgtgtgctytgtmtggattcacggcagtgtgttcaatgtaaatctbtcasagccatttwaaaatactcactttagttytccatgaagaagaggaaawaaagcagtcctcccgattgtagtattcraacttttaagagtttatcacaaatgccggtacataggacctaaatttatctatgtctgtcatacccttaaatgacattggttttgaatttggtatgcgttattattattattgtkattattattattctcaccaccatgagatcatctatatttataraggaatasaagtttatatatataaaatgccatatttttaatttcgcaaataaaaaaagtgaaagttttgbamwwmmrraawwmmrdwrttyykgaatkcckgaawwymrscatcctatctgaactgcctttacattttacagtgcctcacaaccagtccacaacatacaaaccgaaagattcggtggacaaacccgcccttccaaagagcaaccagtctgccttccgagtggcatttgtaaagcactattttcatgacacagaaaacagaaggtttcagtcctttaaccaaacaatgtcgtcattaaagtataactaattttaaaaaaaaaaaaaaaaaa

SEQ ID NO: 300 - DNA, 5002 bp, Rattus norvegicus
ctcagagtacagtttgggataaaagtcctcctttatacccttcctacaaaatatgggtgggtaggataagaagggttaagtgtggttttgctactaaagccagggagagaagccaggccagggagggaaggaggggtaggaggggcaggaggggctgagacagtgggaagagcgtgagccccagccctcacgttccactgactcacccatccacctctgtttctgggttaggaagtaggagaaggagaagcagaagaaatgggtttttgttgttgttttgtctgggaagttgagtggcagccacatagcccagggagagaactagagggaaaggaagctacgtcctagtcctctcccctagatgcatcctggcttcttaccacactgcccaagtcaccactcacagaactaactctccagagccaagtggagtggacaacactttatcccagtcctctggaggcagaggcaggcagatctctgagattcaaggctggcctggtctacaaagcgttccaggtacgtagagaactccgtctgaagcaatgcacacaatctcctagagtcccaactcaagcccacgaacctagaacctgtccagttctggaactggcaggttaatcggtgccctgaggtgctccatggatgagcagggaagctcattgcaggagggatgctgggccagttgccagctttagcttagggttacaggagaggactagacagctgaccaagagtctttgatggaggctgaagaacctgggaccaggttactgtattgggagatagtctagtcagggcccactcataactggactagaaaggcatgcagtggctgaggaggggtggctttgctctttgtgctcccactgttaggaatggaacccagatggagaccctgcattaataaccctccgaccccattcctcttttcaggcccttacttgcagtcacaaaaatctggaacctgggtcctagcccatgtgttgaatgcacgcacagctctggtatactgttttaaattatccattaaaataagtacagtccttgggaaaaaataagctcagtcttggcttggcttggggtggagtaaactgaagaaaggggcttgaaagggagggattataacagccatttccaactgtctgggtccaaatgaaaggggaggggggattgggagggcagcttctctggcttctattcttggctttctcttggggactgaggcttattccttagatctaaaacccaatgtttggttttaaagccagaaatataagggaagtgcataggtttaaaaaaaaaaaaaaaaaaggcccttgatctttccccaaacttgagggcataaagtaatatgttagttacctaaaaacccagacgttcctttgccatcccactcctggcatactgaaatgcagccctggataggccgctcctgtggtgggggagaggtgactcactgttactactgaggaaattttagccagtggtggaagtgggtgagtcactgatgggcagcagctcagccctcccccagcttccttggctccctggggatgcctagctctctccctcactttgcacctacttcccctgggccctcgccactacccttcgcccacccactctcattcctttactctgccctttaccacagaaggccaaaggcaagcttggagttgagtaggcaggaaccaacattgtgaagccccaggccagaaaggggtgttctgcagactgagggttagcatgctggctcctcctcaccatacctgcctccgcccctttgggtctaggatggctcctttaagagcagtggatccaccccctgtggaggagggcctattagagtctctgcccggctgtcagtgactcagtgttcgcgggaacgctgcctcagcctcaacaccagccaacccagatcccgaggtgcgccmcgcccagcccagatctccacgcctgccaggagcgagcttcgccggctcgctgtcccccgagcagcctctgtccttctgtccgagtcccgcgcccttctcgggacccctgcccagcggcagcactgmcaccctgccggccatggagaccccgtctcagcggcgssccacccgcagtggggcgcaggccagctctaccccwkgtcgcccactcggatcacacgkctgcaggagaaggaggacctgcaggagctcaatgaccgtctggccgtgtacatcgatcgcgtgcgctccctggagacggagaacgcggggctgcgccttcgcatcactgagtctgaagaggtggtcagccgagaggtgtccggcatcaaggcggcctacgagcgagctgggggatgcccgcaagaccctcgactctgtggccaaggagcgcgcccgcctccagttggagctgagcaaagtgcgtgaggagttcaaggagctgaaggcgcgcaataccaagaaggagggggatttgttggctgcgcaggcccggctcaaggacctggaggctcttctsaactccaaggaggctgccctgagcactgctctcagtgagaaacgcacgttggaaggcgagctscatgatctgcggggscaggtrgccaagcttgaggcagccctgggtgaggctaagaagcaactccaggatgagatgctgaggcgagtggatgctgagaacaggctacagaccctgaaggaggagctggatttccagaagaacatttacagtgaggaactgcgtgagaccaagcgccggcacgagacccggctggtggagattgataatgggaagcagcgagagtttgagagccggctggcagatgctctgcaggagctgcgggcccagcatgaggaccaggtggagcagtacaaraaggagctagaaaagacatactctgccaagctggataatgcccggcagtctgccgagaggaacagcaacctcgtgggagctgcccatgaggagctccagcagtctcgaatccgcattgacagcctctcagcccagctcagccagctccagaagcagttggcagccaaggaggccaagctgcgtgacctggaggactccctggcccgtgagcgggataccagccggcgcctgctggctgaaaaagagcgggagatggctgagatgcgggcaaggatgcagcagcagctggatgagtaccaggaaytkctggacatcaagctggccctggacatggagatccatgcctaccgaaagctgctggagggcgaggaggagaggctacgcctgtcccccagccctacctcgcagcgcagccgtggccgcgcctcctcccactcctcccagtctcagggtggaggcagcgtcaccaaaaagcgcaagctggagtcttctgagagccgsagcagcttctcgcarcatgcwcgcactagcggscrygwggccgtagaggaagtagatgaagagggcaagttcgtgcggctgcgcaacaagtccaacgaggaccagtccatgggcaactggcagatcargcgtcagaatggtgatgatcctttgatgacttatcgcttcccaccgaagttcaccctaaaggccgggcaggtggtgacgatctgggcttcaggagctggggccacccatagcccccctactgacttggtgtggaaggcacagaacacttggggctgtgggascagccttcgcacggctctcatcaacgccactggagaagaagtggmcatgcgcaagctggtgcgctcamtgaccatggttgaggacaatgacgatgaggaagaggatggagatgagctgctccaysascaccgtggctcccactgcagcagctcgggggaccccgctgagtacaacctgcsstcagcaccgtgctgtgcgggacatgtgggcagcctgctgacaaggctgccagtggctcaggascscaggtgggcsgakscatctcctctggctyttctgcctccagtgtcacagtcactcgaagcttccscagtgtggggggcagtgggggtggcagcttcggggacaacctagtcacccgctcctacctcytgggcaactccagtcyccggacccagagctcccagaactgcagcatcatgtaatytgggacctkccaggcrrgggtgggggcagaggccacctsctccctyytcaccacatgccacctcctgccctgttccttwtgrsassaggwytgwwkyywwwkwwwwytwtyyyytgccyttgggtgttttycttttttccttctattttttttytaagagaagttattttcymcagtggttttwtaytgaaggaaaaacmcmrgcmaaaaaaaaaaarwrwmwttatctcaatccttagtccttcccttttccctgtatctgccytaaaccaaagggcytctcataggagcccagggaaaggactgcttttgtagtctagatttttgtcctgctgccttgsstttgscctyatyccargamcctgtgacacggtgcctkagargcargcatggagttctctttaccggcctcctccacagctggcccamtgccatgccagctgcaaagaaaaggggtgcagagagaatgactgaaaggtcargcccctcctggstcaytacacttggccgagaytcctctgcctgccttaccctcctgccttcccgagcytgggacgagtggattcccagaggcaaatctgccatgcttgcytttttctatattgtattcagacaagagatgggaaagatggggaaggagaagggacggtcagtttgaacctacctttcccccgtgcgtacagcctgctggtgggctctgtctgtcggtggagggcagtattaagtgggattggggagagagtgagggaaaggctcctggagattgggagaacctgctggggccagtgagaagactagagggtgtggtgattggtggctacagcaaacactaaggaacccttcattcccacttcccatctgcacctctgctctccccccaaatcaatacactagttgtttccawmmmraaaaaaaaaaaaaaaaaaaaaa

SEQ ID NO: 301 - DNA, 1685 bp, Rattus norvegicus
gggcgcctgggaagcggaaacctgggagaaatccagctagagcccaagagccaggactaccccttgacctgtgaaccatgggggagatggagcagctgaagcaggaggcggagcagctcaagaagcagattgctgatgccaggaaagcctgtgcggacatcactctggctgagcttgtgtctggcctggaggtggtgggacgagtccagatgcggacacggaggacgttaaggggacacctggctaagatctatgccatgcactgggccactgactctaagctgctagtaagtgcctcgcaggatgggaagctgatcgtgtgggacacttacaccaccaataaggtgcatgctatcccgctgcgttcctcctgggtcatgacctgtgcctatgcaccatcagggaacttcgtggcatgtggggggctagataacatgtgctcaatctacagcctcaaatcccgtgagggcaatgtcaaggtcagccgggaactctcggctcacacaggttatctctcctgttgccgcttcctggatgacaacaacattgtgactagctctggggacaccacgtgtgccttgtgggacattgagacggggcagcagaagacagtgttcgtgggacacactggtgactgcatgagcctggctgtgtccccagactacaaactcttcatctcgggagcttgtgatgccagcgccaagctctgggatgtgagggaagggacctgtcgccagactttcactggccacgagtcagacatcaatgctatctgtttctttcccaatggggaggccatctgcactggctcagatgatgcctcctgccgcctctttgacctgagggcagaccaggaactgacagcctactcccacgagagcatcatctgtggcatcacgtccgtagccttctcactcagtggtcgcctgctctttgctggctatgatgacttcaactgcaatgtctgggactctctgaagtgtgagcgtgtaggcgttctttctggccatgacaacagagtcagttgcctgggggtcacagctgacggcatggctgtggccactggatcctgggacagcttcctcaagatctggaactgaggagsctggaggaagaggtgggaasccatgaaggctctcagctgactcctatgccctgtctccttagggtcagtcttctataccctggggccactcccagtaaacttccttctaagggcaggtgggattatrggagtgtgcctttgggagyrgcasgrdsacaagggcaaagaactgccccatttcctccagggcctctcctctccacagtcctcatagcttctccyttcataaacaagaacagaccctccccaycbtagatgactcytgggctaccagcagcbtttgtccggcytgggaatggccagagcgctcagcccatgactataggtgtcactcytagtatcctggctccctcccagcsactttctttctgcccttttgttctctcttattacctaataaaatgtagcatcctggwawmmmwwaaarraaawwaaaaawatcattgcggccgcaagcttattccctttagtgagggttaattttagcttggcactggccgtcgttttacaacgtcgtgactgggaaaaccctggcgttacccaacttaatcgccttgcagcacatccccctttcgccagc

SEQ ID NO: 302 - DNA, 1831 bp, Rattus norvegicus
  misc_feature (1624)..(1624): n is a, c, g, or t
gaggactggaaagtagagaaatttgtttgttccacattttcagaagtttacatcaaaccagtcatgttgaagaacattctactgtggtctcttcagctaagtctcctaggaatgagtcttggcgggaatgttctcatctggccaatggaaggcagtcactggctaaatgttaagatcataatagacgaactcctaaggaaagagcataacgtgactgtccttgttgcatccggggcccttttcatcacaccgtcggtcagcccatctctgacattcgaaatatatccagtgcccttcggcaaggaaaaaatcgaaagcgtgatcaaggactttgttttgacgtggctggaaaacaggccgtctccttcaactatctggactttctataaggaaatggccaaagtcatcgaggagttccacttggtgtccagagggatctgtgatggcgttcttaagaatgaaaagctgatgaccaagctgcagagaggaaagtttgaagtactgttgtcagacccagtatttccgtgtggcgatatcgtagctttaaaactggggattccatttatctattccttgcggttttctcctgcctccacagtggaaaagcactgtggaaaagtcccgtttcctccttcctatgttcctgcaatcttgtcagaactcacagaccagatgtccttcgctgaccgagtaaggaactttatctcctaccgaatgcaggactacatgtttgaaactctttggaagcaatgggattcctattacagtaaagccttaggaagacccaccacactgtgcgagactatggggaaagctgagatttggctaatgcgaacatattgggattttgaatttcctcgtccatatttgcctaattttgagtttgtgggaggactgcactgcaaacctgccaagcctttgcctaaggaaatggaagagtttgtccagacctcaggggaacatggtgttgtggtgttttctttggggtcaatggtcaaaaacctgacagaagaaaaggccaatctcattgcctcagcccttgcccagattcctcagaaggttttgtggcgatacaaaggaaagataccagccacattaggatccaatacgagattgtttgactggattcctcagaatgatcttcttggacatcccaaaaccagagcttttatcacccatggtggaacaaatggaatctatgaggccatttaccacgggatcccgatggtgggagttcccatgttcgctgatcagcctgacaacatagctcacatgaaggctaaaggagcagctgtggaggtgaacatgaacacgatgacgagtgcagatctgctcagtgctgtgagagcagtcatcaatgagccattttataaagagaatgccatgagactatcaagaattcaccacgatcagccagtgaagcccctggacagagccgtcttctggattgagtttgtcatgcgtcacaaaggagccaagcaccttcgtgtggcagcgcatgacctcagctggtttcagtaccactctctagatgtgattgggttcctgctggcttgtatggcatctgccatattattggttataaaatgttgtttatttgtatttcaaaaaattggtaagacangaaagaagaataaaagggactagatgaaggaaagacatctcaggtctctgggtttggtcaagcaccaactggagtagcaatagtacttagaaacccagggagttgccagtcacctatcctcatcccattttcaatcattccattcctgtcttagcttgaggtaaattggaggatcgaacatactttctttgctatttcaatgacggt

SEQ ID NO: 303 - DNA, 2468 bp, Rattus norvegicus
tatacatagtatatctgtgatgcttttctatgtcagtacatgctagttagatggtagtccaccattagatatcttttaggagatggcaaaatcacttaaaaatattcatataagtacatttacaattcccaagtaaataaatcccaagtaaatgaacagaatcctaaaacacagaaacaaacatctaaaaacaatgttcatcctccaaccagtgtggaacagttctttccctgtttacaataagcaaattaaaatgattgggcagattaaatcaaacctccctgcttatacagaacactccgcttgttaagcttatgaaaaaaggaatgaaaaatgcaggtgactcattcacttacacacggaaaacaagtcagtgtactacaaatatacatgtgaaaagttataaaatgcttctttgtctaaggtttctaacgtgtcaaaccctggataaatggtaaaacagctaataagctaagatcgggcattcagatccagaaattcgaagattagcctgaaacagtgctgttaacatttgtttccatctgggagcagatgctaatggactgcgatgctgattacttaaagttcgctcacatcacacattcaattgcagtaagaagaacataacatgcctactgtggtgctggattaagacataaaaattttttgcttgaacgtaatgactgtgcagcacatgggacatttgtcaactgcttccgcacactgtttacaagtgaccagatgtccacaaggaacaaaaactatagcaatatttctatccatacagattttgcaaagcttctcctcttgtaggcgccttagctgctcttcagtactgatgtctttctgcaatgaagtctgacttgactcatcctgcgaattatctttctgagcactcacaagatctgcaatcagaacctcaagtgatagatagttgctcccagatgtttggagcttttcttccattgttttcttgatgtccttgaagttgaatcccattcgtatagcttcttgcaccataggattctggaagatggtatcatcgatttttttagttactgatggtgttttttcagcagttcttaccacagattccccaagtgaatgggttaaatgaatattatttatatattcttgtcccttctcatccaatagatatttacaccctggataccacttagcatgctgttcccaagggtcttcacttggcttccaatccgtgagccctcctccacagtgaaagcacttcactttatcaccttcacctaaagcataaaatccagctcttgcaagctgctccttgttaactgagtatagccatgttccaaaagtaacgatccgtgcgtcatattctgccatggctggatttcttggagaatttgttgaatttgggaaattcctatctgaactcacaccagactcacttcgaacattaacattccggcccaaaacgaagaagcagttgggaaagtgtctcctgtgctctgaccaggcacggtcacagggttcccaatttttcagttttccaccacaacaaaagcattgcacttgatcatcaatccccgtgtagtagagtccagcactagctaactctctggggcttaaatgggcatagtctggccagttctgaaacgtcttcagtctggcttcttcactacacatggccgggttcctcgggtatatggtatctgaaatatctacaacctgtccagttctcaggagataatctgcatgagtctccgacggcctgtcaagagcaaaatgatttctgtttcccacacagttttcagatttgtactggccattttggatgccaggagatgtagactgtgtggcaccgttttcaaaataaaaaccattgataaatctgcaatttggggatattctcctgtgtcttccaacagctgagtctccatactgccatctatctactgccgcgtgacaactgaaacactgcacggtgtctccttcaccagtgtagagaaaccccgctcgcgccaatgttgatgctgaaacaggactgctgcttgggaagttagcaaatgtttttaatctattaaactcttctacaaattcttcatccttattggtgtctgcaggtacaacagttctagatccttcaaaactgttaaaagtcatcttctcttgaaaatacgacttgtccaccttttcgcgccaagcaatccagtcctaactaaccgccgcgggcgacggttcccgaggggagggtcccggaggaggggcggcccgagccccgatcaggaaaaacacaactctgctgggcggcgggccccggcctctcgagccgagcagccctcgattagcgtcgcgctcgctcgggggaccgccaaggtccgccgtctcgcggagccggaagggggcatccaaaaaacccccagtcctcattatgcagcccgaccccccccacccccccaccccgcctccccagctccaagccagagcctgac

SEQ ID NO: 304 - DNA, 2521 bp, Rattus norvegicus
  misc_feature (1445)..(1468): n is a, c, g, or t
  misc_feature (2213)..(2213): n is a, c, g, or t
atcgcagtccggaggtgaggcggwmckmwkmaggtggaacattatggctgacatgcaaaatcttgtagaaagattggagagggcagtgggccgcctggaggcggtgtcacatacttctgacatgcactgtggatatggagacagtccttcaaaaggagcagttccatatgtgcaagcatttgactcgctgcttgccaatcccgtggcggagtacttgaagatgagtaaggagattgggggagatgtgcagaaacacgcggagatggtccacacaggcctgaagttggagcgagctctcctggttacagcttctcagtgccagcagccagccggtaataaactctcggatttgttggcccctatctcggagcagatccaggaagttataaccttccgggagaagaaccgaggcagcaagtttttcaatcatctatcagctgtcagtgaaagcatccaggccctgggctgggtggctctggctgcgaaacccggcccctttgtgaaagagatgaatgatgccgccatgttttacacaaaccgagtcctcaaggagtacagagatgtggataaaaagcatgtggactgggttagagcttacttgagtatatggacagaactgcaggcttacatcaaggagttccataccactggcctggcctggagcaagacggggcctgtggcaaaagaactgagtggattgccatctggaccctctgtgggatcaggcccacctcctcccccaccaggccctcctcctcccccagttcctaccagttctggctctgacgactctgcttcacgctcagcactgtttgcacagattaatcagggggaaagcatcacacatgccctgaaacatgtatctgatgacatgaagactcacaagaaccctgccctgaaagctcagagtggtccagttcggagtggccccaaaccattctctgcacctaaaccccaaactagcccctcccccaaaccagccacaaagaaggagccagctctgctggaactggaaggcaagaaatggagagtggaaaaccaggagaatgtttccaacctggtgatcgatgacactgagctgaagcaggtggcttacatctacaagtgtgtcaacacgacattgcaaatcaagggcaaaatcaattccattacagtagataactgtaagaagcttggcctggtgtttgatgacgtggtgggcattgkkgagataatcaatagtmrsgakgtcaaagttcaggtgatgggaaaagtgccaaccatttccattaacaaaacagatggctgccacgcttacctgagtaagaactycctggactgcgagatagtcagtgccaaatcttctgagatgaacgtcctcattcctacagaaggcggtgattttaacgagttcccagtccctgagcagttcaagaccttgtggaacggacagaagttggtcaccnnnnnnnnnnnnnnnnnnnnnnnngtgaatgcatgggtcctgtgccctctcccttcacaccatgggatacatctgtatggagacggttcttttctaratttcctctacctttctgctcttaaactgcttctctgctctgaraagcccagctacctgccttcactgaatatacctcaggctgagacgggcgggacagcaggtcagtggattttcaccggaaggtgcagcttctccacatcagcgcggctgcaccgcagtccgagcttatggagcttccggcccagactgggacactgaagctttcagctctggggtcattctaccaacaaacagtccttgagggttcaagacaccctggaatgcatgctgttctaacagtgagcatggaggtagcgggagccagtgattccatgargttctagccaacctarttttcagcgttgacaagtgaggccagggttgctcttgaccaaaagmtaagcattgccacccagcattccaagcagacttgtttcctagaagcatccttcattytgcattccatmctgggtcggcatvtaccacacwcagcaggcattyctyttgcagctgcaggacagtascagttcccaaaaagybttaaccccctcccycgcyccgattcccatgggggaacaacttagaaaaaaggggggaagaaaaacmcascattccaaggagkcygrssgtcctcsttchtgycagatgactstcaccgtgtccactcctcctgyktgtcmcgctcarcarntgaggcctcctcgtagggacctggatagggytaaracctccmytgcarctktttggggcttggtttacaccagagtcttgcacagcattggtatcgcaaacccrgaattytythtaggacacactgaccaaaatatgcaaccttttyttttttytttgtkggaaaagaggaagagagattgtcctgtgacttctgcccattacmtgaggcctgtggaaataaacctttatgkacttaaagttatmcagaaaatagaataaagttartaccvmwmwwrwwwaraaaaaaawaaaaaamacatgctgccg

SEQ ID NO: 305 - DNA, 1499 bp, Rattus norvegicus
tctcagggtcctgatctctgctctgtgtcttgcagagtgcctgctcactgtgtcccccgggttatgacgacccccaataaaggaaacaaggccttaaaggtgaagcgggagccaggcgagaatggcaccagcttgactgatgaggagctggtgaccatgtcggtgcgagagttgaaccagcacctgcgaggcctatccaaggaagagattatccagctgaagcagcgccggcgcacactcaagaaccgaggctacgcagccagctgtcgagtgaagcgggtgacacagaaggaggagctggaaaagcagaaggcggagctacagcaggaggtggagaagctggcctctgagaatgccagcatgaagctggagctcgatgccctgcgctccaartakraggymmygcwgmrckwtgycaggrscgtsgyccgmagcccygtggccmyggstsrrggtccccttgctgctggcctggggcccctggtccctggcaaggtggctgccaccagcgtcatcacaatagtaaagtccaagacagatgctcggtcatagggacacgtgcagttgccaggcaggtctttgaggggccactaggtgcgtggcaaagttggcagccccgtccctcttcctttcttttcccttcctttctactttcccttccctctttccttccctgcaaagcacaacctgcacccaggggcaccggctgagccccttgatatcatctttgwtgtcacgcctgtgttttgtacgttgggatcggtcagttcaacagtgatgttggttgcccctaacccctttgtaycaaggccatgcaggctaggagtccggagtgggcactgtgggaatggacgagagtgcaagtgggcaagtgtactggkyytgkgwacwrycsaattcmyggtggtctgcaggggracttraragctttcttttcagatttccagtgggcctcagtttgatccagaaggaggagatgggctctgccykgaaacgtggttatatcttgaagcccctggatggataggccaccagcytgggcattggggcaggaaccatggtgctggagcctggcacagtgcaccggataagaccaaatcsccggttatragtktgggtggaaggtgtgtcagtgtgtcctgcgatgggtccggtgtcactgtttacatgacctatttgtgtggttatatagccctttatttaaaagagaagttccttttacggagttattaaattatatgtttaagmgctaaaaaraaaaaaaarmwrcagagtatttataaaattgtcttaaaaaacaaaaacagaaaacaacatttgaccgtataaatggataagggaagaaagtatagtagaaactttgctagttgaaaaaaaaaaatccctttcttgtaaacctggggacagctctgtggctgttggagtttagtttttatacacagagttatcagacattacttataaaacttagtttaaaaaaaraaaaaraaaaaaaaaaa

SEQ ID NO: 306 - DNA, 15234 bp, Rattus norvegicus
atggtggctggcatgctcatgccactggaccagcttcgggccatctatgaggtgctctttcgtgagggggtgatggttgccaagaaggaccggcgaccccgaagcctgcatccccatgtgcccggcgtcaccaatctacaggtcatgcgtgccatgacctcgctgaaagctcggggcctggtgcgggagacctttgcctggtgccacttctactggtacctgaccaacgagggcatcgaccacctacgccagtacctacacctgccaccggagatcgtacctgcctctctgcagcgtgtgcgccgccctgttgccatggtgatgcctgcacgtcgtcgctccccccatgtgcagaccatgcaaggtcccttaggctgtccaccaaagaggggccctctgccagctgaggaccctgcccgggaggagcggcaggtctatcgcaggaaggagcgtgaggaaggggcacctgaaacccctgtggtgtctgccaccatcgtggggaccctggccaggcccggcccagagcccaccccagccacagatgaacgagaccgtgtgcagaagaaaacttccaccaagtgggtcaataaacaccttatcaaggctcaaaggcacatcagtgacctgtatgaagacctccgtgatggccacaacctcatctccctgctggaagtcctctcaggagacagcctgccccgagagaaggggaggatgcgtttccacaagctgcaaaacgttcagattgccctggactatctccgacatcggcaggtgaagttggtgaacatcagaaatgatgacatcgccgatggcaaccccaagctgaccctgggcctgatctggacaatcatcctgcacttcaagatctcagacattcaggtgagcggccagtccgaggacatgacagccaaggagaagctgctgctgtggtctcagcgtatggtagagggctaccaaggcctgcgctgtgacaacttcaccaccagctggcgcgacggccggctcttcaatgctatcatccacaggcacaagcccatgctcatagacatgaataaagtgtaccgacagaccaacctggagaacctagaccaggccttctccgtggcagagcgggacctgggagttaccaggctcctggacccagaagatgtggatgtccctcagcctgatgagaagtccatcatcacctacgtttcatccctgtatgatgccatgccccgtgtgccgggcgcacaggatggagtgagggccaatgagctgcagcttcgttggcaagagtaccgggagcttgtgctgctgctgctacagtggatccggcaccacaccgctgcttttgaggagcgcaagttcccctccagctttgaggagattgagatcctatggtgccagtttctgaagttcaaggagacagaacttcctgccaaggaggcagacaagaaccggtccaaaggcatctaccagtctttggagggagcagtacaagcaggccagctcaagattccccctggctaccacccgctagacgtggaaaaggagtggggcaagctgcacgtggccatcctggagcgggagaagcaactccggagcgagtttgagaggctggagtgtcttcagcgcattgtgagcaagctacagatggaggctgggctatgtgaggagcagctgtaccaggcggattccctactgcagtcggatattcggctgctggcctcaggcaaggcggcacagcgggctggggaagtggagagagacctggacaaggctgatggtatgatccggctgttgttcaatgatgtgcagacccttaaagatgggcggcatccacagggtgaacagatgtaccggagggtgtatcgtctgcatgagcgcctggtagccatccgcactgaatacaacctccggctgaaggcaggggtgggtgcccctgtgacccaggtgaccctgcagagcacacagaggcgcccagagctagaggactccacactgcgttacctgcacgacctgctggcatgggtggaggagaaccagcgtcgaatagacggtgctgagtggggcgtggacttgcccagtgtagaggcacagctgggcagccaccgaggcatgcatcagtctattgaggaattccgggccaagatcgagcgggctcggaatgatgagagccagctctcccctgccacccgaggtgcctaccgagactgcctgggccgcctggacctgcagtatgcaaagctgctgaactcctccaaggcccgcctccggtccctggagagcttgcatgggtttgtggcggcagctaccaaggagctgatgtggctgaatgagaaggaagaggaagaagtgggctttgattggagtgaccgcaacaccaacatggctgccaagaaagaaagttactcggccctgatgcgtgagctggagatgaaggaaaagaaaattaaggagatccagaacacgggggacaggttgctgcgggaagaccatcctgcccggcccacagtggagtccttccaggctgccctgcagacacagtggagctggatgctgcagctgtgttgctgcattgaagcgcacttgaaagagaacacagcctacttccagttcttctcagatgttcgggaggctgaggaacagttgcagaaactacaggagacgttacgcaggaagtacagctgtgaccgctccatcactgtcacaaggcttgaggacctgctgcaggatgcccaggatgagaaggagcaactgaatgagtacaaagggcacctctcaggcctggccaagcgggccaaggctattgtgcagctgaagccacgcaaccctgcccaccctgtgcggggtcacgtgcccctgctagctgtgtgtgactacaagcaggtggaggtgactgtgcacaagggtgaccaatgccagctggtgggccctgcacagccgttccactggaaggtgctcagtagttccggcagtgaggctgccgtgccttctgtgtgctttcttgtgccgccacccaaccaggaggcccaggaagctgttgctaggctggaggcccagcatcaggccctggttactctgtggcaccagcttcacgtggacatgaagagtcttctggcatggcagagcctcaatcgtgacatacagctcatccggtcctggtccctagtcacgttccgcacgctgaagcccgaggagcagcggcaagctctgcgcaacctggagttgcactaccaggccttccttcgagacagccaggacgctggtggctttgggcccgaggaccggctggtggcagagcgcgaatatggatcttgtagtcgccactaccagcagctgctacaaagcctggagcagggtgagcaggaagagtctcgctgtcagcgatgcatctcggagctcaaggacattcggctgcaactggaggcctgtgagactcggactgtgcaccgtctgcggctgccactggataaagaccccgcacgggagtgtgcccagcgcatcgctgagcaacagaaagcacaggctgaggtggaggggctgggcaagggagttgcccggctgtctgctgaggctgagaaagttctggccttgccagagccgtcacctgctgcaccaactctgcgctcggagttggaattgaccctgggcaagctggaacaggtcagaagcctgtctgccatctacttggagaaactcaagaccatcagcttggtaattcgcagtacccagggggctgaggaggtgcttaaaacacacgaggagcacctgaaggaggcccaggccgtgcctgccacactccaagagctcgaagtcaccaaggcttcactaaagaagctgcgggcccaggcggaggcacagcagcctgtattcaacaccctacgagatgagctgaggggggcacaggaagttggtgaacggctacagcagcggcatggtgagcgggacgtggaagtagagcgctggcgagaacgtgtcactcagttgctggagcgctggcaggctgtgctagcccagactgatgtgcggcagcgggagcttgaacagctgggccgccaacttcgctactaccgtgaaagtgcggatccgctgagctcctggctgcaggatgccaagagccggcaagaacagatccaggctgtgccaatagccaacagtcaggctgcacgagaacagctgcgccaggagaaggccctgctggaggagattgagcgccatggtgagaaggttgaggagtgccagaagtttgctaagcagtacatcaatgcaatcaaggactatgagctccagctgatcacctacaaggctcagcttgaacctgtggcctcccccgccaagaagcccaaggttcagtctggatcggagagcgtcatccaggagtacgtggatctgcgtacacgctacagtgagctgaccacactcacgagtcagtacatcaagttcatcagtgagacactgcgccgcatggaagaggaagagcggctggctgagcaacagcgggcagaggagcgggagcgcctggccgaggtggaggccgcgctggagaagcagcggcagctggctgaggcccatgcccaggccaaggcacaggccgagctggaggcacgagaactgcagcggcgcatgcaggaggaggtgacgcggcgcgaggaggcggcggtggacgcacagcaacagaagcgcagcatccaagaggagctgcagcatctgcggcaaagctcagaggcagagatccaggccaaggcccagcaggtggaggctgcagagcgcagccgcatgcgcattgaggaagagatccgcgtagtccgtctgcagctagagacaactgagcgtcagcgtggaggggcggaggatgagctgcaggctctgcgtgcacgggctgaggaggcagaagcacagaagcggcaggctcaggaggaagccgagcgcttgcggaggcaggtgcaggatgagagccaacgcaaacggcaggcggaggccgagctggccctgcgtgtgaaggcagaagcggaggcagcgcgagagaagcagcgggccctgcaggctctggatgaactgaaactgcaggccgaggaggccgaacggtggctgtgccaagccgaggcagagagggctcgccaagtgcaggtagccctggagacagcgcagcgtagtgcagaagtggagctgcagagcaagcgtccgtcctttgcagagaagaccgcacagttggagcgcacgctgcaggaagagcacgtgacagtgacacagctgcgggaggaggcggaacggcgggcacagcagcaggctgaagccgagcgagcccgtgaggaagccgagcgggagctggagcgctggcagctgaaggccaatgaggcgctgcggctgcggctgcaggcagaggaggtggcacagcagaagagcctggcccaggccgatgcggagaagcagaaggaagaggcagaacgggaagcccggcggcggggcaaggcagaggagcaggccgtgcggcagcgagagctggctgagcaggagctggagaagcagcggcagctgacagagggcaccgcccagcagcgcctggctgccgagcaggagctgattcgcctgcgggcagagacggagcaaggtgagcatcagcggcagctgctggaggaagagctggcccggctacagcacgaagcgacagcagccacacagaagcgccaggagctggaggctgagctggcgaaggttcgggcagagatggaggtactgctggccagcaaggcacgagccgaagaggagtctcgctccaccagtgaaaagtccaagcagaggctggaagctgaggcagggcggtttcgagagctggctgaggaggctgcccgcctgcgtgctctggccgaggaggcaaggcggcaccgggagttggccgaggaggacgcggcacgccagcgggccgaggcggacggagtgcttacggagaagctggctgccatcagtgaggccacaaggctcaagacggaggcagagattgcactcaaagagaaggaggccgagaacgagcgcctgaggcgcctggctgaagatgaggccttccagcggcgccggctggaggagcaggcagcacagcacaaggcagacatagaggagcgcctggcccagctgcgcaaggcatccgagagcgagctggagcgacagaaggggttggtggaggataccctgcggcagcggcggcaggtggaggaggagatcatggctctgaaggcgagcttcgagaaggccgcggctggcaaggcagaactggagctggagcttggccgcatccgcagcaatgccgaggacaccatgcgcagcaaggagctggccgagcaggaggcagcgcggcagcggcagttggcagctgaggaggagcagaggcgccgggaagccgaggagcgggtgcagaggagcctggcagcggaggaggaagccgcacggcagcgcaaggtcgcactggaggaagtcgagcggctcaaggccaaggttgaggaagcgcggcgcctgcgagagcgagctgagcaggagtctgcgaggcagctgcagctggcccaggaggctgcccagaaacggctgcaggcggaggagaaggcgcacgcctttgtggtgcagcagcgagaagaggagctgcagcagactcttcagcaagagcagaacatgctggagcggctgcggagcgaggcagaggcagcgcggcgagctgctgaggaggcggaggaggcccgggagcaggcagaacgtgaggcagcgcagtctaggaagcaagtggaagaggccgagcggctgaagcagtcggcagaggagcaggctcaggcccaggcccaggcgcaggcggctgcagagaaactgcgcaaggaagcggagcaggaggcggcgcgtcgggcccaggcggagcaggctgcgttgaaacagaagcaggcagccgacgcggagatggagaagcacaagaagtttgcagagcagacgctacggcagaaggctcaggtagagcaggagctgaccacgctgaggctgcagctcgaggagaccgaccaccagaagagcatcctggatgaggagctgcagcggctaaaggctgaggtaacagaggcagcccggcagcgtagccaggtagaggaggagctcttctctgtccgcgtgcagatggaggagctgggcaaactcaaggctcgcattgaagctgaaaaccgggcactcatccttcgtgacaaggacaacacacagcgcttcctggaggaggaggccgagaagatgaaacaggtggcagaggaagctgcacggttgagcgtagctgcccaggaggcagcaaggctgcggcagctagccgaggaggacctggcccagcagcgggccctggcggagaagatgctgaaggagaagatgcaggcggtgcaggaagccacaaggctcaaggctgaggctgagctgctgcagcagcagaaggagctggcacaggagcaggcccggcggctgcaggcggacaaggagcaaatggctcagcagttggtagaggagacacagggtttccagcggaccctggaggctgagcggcagcggcagctagaaatgagcgcagaggctgaacgcctcaagttgcgcatggctgagatgagccgggctcaggcccgtgcagaggaggatgcccagcgcttccggaagcaggctgaagagatcggcgaaaagctgcaccgcactgaactcgctacacaggagaaggtgacattggtgcagactctcgagatccagcgacagcagagtgaccaagatgccgagcgtctgagggaggccattgctgagctggagcgtgagaaggagaagctcaagcaggaggcgaagttactgcagctcaagtctgaggagatgcagactgtgcagcaggagcagatactgcaggagacacaggccctgcagaagagctttctctctgagaaggacagcttgctgcaacgcgaacgcttcatcgagcaggagaaggccaagctggagcagcttttccaggacgaggtggcaaaagcaaaacagctgcaggaggagcagcagcggcagcagcagcagatggagcaggaaaagcaggagctggtggccagcatggaggaggcccggaggcggcagcgtgaggcagaggagggtgtgaggcgcaagcaagaggaactgcagcgtctggagcagcagcggcagcagcaggagaaactactggcagaggagaaccagaggctgcgggagcggctgcagcgcctggaggaagagcaccgagctgcgttggcgcactctgaggagatcgccacctcccaggctgctgccacaaaagcactgcccaatggccgcgacgcacttgatggcccctccatggaggccgagcccgagtacacctttgagggattacgtcagaaggtgccagctcagcagctacaggaagcaggcattctgagcatggaggaactgcagcgtttgacacagggtcacaccacggtggctgagctcacgcagcgggaagatgtgcgccactacctgaagggcggcagcagcatcgcaggattgctcctgaagcccaccaatgagaaactgagtgtctacacagccctacagcggcagctgctcagccctggaacagcccttatcttacttgaggcccaggcagcctcgggcttcctgctggaccctgtccggaaccggcggctgacggtcaatgaggctgtgaaggagggtgtggtgggtcccgagctgcaccacaagctgctgtcagctgagcgtgccgtcactggctacaaggacccttacacaggagaacagatctctctcttccaggccatgaagaaggacctcattgtcagggaccatggcatccgcctgctggaagcccagatcgccacaggtggcatcattgaccctgtacacagccaccgtgttcccgtggacgtggcctaccagcgtggctacttcgatgaggagatgaaccgtgtgctggctgacccaagcgatgacaccaagggcttctttgaccccaacactcacgagaacctcacgtacctgcagctgctggagcgctgtgtggaggaccccgagacaggcctgcgcctcctgccactcacagacaaggctgccaagggtggtgagctggtgtacactgacacggaggcccgtgacgtcttcgaaaaggccacagtgtctgcaccattcggcaagttccagggcaagaccgtgaccatctgggagatcatcaactcagagtacttcacagcggagcagcgacgggacctgctccggcagttccgcacgggccgcatcacggtggagaagatcatcaagattgtcatcacggtggtagaggaacacgagcggaagggccagctctgctttgagggcctccgtgcccttgtgcctgctgcagagctgctggacagtggagtcatcagtcatgaagtctaccagcagctgcagcggggtgagcgctctgtgcgggaagtggccgaggcagacgaggtgaggcaggccctgcggggtaccagtgtcattgccggtgtgtggctggaagaagcagggcagaagctgagcatctatgaggccctgaggagagatttgctgcagccagaggtggctgtggccttgctggaggcccaggctggcactgggcacatcattgaccctgccacgagtgccaggctgactgtggatgaggcagtgcgtgctggcctggtgggtcctgagatgcacgagaagctcttgtcagctgagaaggctgtaacaggctatagggatccctactcgggacagagcgtctcgctcttccaggctctgaagaagggtctcatcccccgagaacagggcctgcgcctgctggatgcccagttatccactggtggcattgtagaccccagcaaaagccaccgtgtgcccctggatgttgcctatgcccggggctacctggacaaagagactaacagggccctgacgtcacccagagacgatgccagagtctaccttgaccccagcacccgggagccagtcacctacagccagctccaacagcggtgccggtctgaccagctgactgggttgagcctactgcccctctcagagaaggccgtccgggcccggcaggaagaggtctactctgagctccaggcccgtgagacattggagaaggccaaggtggaggttcctgtgggcggctttaagggcagggcgctgacagtgtgggagctcataagctcggaatacttcactgaggagcagcggcaggagctgctacggcagttccgcacaggcaaggtcactgtagagaaggtcatcaagattcttatcaccattgtggaggaggtggagactcaacggcaggagagactgtccttcagtggcctccgtgcccctgtgccggccagtgagctcctggcctccaagatcctcagcagaactcagtttgagcagctcaaggatggcaagacatcagtcaaagatctgtcagaggtgggctctgtgcggacactgctgcaaggcagcggctgcctggctggcatctatctggaggactcgaaggagaaagtaaccatctatgaggccatgcgccggggcctcctcagagccagcacagccacactcctgctggaggcccaggcggccactggttttctagtggaccctgtgcggaaccaacgtctgtacgtccatgaagctgtcaaggctggagtggtgggcccggagctccatgagaagctgctgtcggctgagaaggcggtcactggttacaaagatccctactctggcagcaccatctcgctgttccaggccatgaagaagggcttggtcctcagggaccatgccatccgcctgctggaggcccagattgccacaggtggcatcattgaccctgtgcacagtcaccgccttcccgtagatgttgcctaccagcgtggctacttcgatgaggagatgaaccgtgtgctggctgacccaagtgatgacaccaagggcttcttcgaccccaacacccacgagaacctcacgtacctgcagctgctggagcgctgcgtggaggaccccgagacaggcctgcgcctcctgccactcagaggggcagagaagacagaggtggtagaaaccacacaggtgtatactgaggaggagactcggagggcgttcgaggagacgcagattgacatcccaggtggtggcagccacggtggctcctccatgtctctatgggaggtgatgcagtcagacatgatcccagaggaccagcgtgcccggctcatggccgactttcaggctggcagagtgaccaaggagcgcatgatcattatcatcatcgaaatcattgagaagacggagatcatccgccagcagaacctcgcctcctatgactacgtacgccgccgcctcaccgccgaagacctgtatgaggcccggatcatctcccttgagacctacaacctcttccgggaaggcaccaagagcctccgtgaggttctggagatggaatctgcctggcgctacctttacggcacaggatcggtggccggtgtctacctgcctggctctaggcagacgctaaccatctaccaggcccttaagaaggggctgctgagtgccgaggtggcccgcttgctgctggaagcacaggcagccacaggctttctgctggacccagtgaaaggcgagaggctgactgtggacgaggccgtgcggaagggtctggtaggccccgagctgcacgatcggctcctctctgccgagcgagctgtaactggctaccgagacccctacaccgaacagcccatctcactcttccaggccatgaagaaggagctgatccctgccgaggaggcactgaggctgctggatgctcagctagccacaggaggcattgtggacccccgcctgggtttccacctccccctggaggtggcttaccaacgaggctacctcaataaggacacgcatgaccagttgtcagagcccagtgaggtgcgcagctatgtggacccctccacggatgagcgtctcagctacacacagctgctcaagcgttgccgccgtgacgacaacagcggccagatgctgctgccgctctctgatgcccgcaagctgaccttccgcggcctgcgcaagcagatcaccgtggaggagctggtacgctctcaggtcatggatgaggccacagcactgcagctgcaagaaggcctgacctccattgaggaggtcactaagaacctgcagaagttccttgagggtaccagctgcattgctggagtctttgttgatgctaccaaggaacggctgtcggtgtaccaggccatgaagaagggcatcatccgtcccgggacagccttcgagctcctggaagcgcaggcagccaccggctacgtcattgaccctatcaaggggctcaagctgactgtggaagaggccgtgcgcatgggtatcgtgggccccgagttcaaggacaagctgctgtctgctgagcgtgccgtcactggctacaaggacccttactctgggaaactcatctctctcttccaggccatgaagaagggcctgatcctgaaggaccatggcatccgcctgctagaggctcagatcgccaccggtggcatcattgaccctgaggagagccaccgcctgcctgtggaagtggcctataagcgtggtctctttgatgaggagatgaacgagatcctgactgacccctcagatgacaccaagggcttcttcgacccaaacaccgaggagaacctcacatacctgcagctgatggagcgctgtatcactgacccccagactggcctgtgtctcctgccgctgaaggaaaagaagcgggagcggaagacgtcctccaagtcctcagtgcgcaagcgccgcgtggtgattgtggaccctgagacgggcaaggagatgtcagtgtatgaggcctaccgcaagggcctcatagaccaccagacatacctggagttgtcagagcaggagtgcgagtgggaagaaatcaccatctcttcctcggacggcgtcgtcaaatctatgatcatcgaccgccgctctggccgccagtatgacattggtgacgccatcaccaagaacctcattgaccgctcagcactggaccagtaccgcgctggcacactttctatcaccgagtttgccgacatgctctcaggcaacgctggtggcttccgctcccgctcctcctctgtgggctcatcttcctcctaccccatcagttctgctgtccctaggacccagctagcctcctggtctgatcctactgaggagactggcccagtggccggcatcctagacacagagactctggagaaggtgtccatcacagaggccatgcaccgcaacctggtagacaacatcactggccagcggttgctggaggcacaggcctgcaccgggggcatcattgaccccagcactggtgagcgcttcccggtcactgaggctgtcaacaagggcctggtggacaagatcatggtagaccgtatcaatctggcccagaaggccttctgtgggtttgaggacccacgcaccaagaccaagatgtcagctgcccaggccctgaagaagggctggctttactacgaggcaggccagcgtttcctcgaggtgcagtacctgacgggtggtctgattgagcctgacacacctggccgtgtgtctcttgatgaagccttgcaacgtggcactgtggatgcccgcacagcccagaagctgcgtgatgtcagtgcctactccaagtacctcacgtgccccaagaccaagctcaagatctcttacaaggacgctctggatcggagcatggtggaggagggcacagggctgaggctgctggaagccgcggcacagtccagcaagggctactacagcccgtacagtgtcagtggctctggctctactgctggttcacgcactggttcacgcaccggctccagggccggctcccgtcgtggcagctttgatgccactggctctggcttctccatgaccttttcttcttcctcctactcttcctcaggctatggccgccgctatgcctcagggccttcagcctctcttgggggccctgagtctgcagtggcctgatcccccagcctgtatcctgccttcccgctctgcatgtcgccaggctccccgtggaggcgctggggtcttttctttcttcttctttttttttttttttttaacatttaaaggtgtcttcctcccaagcggtgcctaaaatctaaccaaaaagaccagaataacacattaatatatatatatatatgcgatgtccagacagcctgtgtcttgggaaacagggctggcccaggcccagtgaccactccactctccttgggcctccctaatcctttctacctgccactcaccacagctaggtgccttggagaatccagagctgggcactcagcccactactcctgtctctcctgggaggattgccatctgggaaaggcccccagacctctaagccaaccccactggatgtctacctgctggtcckagctgctgaggggaactggggackgtcctgtgagcagacagctgttgagtctctkgaggcctctgccctgagccagctgcttctccccagtgtatacctgaatattcagtgggttttgctggcaaaggmamgaksccaggccaaccatctcttccagcctgcccakagaagcccyttccccatgggaagataaggcctggtcctggccccagcctcccgcctggctcctgcagctgccattggagctgwgctttgtagctcactaccccatacttattcccttgagacctgagcctctgcttcagccttccagcctcaactccccttgtaagtgccttctgtgtccttgtacccaggccctaaagacccagacccakggcaagagatggacattctggctgggcggggctggagggttytgcagatctgagaattycttytccaraggcccagggtyttmaagcctktggwacccctytgggtgstgytgcmcaccccactcccarggagccctggccagcccarctgtgstaacataagtamttggscagtgacactytcccttccctggccttgrdggctcctacccctgcctycaccctbtgagkgagstttgcatgttccactaaccttragctggtgacaggtggaratgccaggcagaacactaacctgvccatgggcgggggccctgcggtgtccgcccctcwataaaagcaattccmmccttmaaaaaaaaaaaaaaaaaa

SEQ ID NO: 307 - DNA, 2256 bp, Rattus norvegicus
ggggctcgtggcgtgaagaaggaggacgagtgagacccgggcgcgacggggcgcgtgcgggagggtcggcggcgggacggcgatggcggatatcgataaactcaacatcgacagtatcatccaacggctgctggaagtgagagggtccaagccaggcaagaatgtccagctccaggagaatgaaatccggggactgtgcttgaagtctcgggagatcttcctcagtcagcctatccttttagaacttgaagcaccactcaagatatgtggtgacatccacgggcagtactatgatttgctccgtctgtttgaatacggtggctttcctccagaaagcaactatttgtttctcggggactatgtggacaggggcaaacagtcactagagacgatctgcctcttgctggcctacaaaatcaagtatccggagaacttttttcttcttagagggaaccatgagtgtgccagcatcaatagaatctacggattttatgatgagtgtaagagaagatacaacattaagctgtggaaaacgttcacagactgttttaactgcttaccgatagcagccatcgtggacgagaagatattctgctgtcatggaggtttatcacsagrtcttcaatctatggagcagattcggcgaattatgagaccaactgatgtaccagatcaaggtcttctttgtgatcttttgtggtctgaccccgataaagatgtcttaggctggggtgaaaatgacagaggagtgtccttcacatttggtgcagaagtggttgcaaaatttctccataagcatgatttggatcttatatgtagagcccatcaggtggttgaagatggatatgagttttttgcaaagaggcagttagtcactctgttttctgcacccaactactgtggcgagtttgacaatgcgggcgccatgatgagtgtggatgagaccctcatgtgctccttccagattttaaagcctgcagagaaaaagaagcccaatgccacgagacctgtcacaccgccacggggtatgatcacaaagcaagcaaagaaatagatgtcacttgacactgcctagtgggacttgtaacatagcgtacataaccttcctttttaaactgtatgtgtgctggtcagcttgcccaggtagacctgtcgggccctcccttctccattttgattattgctggcacttgctggttatagcagcaagtgaagcatttcattctcaagaaagcgtttgtttttgtttgtttttaacctctgttccctttgtggacagctctgatgatggtgttaagctgtacaccttggcagtttatcctgtcccaagtgaagcatttcattctcaagaaagcgtttgtttttgtttgtttttaacctctgttccctttgtggacagctcggatataaagagagccctagggtgcgtgagtctgtacatgtaattgtcataaatgcattctgttgatacaaaccactgtgaacagtttttccaagtttgtttgacagggactgcttwccstcactgtctcatcctgtacaaactagtgtctgcagctgtggcagcaggagcaacctgccaccytgccacccacaytgcccaggctgtctgaagcacactccctcccaytgcacacttaactgacgattaaagccattctkttcaatgtctgtgattccttcctaaagccaaagtttytgttsgactgtattggcacaccytggacatgaggtggccagggcmccaaggctgckkgcacagrccgmctyhgtggggactcrgmwmgargcaggttwtyytaactagcaatagtgatgtastgctgrgtaagctattaatggtggaagytaatgvgacattgyacagtgcccatatagtmtattcastgagtaatctktttacagttggatcaggcctgaacccgtccattcagaaagctkcaaattatrgaaacaacactrtcstatacgagtgatcgataatgctttctttggvdacattctdtattctgckgtgacattgaggcttataaakcaaaaggaactaacttkccgtccaccggtttwtmcagaactcmcagtatytatgacttttttaaactacgacctgytaaaatgaatctgtthccacaratgccgtgtacaatgccatgtgctaagaatgatttcavactwmttaaatgcgagcttsyyrwcctgwmhmwraaaaaaaaaaaaaaamwcgakkgsgggcccgswascywattcscyywatag

SEQ ID NO: 308 - DNA, 985 bp, Rattus norvegicus
  misc_feature (51)..(51): n is a, c, g, or t
attcrgcrcsmskagsgmsywmvrwttcsgsyhydrkkrghhbycgrbdynhvrvrttyvghagdsscggttggtgggyamsarctgagctamgrydmwgsggaatgtgctsgcccttcgtcagaytgcccagaggaccatcagcaccacttcrcgaaggcattttgaaamcaaagttccagagamgcaaaagctgtttcaggaggataatgggatgccagttcatytgaaaggcgggacatytgatgccctcctttacagagccmcaatgsttytgacagttggtggaacagsgtwtgccatmtmtatgttagctatggcwgsattccccaagaagcagaactgacrtcgtcatcccagtctccacatkgttcagtttcattcaytgcgcgatggrccaggaacctgrtgaataactkractcttctatggggatcamtatttattgatgtgkattaaytgbcmccawtaaascagtycttwmccmwwwrraaaaaadaaaraaamaraaaaaataatccaaaaagaacaagatgaaacaacagaagaacaatatacgaaaaaagggaaaagaactcaagggggggcccggaacccaatcggcccaatagggagtcgaataagaaacaacgggccgtcggtcaccaacgcccgagaccgggaaaacccggagatgcccaactaagcggcctggagacatccccctatcgccagtgcgtacaacagaaggccgaccgatcgcctcccacagttgccgacgtaggggatgcgacggaagccacattgggacgcggttaatgggcagacgcactttaccaggcgaagacaccaatagaaacccaggggggtctgtcaaccaaagggccagggaccgggcggtacactggggcgcaccgcaagcgcgagggccctaacagacagcagaacagcgaggcaggcacacacaacgcacgcagagcaggagcggcacgaaacgcgcagagag

SEQ ID NO: 309 - DNA, 1398 bp, Rattus norvegicus
  misc_feature (1377)..(1377): n is a, c, g, or t
gggctctttctcctcagccttggtcaccaccccagctctgggacaacaagttgaaaatggcacsctccatctcacgggggctcctgcttctggcagscctgtgttgcctggcccccagcttcctggctgaggatgcccaggaaaccgatacctcccagcaggaccagagtccaacctaccgtaagatttcttcaaacctggcagactttgccttcagcctataccgggagctggtccatcaatccaatacatccaacatcttcttctcccctatgagcatcaccacagccttcgccatgctctccstggggagcaagggtgacactcgcaaacagattctagagggcctggagttcaacctcacacagatacctgaggctgacatccacaaggccttccatcacctcctccaaactctcaacaggccagacagtgagctgcagctgaacacaggcaatggcctctttgtcaacaagaatctgaagctggtggagaagtttctggaagaggtcaagaacaattaccactcagaagccttctctgtcaactttgccgactcagaagaggctaagaaagtaattaatgattatgtagagaagggaacccaaggaaagatagttgatttgatgaaacagctggacgaagacacggtttttgccctggtgaattacattttctttaaaggcaagtggaagaggccattcaatcctgagcacactagggatgctgactttcacgtagacaagtccaccacagtgaaggtgcccatgatgaaccgcctgggcatgtttgacatsymctattgcagcacaytgtccagctgggtgctgatgatggattacctgggcaacgccactgccatsttcctcstgcccgatgatggcaagatgcagcatctggagcaaactctcaccaaggatctcatttcccggttcbtgctaaacaggcaaacraggtcagccattctctacttccccraactgtccatctctggaacctataacttgaasacactcctgrrctcactgggcatcacccgggwvttcrrcamtgatgmtgatctctctggamtcacagaggatgcccccytgaagcttagccaggctgtgcataaggytgtgcygascttagatgagakkggmacagaggytgcagkarcyactgtkkyrragsmmgycyscatgtytbtgccccctcaaktkaagttsgrccaccctttcatyttcatgatagttgaatcagaaaytcagrgccccctytttktgggaaaagtgwtagatcccacacgttaatcactgtcctcagaagtcacatcccttytggatcgggtccccttcctaataatwttaaactcaggytggcytggcctgatgcttntgcaaaaaaaaaaaaaaaaaa

SEQ ID NO: 310 - DNA, 1532 bp, Rattus norvegicus
  misc_feature (1222)..(1222): n is a, c, g, or t
tgaacccgcaggtttgcaccggaggctctcgcgggggcctcgctggccctgggcggggactcgcgggctgaggacgctcctgtgtccccagaatcctgcagaaggacagcgccatgtccacgttcaggcaggaggacgttgaggaccattatgagatgggagaggagcttggcagcggccagttcgccatcgtgcgcaagtgccagcagaagggcaccggcatggagtacgcggccaagttcataaagaagcggcgcctgccgtccagccggcgcggtgtgagccgtgaggagatcgagcgcgaggtgagcatcctgcgcgagatccgccaccccaacatcatcacgctgcacgatgtgttcgagaacaagacagatgtggtgctgatcttggagctggtgtccggcggcgaacttttcgactttctggctgagaaggagtcactgacagaggatgaggccacgcagttcctcaagcagatcctggacggtgtccactacctgcactccaagcgcatcgcgcactttgacctgaagccggagaacatcatgttgctggacaagcatgcagccagcccacgcattaagctcatcgactttggcatcgcgcacaggatcgaggccggtagcgagttcaagaacatctttggcacgccagagttcgtcgcccctgagattgtaaactatgaaccacttggcttggaagctgatatgtggagcatcggcgtcatcayctwcwtcmkcctgagcggsgcdtccccattcctgggggagaccaagcaggaaacgctgacaaacatctcggctgtgamctatgactttgatgaagagtacttcagcagcaccagtgaactggccaaggacttcatccgaaggctgctggtcaaagatcccaagaggaggatgaccatcgcacagagcctggagcattcctggatcaaggttcgccggcgtgakgacggcgcccggaagccagagcgacgccgactgcgcgcggcgcgcctgcgcgagtayagtctcaagtcgcactcaagcatgccgmgaaacacgagctacgccagcttcgagcgcttctcgcgcgwgytggaggacgtggcgscgrcgkagcagggvytgcgcgagytgcagcggvsccgvcgscagtsccgsswgmgcgtgtgcgcgctgcrcgygvmtgcsgavcarcgsvaggcgygctbccgsgaysggagyscygsshtagnmcgcgammtgygacvcctgcrcacggagytgggtcgcaccgaggctmtgcgcacgcgcgcgcaggaggwggcacgggcagcgmtyktgggcgctggtgscctgaaacgtcgcctgtgtcgccttgagaaccghtacgacgcgctagccgcacaggtggctgytgaggtgcagttcgtgcgcgatytggtacgcgcgytggagcaggagcggytgcagkccgagtgcggcgtgcgytaggctgcgacacccccagatctcsgsccmtccccagaataaagstactttccacgcamaaaaaaaaaaaaaaaa

SEQ ID NO: 311 - DNA, 4870 bp, Rattus norvegicus
cgccgcgtccgggaactgccagcttcggagaggcgccgcccgcaaggacacctctccgtcccgcctggtcctcaactcccggcccgagctcgacgcgagccaggagtccggacgtctctgcgcgcggcgcagcagccagagctgtccccactgcccccgctcggagccaactccgtctcggacctgggactctggactctgattcgtagctacttctcacctcggggctgcgctgtctccccgcyassmkkcccgttgtcctccaccgctcaggacgggggtgccacgatgtcccgctgctgcgcagggccctgggcctccctcgacgtgtgaccctagcctggtccccctgcttggccgtccgccctctccttggagacccccggcccggcccccgggggaagaggaakaakacgacgaagccgagggggggatktccggctccaaaagcgtgagccccccgggstacgctgcacagacagcagcgtcgcccgcgccccggggaggcccggagcatcgcgccgcgtggggagaagccgattccygcgccaatggctacccccacgcccccggggratcgacccgcggctccaccaagcgatctgggggagcggtgaccccacaacagcagcagcgcytggctagccgttggcgcggtggcgacgacgatgamgaccctccactaagcggtgacgaccctctggtcggaggcttcggcttcagcttccgttctaagtcggcctggcaggagcgcggcggcgacgacggcggtcgcggcagcaggcggcagcggcggggcgcggctggagggggcagcacccgggcgccccctgcgggcggcagtggcagttcggcggcggccgcagcagccgcaggtgsmacggaggtgcgcccccgctcggtggaggtgggcytggaggagcgtcgaggaaaaggccgagcggccgaggagctggagcccggaactggcaccgtcgaggatggagacgggtccgaggatggaggcagttccgtggcgtcaggctctgggaccggcacggtgctgtcgttgggcgcctgctgcctggccttgctgcagatattccgctctaagaagttcccgtcggacaaactggagcgtctgtaccagcgctatttcttccgcctgaaccagagcagcctsaccatgctcatggscgtgctggkgcwcgwgtgcctsgtsatgctcgctttccacgcggsacggcccccgctccaggtagtctacctggccgtgttggsagctgctgtgggcgtgatycttatcatggctgtgctctgcaaccgtgcagycttccaccakgaccasatggscctggcctgctatgcgctcattgcagtggtgctggccgtccaggtagtgggcctgttgctgccacagccacgcagcgcctycgagggcatctggtggaccgtgttcttcatctataccatctacaccctgctgcctgtgcgcatgagggctgcggtgctcagcggggtgcttctgtcggctctccacttggccatctctctgcacaccaacgcccaggaccagtttctgctgaaacagcttgtctccaacgtcctcatcttctcttgcaccaacatcgtgggtgtgtgcactcactacccagccgaggtctcccagagacaagccttccaggagacccgggagtgcatccaagctcggctccactcacagcgggagaaccagcaacaggagcgtctcctgctgtctgtccttccccgtcatgttgccatggagatgaaagcagacatcaacgccaaacaggaggatatgatgttccacaagatttacatccagaaacatgacaatgtgagcatcctgtttgctgacatcgaaggcttcactagcctggcatcccagtgtactgcccaagaactggtcatgaccctcaacgagctcttcgcccgctttgacaagttggctgcggagaatcactgcttacggattaagatcctcggggattgttactactgtgtctcggggctgcctgaagccagagctgaccacgcccactgctgcgtagagatgggaatggacatgatcgaggccatctcgtcggtccgggaggtgacaggggtgaacgtgaacatgcgtgtgggaattcacagcgggagagtacactgcggtgtccttggcctcagaaagtggcaattcgacgtgtggtctaacgatgtcacactggccaaccacatggaagctggcggcaaggcaggccgcatccacatcaccaaggccacactcaactacctgaacggggactatgaggtggagccaggctgtggtggtgagcgcaatgcctacctcaaggagcacagcatcgagaccttcctcatcctgcgctgtacccagaagcggaaagaagagaaggccatgatcgccaagatgaaccgccagagaaccaactccattggacacaatccgcctcactggggagctgagcgccccttctacaaccacttgggtggcaaccaggtgtccaaggaaatgaagaggatgggctttgaggaccccaaggacaagaatgcccaggaaagtgccaaccctgaggatgaagtggacgagtttctgggtcgagccatcgatgccaggagtattgacagactgcgatccgaacacgtccgaaagttcctcttgacctttagggagcccgacttagagaagaagtactccaagcaggtggatgaccgatttggtgcctatgtggcctgtgcctcgcttgttttcctcttcatctgctttgtccagatcaccattgtgccccactccctgttcatgctgagcttctacctgtcgtgtttcctgctactggccttggtggtgtttatatctgtgatctacgcctgtgtgaagctcttccctactcccctgcagacactctccaggaagatagtgcgatccaagaagaacagcaccctggtcggggtgttcaccatcaccctggtgttcctctcggcttttgtcaacatgttcatgtgcaactctaagaacctggtgggttgcctggcagaggagcacaacatcacggtgaaccaggtgaacgcatgtcatgtgatggagtcggccttcaactacagcctgggcgacgagcagggcttctgtggcagcccccagtccaactgcaacttcccagagtacttcacctacagcgtgctgctcagcctgctggcctgctccgtgttcctgcagatcagctgcatcgggaagctggtgctcatgctggccatcgagctcatctacgtgctcatcgtagaggtgcccggtgtcacactctttgacaacgctgaccttctggtcaccgccaatgccatagacttcagcaacaacgggacctcccagtgccctgagcatgcgaccaaggtggcgctgaaggtggtgacgcccatcatcatctctgtcttcgtgctggctctgtatctgcatgctcagcaggtggaatccactgctcgccttgacttcctctggaaactgcaggccacagaagagaaggaggagatggaggagctgcaggcctacaaccggcgcttgctgcacaacattctgcccaaggacgtggctgcccacttcctggcccgggagcggcgcaatgatgaactgtactaccaatcctgcgagtgcgtggctgtcatgtttgcctccatcgccaacttctccgaattctacgtggagctagaggccaacaatgagggcgttgaatgcctacggctgctcaatgagatcatcgcagactttgatgagatcatcastgaggatcggttcaggcagctggaaaagatcaagaccataggtagcacctacatggctgcctctggcctcaacgactccacctatgacaaggcaggcaagacccacatcaaggctcttgcagacttcgccatgaagctgatggaccaaatgaagtacatcaatgagcactccttcaacaacttccagatgaagatcgggcttaacattggacctgtagtggctggggtcattggggctcgcaagcctcaktatgacatctggggcaatacagtaaatgtggccagccgtatggacagcactggggtgcctgaccgcatccaggttactacagatatgtaccargtgctggccgccaacacataccagctggagtgccggggtgtggtcaaggtcaagggcaagggtgagatgatgacctacttcctcaatggagggcctcccctcagttagcagataccagcagcatcctggcctccagaggattgaacagcttctctgtgcaccatgggcagatagggcctgtgcccaggctcacagctgtgctggtaaaatttctacttggactcagaagcaacttctgcctttgctggtgggcatgsmttttggcctaggccagggtgccagcgtcctgcgagcaccgagctgaccaaagatgttgcccytggcagaagactgtagactcgagctgaccyytgaggttytgacaagtgytghtaytgcacggtggatgtgytaccggagcacagcytggcacagagtggctgschtgaggggagsccttggtywtgaaggggaggtaggcaagcttgaagctggcytgggggatgtccatggacctcatgggtctgctttccactgtggagaggctatgccccctcacaacrttttgggggcaggaactgggaragatgcggcctgtgccattctctcctcacacctccatgcacacagacaatgccctgtacgggaaacaggactgttgataagggggaggcaagaggacaccaggcaaggagcagtggctytgagcaaaagaaaatatttattaaataaaacaaaagttttctctgcmmwwmwwwwaaaaaaaaaaaaaaaaaa

SEQ ID NO: 312 - DNA, 1024 bp, Rattus norvegicus
ctcgcagcagagcaagatgtgtcatcagaagttaaccttctcctggtttgccatggttttgctggtgtctccactcatggccatgtgggagctggagaaagatgtttatgttgtagaggtggactggcgccccgatgcccctggagaaacggtgaccctcacctgtgacagtcctgaagaagatgacatcmmctggacctcagaccagagacgtggagtcataggctctggaaagaccctgaccatcactgtcagagagtttctagatgctggccaatacacctgccacagaggaggcgagactctgagccactcacatctgctgctccacaagaaggaaaatggaatttggtccaccgagattttaaaaaatttcaaaaataagactttcctgaagwgwgaagcaccaaactactccggacggttcacctgctcatggctggtgcacagaaacacggacttgaagtttaacatcaagagcagcagcagttcccctgagtctcgggcggtgacatgtggassagcatctctgtctgcagagaaggtcacactgaaccaaagggactacgagaagtactcagtggcgtgccaggaggacgtcacctgcccaactgccgaggagaccctgcccattgaactggtggtggaggcccagcagcagaataaatatgagaactacagcaccagcttcttcatcagggacatcatcaaaccggacccacccaagaacctgcaggtgaaacctttgaagaactctcaggtggaggtcagctgggagtaccctgactcctggagcactccccattcctacttctccctcaagttcttcgtccgcatccagcgcaagaaagaaaagacgaaggagacagaggaggagtgtaaccagaaaggtgcgttcctcgtagagaagacctctgccgaagtccaatgcaaaggggcgaatatctgcgtgcaagcgcaggaccgctactacaattcatcatgcagcaaatggacatgtgtaccctgcaggggccgatcctaa

SEQ ID NO: 313 - DNA, 2148 bp, Rattus norvegicus
atggtgaagctcgcaaaggctggtaaaaatcaaagtgaccccaagaaaatggctcctcccccaaaggaggtagaagaagacagtgaagatgaggaaatgtcagaagatgaagatgatgacagcagcggagaagaggttgttattcctcagaaaaaaggaaaaaaggctaccacaactccagcaaagaaggtaatggtttccccaacaaaaaaagtcgcagttgccacaccagccaagaaagcagttgtcacccctggcaaaaaggcagcagctacaccagccaaaaaggcggttgcaccagccaaagcagtagcaacacctggcaagaagggaaccacaccaggcaaggcattggtagcaacccctggtaagaaaggagcagccaccccagccaagggagcaaagaacggtaagaatgctaagaaggaagacagtgatgaggaagatgatgatgacagtgaagaggaggatgaggaagatgaggatgaagatgaggatgaattcgagccaacagtgatgaaagcagctgctgccgcccctgcctcagatgaagaggaggatgatgaggaggacgatgatgaagacgacgacgaggaggatgaggatgaggatgaagatgactccgaagaagaagctatggagactacaccagccaaagggaagaaagcccctgtgaaagctgttcctgtgaaggccaagagcacagctgaagatgaagatgaagaggaggatgatgaggatgaggaggatgacgacgaggaggaggaggacgaggatgatgatgaggaggaagatgaggaggaggaggaagaagaagaagaggaagagcctgttaaagaagcacctggaaaacgaaagaaggaaatggccaaacagaaagcagctcctgaagccaagaaacagaaagtagaagctacagaaccaactacgtcattcaatctttttgttggaaacctgaacttcagcaaatctgctcctgaattaaaaacgggcatcagtgaccttttcgctaaaaatgatcttgctgttgtagatgtcagaattggtgtgtctaggaagtttggctatgtggattttgaatctgctgaagacctggaaaaagctttggaactcactggtttaaaagtctttggcaatgaaattaaattagaaaaaccaaagggaaaagacagtaagaaagatcgagatgcaagaacacttctggcaaaaaatctgccttacaaagttactcaggatgaattaaaagaagtatttgaagacgctgtggagatcagattagtcagcaaggatggaaagagtaaagggattgcttatattgaatttaagacagaagctgatgcagagaaaaccttcgaagaaaagcagggaacagagatagatgggcggtctatttccctgtactatactggagagaaggggcaaagtcaagattacagaggtggaaagaatagcacttggagtggtgaatcaaaaacactggttttaagcaatctgtcctacagtgcaacagaagaaacccttcaggaagtatttgagaaggcaacttttattaaagtgccccagaaccaaaatggcaaatcaaaagggtatgcatttatagaatttgcttcatttgaagatgctaaagaagctttaaattcttgtaataaaagggaaattgaaggcagagcaatcagactggagttgcaaggacccagaggatcacctaatgcaagaagccagccgtccaaaactctgtttgtcaaaggtctgtctgaggataccacagaagagacattaagggagtcattcgacggctctgttcgggcaaggatagtcactgaccgggagactgggtcctccaaagggtttggctttgtagacttcaacagtgaggaagatgccaaagctgccaaggaggccatggaagatggtgaaatagatggaaacaaagttactctggactgggccaaacctaagggtgaaggtggctttggaggccgtggtggaggccggggcggctttggaggccgaggtggtggcagaggaggccgaggtggatttggtggcagaggccggggaggctttggagggcgaggaggcttccgaggaggcagaggaggagggggagaccacaagccacaaggaaagaagacgaagtttgaataa

SEQ ID NO: 314 - DNA, 2225 bp, Rattus norvegicus
cgataccttgttccccagctgggcgtccatcaatagccccaaccatgcagggagactgggtgctgctgctgcttttgggtctcaggatacatctgtcctttggtgtcatcccagtggaggaggagaacccagtcttctggaatcaaaaggcgaaggaggccctggatgttgccaaaaagctgcagcccattcagacatcggccaagaacctcatcctcttcctgggagatgggatgggggtrcccacagtgacagccaccaggatactaaagggacaactgggtggtcatctaggacctgagacacccctggccatggaccacttcccattcacggctctgtccaagacatacaacgtggacagacaggtcccagacagtgcaggcacagccaccgcctatctctgtggggtcaaagccaactacaagaccatcggtgtgagcgcggctgctcgattcaaccagtgcaacagcacatttggcaacgaggtcttctcagtgatgcaccgtgcaaagaaagcagggaagtctgtgggcgtggtgaccacgaccagagtgcagcatgcctctccagccggcacctacgcgcacacggttaaccgagactggtactcggatgcagacatgccttcctccgccctgcaggagggctgcaaggacatcgccacacagctcatttccaacatggacattgatgtgatccttggtggaggccgaaagtycatgtttcccaaggggacaccagaccctgaatacccaggtgactctgaccagtctggagtcaggctggatagtcggaacttggtggaggagtggctggcaaaataccaggggacccggtatgtttggaatcgagagcagctcatgcrggcctctcaggacccagcagtgactcgcctcatgggcctctttgagccaacagaaatgaaatatgatgtcaaccgaaacgcctcagcagacccctccctggcagagatgacagaggtggccgtgcgcctgctgagcaggaatccacaaggcttctacctctttgtagaaggaggtcgtattgaccaaggccaccatgcgggcacggcttacctggcactgactgaggctgycatgttcgactccgccatcgaaaaggccagccagcttaccaatgagaaggacacgctaacgctcatcactgcggaccactcccatgtctttgcttttggtggctatacacttagggggacctccatctttggtctggccccactcaatgcccaggatggcaaatcctacacctccattctctatggcaacggcccaggttatgtgcttaattcaggcaaccggcccaatgtcactgatgccgagagtggtgatgtcaactacaagcagcaggcagcagtacccctgtcgtcagagacccacggtggggaggacgtggccatattcgcgcgtggcccacaggcgcacctggtgcacggagtgcaggaacagaactacatcgcgcacgtcatggccttcgcaggctgcctggagccctacaccgactgcggtctggcgccccctgcagacgagaacagaccaaccaccccggtccagaacagtgccatcactatgaacaatgtccttctgtccctgcagctcctggtcagcatgctgctgctagtcgggacagccttggtggtgtcctgatggtcaggtcccccactgggctcctccctctgctggttgctccccacgaccccccatagattcctgtgccctgtcagtcctgagttcatcattctctacccaagggtctcaacgctggcctttgcaccccaacttggttgttctcttatccagatgctgaaacattatcccggcccacagttctaagggccacctctgggaatatactctgagatttgctttataactctgggcttccgcttctcaactgcagtgggaggtaccgaacggtatccagaaagctacagtttgtggctgtcccagactccccttcaatccatcacccttcacagggaccaagtaactcacattttcaggccttagcttgttcctatgaaaggaaatctcaaaagtccaggagactgtgggttctcaagcaagcagcgcagagcagccttgggcccccacccctggtccatctcaggctgcatatagaaaccggacaaagaatattaccgactcttgtccccagtccttgaagagacacaatgacaacaaaattaaatgcttatataaggt

SEQ ID NO: 315 - DNA, 2606 bp, Rattus norvegicus
gttgctgtcggtcccagctcctcgtctgttgcagccccaccaccagaccagccatgcagggcgcctgggtgctgctgctgctgggcttcaggctacaactgtcccttagcgtcattccagtggaggaggagaacccagcattctggamccagaaggcagccgatgccctgaatgttgccaagaagctgcagcccattcagacgtcagccaagaacctcatcatcttcctgggtgatgggatgggggtgsccacagtgacagctactcggatcctaaagggacagttggaaggtaatctaggacctgagacacctctagccatggaccacttcccatatatggctctgtccaagacatacagtgtggacagacaggtcccagacagtgcaagcacagccaccgcctacctatgtggggtcaagacgaactacaagaccattggtgtgagcgcggcagcacgatttgaccagtgcaacaccacatttggcaacgaggtcctctctgtgatgtatcgtgccaaaaaagcaggaaaatccgtaggcgttggtgaccaccaccagggtgcagcacgcatctccagcaggcacctatgttcacactgtgamcmgcaattggtacggggatgcggatatgcctgcctctgccactgcaggagggctgcaaggacattgctacacaactcatctccaacatggacattaacgtgatccttggtgggggccgaaaatacatgtttcctgcaggaaccccagaccctgagtatccgaatgatgttaatgagactggaaccagactggacggcaagaacctggtgcaggaatggctgtcaaagcaccagggttcccagtatgtttggaatcgccaagagctcattcagaagtccctggatccatcagtgacgtatctcatgggcctctttgagcctgtagacacaaaattcgagattcaacgagaccccctgatggacccatctctgaaggatatgacagaggcagccctgcatgtgctaagcaggaaccccaaaggcttctatctatttgtggaggggggccggatcgaccgcggtcaccatctgggcacagcttatctggcgctgactgaagctgtgatgytcgactcagccatcgagagggccagccwscwmrctagtgagcaggacactctgaccatagtcactgctgaccactcccatgtcttctcctttggtggctacacacttcgagggacctccatctttgggctggctcccctcaatgctctggatggcaagccctacacctccatcctgtatggcaatggcccaggctatgtcggtacaggggaaagacccaacgtcaccgatgctgaaagccatgacccatcgtaccagcagcaggctgctgtgccggtgaagtcggagacccacggtggggaaggacgtggctatattcgcacgtggcccgcaggcgcacttgctacacggagtgcaggaacagaactacatcgcgcacgtcatggccttcgcaggctgcctggagccctacaccgactgtggcctggcgccccctgcagacgagaacagaccaaccaccccggtccagaacagcaccactaccaccaccaccaccaccaccaccaccaccaccaccactaccacccgggtccagaacagcgccagtagcctgggtccagccaccgssccactggccctggcactactggccaaggcgctgatgctactactgggggctcctgctgatttctaaactccaactcagccagggtccacccaccaggtgtctgctctctcaccaggtccttctgctccctgacctcccactaatgtctcctcatggtcccctccccaactgcgcccttacccagtgctccctgcatgctggctgtgggctctaccccaggatcctctcgctttcttctagtggcctcaacgcttagcctacttagggttgcagcttctaggcccctgccaggcattcacaagggggtgatcacctctgaggtagcagccagcctcagatcccacagagctagctccttcccagacagcatgaccaccacagctctgaggctcggactccacgggacagtcccaactctccttttgccttcatccaccagccccatgcaacacaggtacccagcaataatttgtgaaggagtaaacatgcatctacccattgatcctctcttcaggcttggatccatccctgcaggctctggacccaggactaagacataaggaagaggctagcttctcatcactcctcagtctagtctgatggcaggacgaaggttgctgtgctggtttcccctagccagcctttgacacagtccttcctcaccgtcactgggccaggtccacactcagaacccttcatgggcacagcacaccaatccatagagcggacatgtctggagtccttcagcccttccacgtctttcactcagctaggaaatgcaaggagctgttatcccccgccaccactcccaggtctcaggtcatctcaggctgcacctaaatttctgaaagcccctcacttcctaggtctacattcccctgggagagacagaccaataaagtattgtgcaatacgaaaaaaaaaaaa

SEQ ID NO: 316 - DNA, 7933 bp, Rattus norvegicus
ccgaattctcttaaaagaacaaataacggggctggggatttagctcagtggtagagcgcttacctaggaacgacgaggccccgggttcggtccccagctccgaaaaaaagaaccaaaaaaaaaaaaaaaaaagaacaaataacaaagtttgtgtgtgtgtgtgtgtgtatttctatttctttcaaagagaaagtgcataagtaaaagagaattacgaactagctactggaaaggctggtatgctaagccaaggctgagttcccaagctgccaaaagaacagaaggtagagaagacaatgatctttgaggctccttcaacagtgactcatgcctgctgggaggtcctcacaggaaccatttccttttaagtggtgcaaggaaaaaagagagacaactccaatgcagcaacccctagactcatttcaaagaaaaaaatgttgcacgtaaggtgccaaattttctcatgttatttttaaaccaatatcttttttaaaatactctgatttaataatggctatcaagccattctgaagagctttaagcatgaaaggtgtgtgtattgactgacacctgaaatttcaaatcttcctcaacattttggagcataacttgtttgttctttagtgactaatccctactctttcacatacagtacaccaatgcatttgtttacatattactaaacagcacttggccatgccctgcccagcatacattctgatggttcaggggtgctggtttttaactgtccaaagtggagaaaaagaaaaatagtgttttgaggaaaagcttctctacttccctccctatttgcctgaataagaattgtaaccctggagctggagagatggctcagtggttaagagtgctaactgttcttctacaggtcctgagttcaaatcccagcaaccacatgatgactcacaaccatttgtaatgaggtctgatgcccacttctggtgtgtttgaagacagctatggtgtacttatctttttgatagataaatctttttaaaaaaggattagccttgttttgacatcactaatcttatcacaagcttcacaagaactttgtcagctttggaatgaccttaatcaagtattagccctgtactgtaattgccagctcgaaaaaacacgttttaacgttgagcaagccatgctgtgcttaataagggctggaagggaaacaaacttggaaccacagcaggttgcgataaccggtagcctaactttatttgactgtctcagtttttataaaaaagaagatagagtcattaggtccctgactcgagatagggaatatgaagtttgcagttagggtgctcaattggagatgccttttcaatgtttctgccttcccaaacaaaactgccagggacgggcttaaacattactgccaagggacatccttggtttatttaattcactctgttttggacatcttacctgagtcctcacaaagaaaccatcaattaatttaataacacgatagaagtaaaagcgaacgagaaatggggatatctgcttttctgccaataagcctttcgcgggaaagaaggggttggggatgacaatgaggttttggcaggacttaaacctggtctgtctttaggagacaaagcgcgcaaagaatagctgaggtttgctagccaatgaaaacattcagattgcaatgactcatccttgttgccccaccccctttcaaggacctgattcgaaaacccctcctaacgcctgtggtcttcaatcaggtccgcagaaggtctatttaaagggaagcttgctttcttcccttgacttttactcacaaccatgtctggacgtggtaaaggtggtaaagggcttgggaaaggtggcgctaagcgtcatcgcaaagtcctgcgcgacaacatccagggcatcacaaagcccgccatccgccgcctggcccggcgcggaggagtgaagcgcatctccggcctcatctacgaggagacccgcggtgtgctgaaggtgttcctggagaacgtgatccgcgacgccgtcacctacacggagcacgccaagcgcaagacggtcactgccatggacgtggtctacgcgcttaaacgccagggccgcacactctacggcttcggtggttaaactgctaatgcgctttccttagctgttgcaaaaggcccttttcagggccacccacgaactcattcaaagggttgttcacttttcgaagcttskttgctctggagcatgcgaggtaccatataagcggtgtcctatgctatactctggttggatgttcacagctagaaagtaagactgtaattctaatccataaccatgcagctttcttatataccctgtatcattaactaaaggttttgagtagatagtcctgaactgaagtattaacaatgctaagtgactacctttgaaaggctcccttctaataagtgagcccagtttctcagtgtttccttgtaaataaccttaagtcaatttacttacacgtacctgtctctaaacttgcgccatccaaattgccagctcaaaagagcaggagccattttgtctaaggcaagggctaactamaaaaaccgaagacatgtttaactgttactcattgtatacaactawtaaggcctaaatacacaaaagtgttagggaccgcctgttgatagtgtttatgcacaaactgcatggttgtccaatggcttgatattttaagttcgtgcgggtgtgccgtgtttgccctctgcctgaagcgagaatcatattttcaggaagctggagttagcagttgtgagccacttgtgtgttctgatatacaaacttctttaaaggcatcaagtattcttgacagaacaatttctcaagccaccctgctaaatgatcttttgtcactcctcatacaaaggcctaaaataaatgtaaatttaatatttgtggcccactttaatccataaaactgttaaatgactttaaaaactgagttgtttacattcttcatcccagactttcccggtactgtttttgttatgttggagcgttgaactcaaaccctaacattttcataataaataaataaataaataaataaataaataawtaawtaaawaaawmmwwaawwwwtaatatggctcttgtcagtttcatgaagcctacatgctattttcataaaatacacaatacatttcaacaataactgttagatcaatagtattaaactactttctaagtggaacaaaaaatgaatctttgttgacacatcgcacaattgcaataacttcaaagacattttagtttcttaggaactgttgtatttttttaatccatcactcaggaaataaaaatccaactcaagaaaaatgtataaactctagcttagtcactgaatatctgggttcacagtggtgctatgaaagcctggacgccagtcacgggtgttctaatgagtaaatttaagttcagtatttgatcagagtggccagctactactgaggtcatctctttttgatacggtggcatttctaggatgaaatgcatccattttacattttaatggtgatctttattctagaatgaaagacatgttacaatggtgacctttactctaatgtaaagccacaaccaaataaactacacatagggacctcctaggtttccactctagggtttaaacagcaggtcgacctaagtgactgcccacctctaacttttgctcagtgtttggccattttaagaagtatgtaagtggctcttaaaagagcctttgggtttttgaaaactggctttgaaactcactttcttcctgctgccttccttaggtcggtcttctgcatgaccatctttgacttcccagagttggagttggttgccctcgctttggcggggcttttgcgctgttgcaagcccttggcccctttggtcttccttctgctcccagaaccctttgtgggcgtagcttttggcttcttgacaaccttggtcttactactcttgggggatctcgaggccctggacaagcccagtttcttagccttggcagaagcagatttcttgcccttgcccttgtcgttgcctgaagctgccttcttgctaagcttgaaggagcctgaggctccggtgcccttggtctgcaccaggactcccttattcacaagtctcttgagggccagcttgatacgactgttgttcttctccacgtcatagccagccgcagccagggctttcttcagggcagcaagggacattcctgcccgttcctgagacatggaaagggcctcaggaatcaacttggaaaccgagaaaccccgaggtttgcgagcagtggccatgccaggcttcttccctcgccttttagttgcaggtttctctacaggagctggaacaagagtacttgaggctgcaggagccgtttccgacatagtcaagagctggtcaagaactacacccaattaaaaaaaaaagtacaggagagcgaacagcgctggagtagagagggggtccgggggggggccttatatagagcagggcgcgctgtgattggtgcatccctaggcgcctcccccgcccctggggaaggggcatttgtgtttcttttcccccaaaaagtagaaacttgcatgtgtgctctctgcagaatcgctcaggttatgacacaggtgacccacgggaacttggattccacctgactttttaccctttattgacaaatgttcctgcatgtcagaactagtgggaaacgcccttgattttcaatcaaattcaaaaagaagaagaagactttctctttttcttgctaattcaaaagtaacttttagtagaaaatgtatccaacatcttgggaggggtcttctacatatgtggcttctaactagtgaagaaaatcaattatgcaggccctaattctcactgaaattatatatatacctgacagaagtaacacagatgtcttgactatctcactgtggaattagacagtgttcctagaattatcccaaaacgccaaggtgtggtcttcttgaagggagaatggcctaataaacactccacagatcgtgtgagaggcacgctgtttcccctgaatcttaagaaaagggctttggatgcggttataagcatcttaccaataacatctatatagtcaaatcatccagcctcaaggctgttatcaaaggagtttggtactcctttccaactgaacaccacaatagtccacttcctgtgacatcatcccacattacaacagcttccaatgtcgtatctacctctagatgaacagatgcagtgcctacccttaatttaaaaattataaagctggaatcagatttcacaatctcttaatatggctgggctggtaaacatgtctacatatgtgttagagaaatgttctttccagggctttatccatggtacatgtctagaaataagagtgcttacagctgggcatggtggcaacttgctggcaatcccagcatgaagaagggaggattgctgtgagttttgaggtcacctttagctagaaaatgaaaacatgtcaaaagaagaagaaaaaaaggagggaacatgatactcaagtagaagggaggcctaattaagctagttcattatggagaatgctaagatggggtagtgtgattatatcaactgaagtagagcataaagtccaatgcagcagtcatacagtccgagttcttttgggagataactacccttgtgaggcagagatctctatgttacagaaaagttcaagataatatgaggaaaagttgtttattaagaaaaactgggggggtggtggtaagggggaagtatggggggaatacccatataggggagggggagggtagaggatgagggcttatggacaggaaaccgggaaagggaataacatttgatatgtaagtaaagaaatatatctaataaaaatttttaaaaagaaaaagaaaaacatgagggtgggtaggtacctatgtctcaggaaaacatttgtacttttgtcttaacagttaattgactaggcccggtgtgccgaactgtaaccctagctacctgagagatgatccaagttcaaagcaaacctaagctatagagtaaataaactgcataagacactgtccccaaataaaaaccatgcagaatacactggggaagagtcttggtagtaaagcacctgtctagtatgaggtagagcctacattcaactctagcactgcaggtgtgtgtgtgtgtgtgtgtgtgtgtgtgtgtgtgtgtgtgtgtgtgtgtgtgttttgtgagttttgaacttacattgatcaaccatgtttaaagtttaataaagcaattcaaaattaatgaaattttatgagatgttacttgtttccttgtttctcttcaagaatttccttttaggaataaactcacagcgttgtttatcagagactgttcagtgatgagaggggagggctggcatttgtgctcaaagtcacatgtttgtccttatgcagtttgtgagttgtcttgttacttatgtttgagatgtttatattaaaacttgaatttcaaatggtgaaaaccataaactagatcttggagttgaggtggaggtgaaggttccagagtcatatctcctgaatttcctcttttgtcctttattaccagagctcaggatctgaaaccaaggaaatcccactagggctgtttgtgacagttcctaaatatttgtgcaaaagatgtgctgattattctttgtcccaagaaccatcakwwkktywwkwwtwttwtyywttttkttacaatatttatctaggctttattgttttacatcaatatcaacaacactactgatgargactgaatgtwtaaggwtggggctytyttgcaggaacctyaraattcaraaagcaktttctaaggaagcaatgtgggsaaaaatctacatctgaagtatttytgaaataaaaactsraggccaagaaatcaaatttytggttgcragatgacaaaacatctttctctttmtgkwtctctctctcasgawscwcrkgymggtatgcacaaacacacacacacacacacacacmyayacacwyyabaamacamskaaggtatcttaataaattatctggattcatatatgtyattttagkctgtttcacttggaaaaacaraacmaawacaawtgamtacaaaaccccaaaacacaraasytaccwgttgagagtcacagactgatttccamctggcagtgtaatcttccamcaggaaaataacaccctgtgtatttgacatccatttggtttctctgactgttgatcacacaaaatttctaggtcataaattatcaatggcataccagcatcaggtggagctttacagaytggcagaatatmttcttctattkctttaaaastaacatagaactaatgaatttattgaagacttaggttctmtaattyaaaatcaagaaagaaaaaaaaaaaccttggattcgtattttgccccaggcagctgaaaacattaaaaaaaaaaaaaaawmacatgcacaaagttggccaggtttgatttgtttcccagcatagtcaaggctgcccttcaactcccagtcctcttgccccagccttttcggtcagttatggggttacaagtcacagtctgtaggatgatgtcattatacaggtgaaggcaggtataggatagaatgaggcctgtcattggacaagaaggaaggatgggtggaagaaaagttttagagaggaggaggaggagactggatcgagggaggagaaaccagctgagagaacatggaggcagatgtaagattcctctctgcacatttataggttgttatgaatattcttaagggatggatatgtacagggctttgtatgtctagatgagcaaattatattattggatcagaggttattgtgttgtgtgttctttcatgaggtgatttaattgaatc

SEQ ID NO: 317 - DNA, 3257 bp, Rattus norvegicus
ggctgcggtgcggccaacccggccaggctcggctcgccaccctgctcctctcgcgtgcccgtcggggaccgctggtgcctcccgcggggagtcctcgcccacgcgtcatccgcagaggctgggggaccctgggacgtgcggggtcgcgaggccgagccgggcgccccccagtggccagccccggaccccatggctgggccgcgcggagccgagcgggcaaggtgaatccagccccggggccggctgccggagcgcttggcggggtcgccggctccatgggcagcggcgctcggcacgatgatggacgttaacagcagcggccgccccgacctctacggccatctccgttcactcatcctgccggaggtggggcgcgggctgcaggacctgagccccgacggtggcgcccaccctgtggtgagctcctggatgccgcacctgctgagtggcttcctagaggtgacggctagcccggcgcccacctgggacgcgccaccggacaatgtctcaggctgcggggagcagatcaactatggcagagtggagaaagttgtgatcggctccatcctgacgctcatcacgctgctgacgatcgcaggcaactgcctggtggtgatctcggtgtgcttcgtcaagaagctccgccagccctccaactacctgattgtgtccctggcgctggctgacctctcggtkgccgtggcggtyatgcctttcgttagtgtcaccgacctcatcggggrcaagtggatcttcggccacttcttctgcaacgtcttcatcgccatggacgtcatgtrctgcacggcctcgatcatgaccctgtgcgtgatcagcatcgacaggtaccttgggatcacgagacccctcacgtacccggtgagscaaaatgrgaaatgtatggccaaaatgattctgtcggtctggctgctctctgcctccatcaccttacctcctctcttcggatgggctcagaatgtgaacgatgacaaagtgtgcttgatcarccaggattttggctacacgatctactccactgcggtggcgttttatatccccatgtcggtcatgctgttcatgtactatcagatttacaaggccgccaggaagagtgcagccaaacacaagttcccaggcttcccacgcgtgcagccggagagtgtcatctccctgaatggtgtggtgaagctccagaaggaggtggaagagtgtgcgaacctttcgagactgctcaaacacgaaaggaaaaacatctccatcttcaagcgggaacagaaagcagccactaccttggggatcatcgtgggagccttcactgtgtgctggctgccgtttttcctcttgtccacagcccgcccctttatctgtggcacctcctgtagctgcattcctctgtgggtggagaggacatgtctgtggctgggctatgcaaactctctcattaatccttttatatatgccttcttcaaccgggacctgaggaccacctatcgtagcctactccagtgccagtaccggaatatcaaccggaagctctctgctgcaggcatgcatgaagccctgaaacttgctgagaggcccgagagatccgagtttgtgctgtaagacaaaactctgaccactgtgggaaaaagggtcatgatacatgatccagagtggaaccctggatgaattcatgcagaacaggtggacacaacacaacgaaatcattggctgagactgcacaatggaacatggcttctgtcttcttcttggcatggcttgaaatgtcacgaggggtgatctgttgtacaaagtgtatcatggggagatggcaacctctcccttttttyctgtggatcagtgatattgtgtttaaatgaaaatagtgctcagtgtcagacagccagtcatctctgcagtaagcacactacagagctgggtttcgggaggggagggaagcagtttctggtgctttccacragkccacatccacaagagtggggggaaatcctaacgcacaattcccatgcttccagtctaggctttgtggtaactcttcaggaaccattcatgagacagagtacattttgtggtatgacagaagggtgtctttycaagcaagctacagtaagcattgtgctgaacgtgttgcatgtccgtgttagaaaacagaaacccagtcatcagctaattcaagcaattcccaragcagtgtttgttcaagctctgtaatatgtgcttcctgcagggtccttgtgactkwycaccagtgtgtgtccactgtcaaatcctttatcattatggtgtaactcaggaacagatctcaggttggagagaggcagaaaacctgaatcaagcttttccttgcactcacacttctgaaggctcctgagagaggacggtaactggagatgagtgagtgccacctcaccgcattgtatattaacatgattmtmggcatgttgttcactcccatcttccacaagggtgcaaggagcccacagggctggtccatgactgtgtgttatgaggagagagtgtgacaatagcaaatccatgaatagttgcggttgtttctggagacagcgtaaacatggtcacccaactggactgtttgaatcgtgtgagctagcggccacytsrwsccsmattgttaatactctagaacaccgttctgttycatgtagagaatttgtttctgtgttctctgtatcttaaatcaaatgtgtgcctgatgaattctgtcctctaaccccctcccaccaataaaaatggtcaatgttaaggacaggtaaggaagcagaaagggttcctttgtggatagtatcctttaaatgttgctatgtagtagtctgggtgaaggagatggaaagccacagttcagaagagtacccgtgtctataagggggacatgaatgaaaacctttatttgaaaaaargraacwraaaaaraawawtattttcctacaattaagaaggctgtcctctcacagaataaaatagagttccaaagtgtattatgaacttcttccagatgtcactgatgtctattatgaaagcagggaagggcccctttcctgtgaaggggaggcaggcactgtcctttcagaatgtgtacaaattcctgagctgcagttttgctagactgaccatatatacttatattcctaatttaaataacaattatgtcagatatgtgttgttaaatttgaaagtgttttattacattacatcgaaataaaggttatttgtagctgtaataaagcaacttaagc

SEQ ID NO: 318 - DNA, 4456 bp, Rattus norvegicus
gatagactcgagcggaatcgacgccggaggtcccaaggcccactcccacccagcctggccaggccggctacagtgggatccaggggtcgagactccgatccccctaagccaaagggcctgcaaggggcagtgcgggggggggggctagcccctccctcggtgaccgtgcgccggagcactgattaacgcgggcacggagcagggcaccaggtcgcaggatgcgctaccgggcgtcggccctgggcagtgacggggtacgagtgaccatggagagcgccttgactgcccgagaccgggtgggggtgcaagactttgttctgctggagaacttcaccagtgaggctgccttcattgagaacctccggcgtcgattccgggagaacctcatttatacctacattggccctgtcctggtctctgtcaacccctaccgggacctacagatctacacacggcaacatatggaacgctaccgtggcgtcagtttctatgaagtgccgcctcatctgtttgcagtggctgacactgtwtaccgggcgcttcgtactgagcgtcgggaccaagcagtgatgatttctggagagagtggggcagggaagacagaggccaccaagagattgctccagttctatgcagagacctgcccagcccctgaaaggggtggcgcagtgcgagaccgcctgttgcagagcaaccctgtgctggaggcctttgggaatgccaagactctccgcaacgacaactccagccgctttgggaagtacatggatgtgcagtttgacttcaagggtgcccctgtgggaggccacattctcagttacctcctggagaagtctcgagtggtacaccagaatcacggagaacggaacttccacgtcttttaccagctcctggaggggggggaggaggaggctcttcgtcgtctgggcttggaacggaacccccagagctacttgtacctggtgaagggccagtgtgccaaggtctcctccatcaatgacaagagtgactggaaggttgtgaggaaggcgctgtcagtcattgacttcactgaggatgaagtggaggacttgctaagcatcgtggccagcgtcctacatctgggcaatatccactttgctgctgatgaggacagcaatgcccaggttactactgagaaccagctcaaatatctgaccaggctccttggtgtggaaggcacaacactgagggaagccctgacccacaggaagatcatcgccaagggggaagagctcctgagcccactgaaccttgaacaggctgcatatgcaagggatgctcttgccaaggctgtgtacagccgcactttcacctggttggtcagaaagatcaataggtctctggcctctaaggacgctgagagccccagctggcgaagcaccacagttcttgggctcctggacatttatggcttcgaagtgtttcagcataacagcttcgagcagttctgcatcaactattgcaatgagaagctgcagcagctcttcattgagctgactctcaagtccgagcaggaggaatacgaggcagagggcatcgcgtgggaacctgtccaatacttcaacaacaagatcatctgtgacctggtggaggagaaattcaagggcatcatctccatcttggatgaagagtgcctgcgtcctggggaggccacagacctgaccttcctggagaagctggaggacacaatcaagcaccaccctcacttcctgacgcacaagcttgctgaccagaagaccaggaaatccctcgaccgaggggagttccgccttcttcattatgcgggagaggtgacctacagcgtgactgggtttctggataaaaacaatgacctcctcttccggaacctgaaggagaccatgtgcagctccacgaaccccatcatggcccagtgctttgacaagagtgagctcagtgacaagaagcggccagagacggtggccacccagttcaagatgagcctcttgcagctagtggagatcctgaggtctaaggaacctgcttatatccggtgcatcaagccaaatgacgccaaacagccgggtcgctttgatgaggtgctcatccgacaccaagtgaagtacctgggacttatggagaatctgcgtgtgcgcagagctggctttgcctaccgtcgaaaatatgaggctttcctgcagaggtacaagtcactgtgcccagagacatggcccgtgtggacaggacggccccaggatggggtggctgtgttggtcagacaccttggctataagccagaagagtacaaaatgggcaggactaagatcttcatccgattccccaagaccttgtttgccacagaggactccctggaagtccgacggcagagtctagccaccaagatccaggcggcgtggaggggctttcattggcggcagaaatttctccgggtgaagcgatcagccatctgtatccagtcctggtggcgcggtacactgggccggaggaaggcagccaaaaggaagtgggcagcccagactatccgtagactcatccgtggmttcattttgcgtcatgcaccccggtgccctgagaatgccttcttcctggaccacgtgcgcacgtcatttttgcttaacctgaggcgacaactaccccggamtgttctggacacctcctggcccacacccccacctgccctgagagaggcctcggagctgctccgggagctatgcatgaagaacatggtgtggaaatactgccggagtatcagccctgagtggaagcagcagctgcagcaaaaggcggtggctagtgaamttttcaagggcaagaaggmcaattacccccagagtgtccccagacttttcatcagcacacggcttggcacagaggagatcagccccagagtgcttcaggccttgggctctgaacccatccagtatgcagtgcctgtggtaaaatacgaccgtaagggctacaagcctcgttcccggcagctgctgctcacacccagtgctgtggtcatcgtggaggatgccaaagtcaagcagagaattgattatgccaacctaactggaatctccgtcagtagcctgagtgatagcctgtttgtgcttcacgtgcagcgtgaagacagcaagcagaagggagatgtggtactgcagagcgatcatgtgatcgagacactaaccaagacggccctcagtgctgaccgtgtgaataatatcaacatcmacsagggcagcatcacgtttgcagggggtccaggcagggatggcatcatcgacttcacatctggctcagagcttctcatcaccaaggctaagaatggccacctggctgtggtggccccacggctgaattctcggtgatgaaggtgccggtggacccctcctgactcctgatgctttgcttagtcccctcctcccctcccagttaccaaagactcaagcttccagacagggatccagggacaccctcaaagcccacytgcagactcctgccccctgctcatcctctcttgaggtgatcaggawccagggagcttccccaggagtgggccaggccgggccaagcaatagaaaagcagaggtctgagcaggccaggccagccctctgctgatgccaaatatctaagagaagggaattttaamwvavrwddwmwmwraracwttttgatgcttyataggaaactattttkttaaaaaagtcattttcctatcctaaacacamwrrawrwrwwwwmmctgactcaaacaggacaaggaatgtagctgaaagactgactgggctggctgaggccccccctctctgccaagcctctcctcattcccttggcaccttgtctgtctgtccatccacctgcaccttttgcagcccactatgacctccaccaagaagctgaggccacctttgcctaccccatattcctgccttaagaatgtccttttaggagctggggtatagcccagaggtagaactggtgctaagcatgcgtgagaccctgggctcaatccccagcattaaaaaaaaatgtttttaatattttcaccccagtctgagggcactctaaagttgggggaaagtcttaagagtttgaargacttcagagaattgtctggttcaggcaaatcacagagatggagacaggcacacagagggaggaagactccttacacacatacttttgacccattatagtacggtctttattggctctgggtacctctatgacctgggagcatggggacagggctggccttggaggaactgcaggggcatcacttctttctgctgtttctctccaccccagaggtccttgggtttgcccagctctctctgtgccctctgggtttctcagcccactgctgacacttctgcaatccagagaaacactaaataaaacaatatgtatttgccaaaaaaaaaaaaaaaaaaaaaacattgcggccgcaagcttattctatttagtgag

SEQ ID NO: 319 - DNA, 2469 bp, Rattus norvegicus
atgtggggctggaggggcctcctcttctgggctgtgctggtcacagccactctctgcactgccagaccagccccaaccttgcccgaacaagctcagccctggggagtccctgtggaagtggagtctctcctggtccaccctggtgacctgctacagcttcgctgccggctgcgcgatgatgtgcagagcatcaactggctgcgggatggggtgcagctggcggaaagcaaccgtacacgcatcacaggggaggaggtggaggtgcgggattccatccccgctgactctggcctctacgcttgtgtgaccaacagcccctctggcagcgataccacctacttctccgtcaatgtctcagatgcactgccatcctcggaggacgatgacgatgatgatgactcctcctcagaggagaaagagacagacaacaccaaaccaaaccgtaggcctgtggcgccatactggacatccccagagaaaatggagaagaaactgcacgcagtgccagctgccaagacggtgaaattcaaatgcccgtcgagtgggacacccagccccactttgcgctggttgaaaaacggcaaggaattcaaacctgaccaccggatcggaggctacaaggttcgttacgccacttggagcatcataatggactctgtggtgccttctgacaagggcaactacacctgcatcgtggagaacgagtatgggagcattaaccacacctaccagctagacgttgtggagcgatcccctcaccggcccatccttcaggcagggctaccagccaacaagaccgtggccctgggcagcaacgtggagttcatgtgcaaggtgtacagtgacccccagcctcacatccagtggctgaagcacatcgaggtgaatgggagtaagatcggtccagacaacttgccgtatgaccagatcctgaagactgctggagttaataccaccgacaaggaaatggaggtgcttcatctacggaatgtctcctttgaggatgcgggggagtatacgtgcttggcgggtaactctatcggactctcccatcactctgcatggttgaccgttctggaagccctggaagagagaccagccgtgatgacctcacctctgtacctggaaatcattatctactgcaccggggccttcctgatctcctgtatggtgggctccgtcatcatctacaagatgaagagcggcaccaagaagagcgacttccatagccagatggctgtgcataagctggctaagagcatccctctccgcagacaggtaacagtgtcagctgactccagcgcatccatgaactccggggttctcctggttcggccttcgcgactgtcctccagcggaacccccatgctagctggcgtctctgaatatgagctccctgaagatccccgctgggagctgccccgggacagactggtcttaggaaaaccgcttggcgagggctgcttcgggcaggtggtgttggccgaagccatcggtctggataaggacaaacccaaccgcgtgaccaaagtggccgtgaagatgttgaagtctgatgcgacggagaaggacctgtcggacctgatctcggagatggagatgatgaaaatgatcgggaagcacaagaatatcatcaacctgctgggggcgtgcacacaggatggtcctctctatgtcattgtggagtatgcctccaaaggcaatcttcgggagtatctgcaggcccggaggcctcctgggctggagtattgctacaaccccagccacaaccctgaggaacagctgtcttccaaagatctggtgtcctgtgcctatcaggtggcccggggcatggagtatcttgcctcgaagaagtgtatacaccgagacctggctgctaggaatgtcctggtgacagaggataatgtcatgaagatcgcagactttggcctagctcgagacattcaccatatcgactactataagaaaaccaccaatggccggctgcctgtgaagtggatggcacctgaggcattgtttgaccggatctacacccaccagagtgatgtgtggtcttttggggtgctcttatgggagatattcactctgggtggctcaccaaaccccggcgtgcctgtggaagaacttttcaagctgttgaaggagggtcatcgaatggacaagcccagtaactgtaccaatgagctgtacatgatgatgcgggactgctggaacgcagtgccctctcagagaccaactttcaagcagttggtggaagacctggaccggattgtggccttgacctccaaccaggagtatctggacctgtccatgccactggaccaggactcgccaagctttccggacacacggagctctacctgctcttcaggggaggactctgtcttctctcatgagccatttcctgaggagccctgtctgccccgacaccccacccagcttgcaaatggcggactcaaccggcgctga

SEQ ID NO: 320 - DNA, 1968 bp, Rattus norvegicus
agcgtcctgcttctcttcagctaggcggaacctgmtctgctgggcccaaccgctgcaaaagtactttctcctgcccgaacgctagccgcggcccacagtctcgcccgctcggctgcctgaggcacktcgtttcctcgtgtccttcgtcgggcgtaatcgccgcttctgcccgacccgccggcccatcccgctgcagtgatgtgcgacaaggagttcatgtgggccctgaaaaacggagacttggatgaggtgaaggactatgtggctaagggagaagatgtcaaccggacactagagggtgggaggaagcctcttcactatgctgcagattgtggacagcttgaaatcctggaatttctgctgctgaaaggagcagatattaatgctccagataaacatcatatcacccctcttctgtctgctgtctatgagggtcatgtttcctgtgtgaaattgcttctgtcaaagggtgctgataagactgtgaaaggcccagatggactgaccgcccttgaagccactgacaaccaggcaatcaaagctcttctccagtgayggayggrtggactgataacttgggaagaatgactctcctgtggcctcacactgctgcctgtctgtctgtcactttctatctgccagcttcttcagctaaatactttaagagggtgaagggagagagaaattcataacaaatcagactgccaggggggaattaaacatgttttggaggagcarwrrrvmrwrwrawragacttttactgggattcctgaacaaaccagcctgtttttcatttccagtaaaatatacagcttataccaagggwgagcagaaataccgtctgctggaatccttggaccttctcarmwmmmwarwrawwwmttaatyagwgkaytgaaggtytggccacacaaggmcaactcttcctatttggtgsccctagctgtgagcagtagtggctgctgttctgtcaacttagggtgytgagataagcaattagctccasccttccttctgccttaagaatgcactctmctgggggctcctggstggttaakagcgctgcctgcasttagtgmccawaacctctctcgaatgactttagtctttatgtaasagcttakataaggttaggagcagcgcactcctcaattgctggatgactaaactttggattttytctcmmhwwwmamawmaawwwmatgtytcttttagataaamckgactagtttwatwtataaaatgttaaattctaggagcctaaagraggaaccattccagtaggctgatttcttttttctcctttagactcagacatttatataacattgaarcactttgagactccttmtggtagtaaaggagatttaaaaataaaatcatagccataagmrwrwwarwatmmwawaaarararaamarwwrtcttagtacctatggattttcttcatttgttatttgagtgaaccagccttagttgtgtttsragaatsamgarkattctttggaatgcctctctaagacccaccgtggatgctgattttgtagtgcaccaaaggtatcactggggtgagatgtactctatttggacagatggaatctcatcccttcaaaaacattcttgttaccaggtttccctgagctggtaatagactctagctgggccaataccaccgcacctgcatggtgtttttatcttaacaatcattcattgcatacatgtgacaacttcaaaatgcattctgtgttcttataatacagtgccctaaaacggtgttctaggatctgcagataagagagacttatctctaaatttttctttcatgaacaataaaataaattaaaatgtacaaccttaaaaaaaaaaaaaaaaaacctttgcggccgcaagcttattccctttagtgagtgttaattttagcttggcactggccgtcgttttacaacgtcgtgactgggaaaaccctg

SEQ ID NO: 321 - DNA, 2120 bp, Rattus norvegicus
  misc_feature (9)..(41): n is a, c, g, or t
  misc_feature (135)..(190): n is a, c, g, or t
  misc_feature (944)..(944): n is a, c, g, or t
  misc_feature (954)..(954): n is a, c, g, or t
  misc_feature (1164)..(1164): n is a, c, g, or t
  misc_feature (1968)..(1968): n is a, c, g, or t
gtcataccnnnnnnnnnnnnnnnnnnnnnnnnnnnnnnnnntcacagagctgtgacctttatccaggagatgatttgtttgaactacttcccaagaattgccgtggctgccccagggagatacctgtagacagcnnnnnnnnnnnnnnnnnnnnnnnnnnnnnnnnnnnnnnnnnnnnnnnnnnnnnnnnccatattttctatttcaagattgacaccgtgaaaaaggcaacatcacaggtggttgctggagtaatatatgtgattgagttcatagccagagawrctractgtyccrarcwragkwrhwcvgmrmygacagcssabdydhgrgkccmakaysttmtacagtatgtctgctgctcggctctccgcggtggcacagtccaccgtgtatgccttctcsgcgcgcccgctggcgsgcgrggagcccgtgagcctgggctccctgcggggcaaggtgctgctcatygagaatgtcgcgtccctytgaggcaccacgacccgggactacaccgaaatgaatgatstgcagaagcgtctgggscctcgtggcctggtggtgctcggtttcccgtgcaatcagttmrgamwtcrssasratggcaagaatgaagagattctgaattccctcaagtatgtccgacccggtggtgggttcgagcccaactttacattgtytgagaagtgcraggtgaatggyrmgarggctcamccgytctttamcttcctgcggaatgcsttsccagcacccagtgacgatcccaytgcgstcatgaccgaccccaagtacatcatttggtccccggtgtbccgcaacgacatttyytggractwtgagaagttcytggtaggtccagacggtgttccagtgcgcagawacascrgscgctttcgcaccatbgacatcgaacccgatatrgaagccytrctgtccaagcagyntagcaacccntaaggcattcctggtatctgggcytgrtgatggctggctgcccyccggggkgaggtttttccatgacggtgttwcctvtaaatttacatggagaaacacstgatttccagaaaaatcccytcasatgggcrbtgktytygtccattcccgatgcctttacgcvtaargaaagksgskttcaccactaagamtaamgtgbtgrwtgtcvrnrawmwwmmwrrrmmmrwwhhhsyawraawawtcragamgssrccscgattactccgtgtccctgctgctgagacttgctaagaaatatgaagccacactggagaagtgctgtgctgaaggcgatcctcctgcctgctacggcacagtgcttgcagaatttcacctcttgtagaagaacctaagaacttggtcaaactaactgtgagctttacgagaagcttggagagtatggattccaaaacgcattctggtccgatacacccagaaagcaccctaggtgtcgaccccaactctcgtggaggcagcaagaaacctgggaagagtgggcaccaagtgttgtacccttcctgaagctcagagactgccctgtgtggaagactatctgtctgccatcctgaaccgtctgtgtgtgctgcatgagaagaccccagtgagcgagaaggctcaccaagtgctgtagtgggtccctggtggaaagacggccatgtttctctgctctgrcaskwgrcgagacatatgtccccaaagagtttwaagctgagaccttcacctkccactctgatatstgcacaytcccagacaaggwgawgcagataawgawgcaaacggctctcgstgagytggtgamacacaagcccaaggccacagargaysagstgaagacgrtgatgsgtgacttmgcacaattcgtggacaagtgttgcamggmtgccgacaaggataastgmttcgccaytgrggggccaaaccttgttgctagargcaawgaasccttagcstaaacacatcmcamccatvtcaggntaccctgrgaamaaavgacatgargactcaggastcatctstyvtgttggtgtraarccaacacchtawggaacacaaatttctttgaacatttgamttcttttmwmtgtgccgcagttattaaaaaatagaaagaaaaaaaaagaaaaaaa

SEQ ID NO: 322 - DNA, 2800 bp, Rattus norvegicus
cggcggcggctcttcggtgcagagggggaaactccgcgggctcgtagaaagaataatgcggtacgaggcaggctgcttgctctggggtttggcagcagcggcggcagctcgagcagcggcacggcatcaccccagacgctgacagccccgccggccggctccctcactgactgccgactgtcaatggagctggaaaacatcgtggccaacacggtcttgctgaaagcccgggaagggggtggaggaaaacgcaaagggaaaagcaagaagtggaaggaaatcctgaagtttcctcacatcarccagtgtgaagacctccggagaaccatagacagagattactacagtctatgtgacaagcaaccaattgggagactgctttttcgacaattctgtgaaaccaggcctggactggagtgctacattcagttcctggacttagtggcagaatatgaaattactccagatgaaaaccttggggcaaaggggaaggaaataatgaccaagtacctctctccaaagtccccagtcttcattgcccaagttggacaggacctggtctcccagacagagaagaagctcctgcagagcccctgcaaagaactcttctctgcttgtgctcagtctgtccatgactacttgaagggagaccccttccacgagtacctggacagcatgtattttgaccgttttctgcagtggaaatggttagaaagacaaccagtgaccaaaaacactttccggcagtaccgagtgctgggcaaagggggctttggagaggtttgtgcctgccaggttcgggccactggtaaaatgtatgcttgcaaacgcttagagaagaagaggatcaaaaaaarraaarraragtccatggcactcaatgaaaagcagattcttgagaaagtcaacagccagtttgtggtcaacctggcctatgcctacgagaccaaagatgcactgtgcttggttctgaccattatgaatggaggtgacctgaagtttcacatctacaacatgggaaatcctggctttgaggaagaacgagccttgttttatgcagctgagatcctctgtggcctggaagacttacaccgtgagaacactgtctatagagatctaaaaccagaaaacatcttgctggatgattatggccacatcaggatctcagacctaggactggctgtgaagatccctgagggggaccttatccgtggccgggtaggcactgttggctacatggccccagaagttctgaacaaccagcgatatggcctgagccctgactactggggcctgggctgcctcatctatgagatgatcgagggccagtcaccattccgaggccgcaaggagaaggtgaagcgggaagaggtggatcgccgggtgctggagactgaggaagtgtattcccccaagttctctgaagaggccaagtccatctgcaacatgctgctcaccaaagactcgaagcagaggctgggctgccaggaggagggggctgccgaggtcaagaggcaccccttcttcaggaacatgaactttaaacgcctggaggctgggatgttggaccctcccttcgttccagawccccgggctgtatactgcaaggatgtgctggacataragcagttctccactgtgaaaggtgtcaacttggaccatackgacgatgacttctactcaaagttctccacaggctctgtgccaatcccatggcaaaacgagatgatagaaacagaatgtttcaaggagctgaatgtgttcggacccaacggtaccctctcaccagacctgaacagaagtcagcctccagaaccaccaaagaaasggcygttycacagactcttcaggcgtcagcatcaaaacaattycaagagttcacctactcstaagaccagttgtaaccaccgcataaattcraaccacatcaattcaaactccastggaagcagctagtttcagctctggccttgaagtcaaaagtggaaccagctcagagccttctacttggaagcagaacttgtaaccaggggagctcccactgtggctcagtggccaggaaagctccactgggaaccaggataggatactgttcccccaataacaaacctccaagtttctcaaagaaatttccactcaggtctgttttccaaggtggccccaagctggggtggactagaattttcctygtksmrcattgcaatagaaacacaatgggatatgmcagcttgcacgrattttaatagcatcccaactagaactgaattttgtctttattatttttaaaggaaagttttgtaaatttcwmwawwrwmwmwrwwwacattttgtatatttgtatttaaatgaaagtcagacttcgaggswskakrttttctgtgcagccactgttaagccatgtgttttaagacattttagatgggggggggggtacaaaaatgtgactctagatkkccrgagcctcaaaagagaaaatgyytttattaaatataaactatttyacmttttacctttaaagacctgattacatctacctacatccacctctctagctgttttcccctccttgtagctaatcactctcctgttgacttgtaacaagctaaatgaaatgacagaatgcacttgggccatctcccaacccaaacattctttatgagctatgacatcattggtaagatgggcaagcttttgacattgcagcttcattggcctcgttctatagggcatccacatggagggtaaggaatcctaaatcattggaatagagatcttggctgcttaaaaaaaaaaaaaaaaa

SEQ ID NO: 323 - DNA, 1530 bp, Rattus norvegicus
gccaaccccattggaaatgatttatttaccactctaagatttgtgctccaaagtgtaaccagacatgtgaccacaatgtctcatgcgacatttttgtgctttgatacgggagcggctggagccaggcgggagcgcgaggtgcaggaggccggcgggaggcgggcgaaccgcgggaagcaggcaccatggttctttcggtgcctgtgatcgcgctgggcgccacgctgggcactgccaccagcatccttgcactgtgtggggtcacttgcctgtgccgacacatgcaccccaagaaagggttgctgccgcgggaccgtgagcccgacccggagaaagcgaggcccggtgtgctccaggcagcccaacagttcaacgttaaaaagtccacagagcctgtccagccccgacctctccttaagttcccggacatctacggtccccggccagctgtgacggccccagaagtcatcaactacgcagactacaccctggggaccacagaggagtctgctgcacctgccagcccccaggcccagagtgacagtcgcctcaagaggcaggtcacagaggagctgttcatcctccctcagaacggtgtagtagaggatgtctgtgtcatggagacctggaacccagagaaggctgccagctggaaccaggccccaaaactccactttcgcctggactatgaccagaagaaggccgagttatttgtgactagcctggaagctgtcaccagtgaccacgaaggaggctgtgactgttacatccagggcagcgtggctgtcaagacaggctctgtggaggcacagacggctctgaagaaacggcagctgcacacaacctgggaggagggcctgrccctgcccctgggtgaggaagagctccccacagctaccctgacactcaccctgaggacctgtgaccgcttctccagacatagtgtgattggggaactccgcctgggcctgaatggagcatctgtacccctggggacagcacagtggggtgaactgaagaccacagcaaaggagccatctgcaggaactggggaggtccttctgtcaatcagctaccttccagctgccaatcgcctcctggtggtgctgattaaagctaagaacctccactccaaccaatccaaggagcttctaggcaaagatgtctctgtcaaggtgaccttgaaacaccaggctcagaagctgaagaagaaacagacaaaacgggccaagcacaagatcaaccccgtgtggaatgagatgatcatgtttgagctaccagatgacctgctgcaggcatccagtgtggagctggaggtgctgggccagggtgaggaggggccgagctgcgagcttgggcgctgcagcctgggcctgcacgcctctggctctgagcgaagccactgggaggagatgctaaaaaacccacgccggcagatcgccatgtggcaccaattgcacctgtagttggccaccggccactgaccgtctttcttggacacagtcatcttccaggctcagctgtcagtca

SEQ ID NO: 324 - DNA, 2670 bp, Rattus norvegicus
aagctaggctgctctgctgcttctgcgatcgggcggcggcggggcgagccaagctgcggcgggggacggcggtctgggcagcgggcgccgcagtcagggagcagcagtgaggttggcggccgcgggcggcacacaaggcgggccakgccgggtgagggmkckkamkrcwmgtsgckrgtgrcaktswstgtmccwstgwrcawgratagccccagaagaggaaaggctgagcccagagcgcttcagcagggaagattcccttccccccgcttcaggctgctgagcactgagcggcgctcagaatggaagccatcgccaaatatgacttcaaagctactgctgacgatgagctgagcttcaagaggggggacatccttaaggttttgaatgaagagtgtgatcagaactggtataaggcagaactcaatgggaaagatggcttcatccccaagaattacatagaaatgaaaccacatccgtggttttttggcaaaatccccagagcaaaggcagaagaaatgcttagcaaacagcggcatgacggggccttcctgatycgagagagcgagagcgctcctggggatttctccctgtcagtcaagtttggaaatgatgtacagcacttcaaggtgcttcgtgacggagccgggaagtacttcctgtgggtggtgaagtttaattctttgaatgagctggtagattaccacagatcmacatccgtgtccaggaaccagcagatattcctccgggacatagaacaggtgccacaggaggatggtgagctgggctttcgccgaggagacttcattcatgtcatggataactcagatcccaattggtggaaaggggcctgccatgggcagaccggcatgtttccccgcaattatgtcaccccagtgaaccggaacgtctaagaagcaaaagagattatttaaagaaagtgaaaagttgagaccgttcacaagaattacacccacacgctgcctgtcacagcctgtgagggaacgcagaacacctggctgggtcccacgggcgaccctctcacttaagttgcaacttttgggggtgggaaggggtgtttgatttcataatgccaaaacttaacctattgaatgaattacagtttttattacggaatctcgccgctastmgtgttcccttcctgtgtcctttwttsgcgtthtttctttcctgtccagtgcatgatgtttaaggccacatatagtccagctgatgccaatrataaaagaaawgaaaccaagtgggctggtattttctctatgcaaatgtctgtggagatggatggaytagaggwgccggattcttcacacacaggggcagccattgtatcggggcccttggttgggattcactggagatgcctaagggcatmtgcctccggcctgaagcctggagcattccatcagagttggaattagggcaggagcctgctgcccacccatggtctcctgagagccagactgcagagctgccctccccactgcctcccttcagtgtctcacttgttttcatagtgcctttgtcttatttcaagggtgttcatgagtggtgtctttaccttttttayttttttaaataagttaaagatagtccagagcttttcagttgattagtctcctatcctatgtacatattttcctctcagggcaggagaaagaggacagagaaaggagcygrsrgaagcagagagggtgtatttcccatcttaaatgggccagaggtcttgaaggatcagcttttacattgtgagctttgacaccyrckwsrgctcagactcaccggccctcagagtccctgccctccaggtcccagttgccctttctatgcctagagccactaagggtcaaaacacaaggcaggcaggggggagcgggtggcatccttccctctcatrggcctacaagcaggtgraagttgaaaattctggcctttaatttttyttgctcttacaattaagtcctcgttctcagttgcacatttccccccacctgtccacgagtacgaatggcaggattssggggctggttssatggttgcatctctktgcacaacagtggtgtttssasstsstctsckkccccatcccatraagccttttgaggtagaaaagaccaagagcaacgcaaagctttttaaatcttgtctcctgtgagctctmagtcctccgwagtcatgtgcstgtccacmgtttctmtccacgcagcctcctccccacagcaragtcatggctactcccaggctctcchttgragttgdcggcgtccgtgggmtgctggactcttgagggtggggtcccccctggactctgttttgtragatggactcagctcggagcacccctgaggccccgraggmgtcytgggcggagcctgttmccacccctcctggttctgctgcctctttccctgctgatgataaaaatttatctctggagttacacctgggccatttgattgttttaytttggaattggtgtatatcatgaagccttgctgaactaagttttgtgtgtawatatttaaagatcagtgtttaaataamaaaacaaacctawrwamwwamrmmwmwarmwwmwrmraawagcaatttggtaggtagtgattaactgtgaataaactccaatgacttcktaaaaaaaaaaaaaaaaaa

SEQ ID NO: 325 - DNA, 875 bp, Rattus norvegicus
ggcacgagcccagccgaactatcccctgcggcgccagcgcggggcggctccgggcgcccccagcagacccccatcatgggcagccagagctccaaggctccccggggcgacgtgaccgccgaggaggcagcgggcgcttcccccgcgaaggccaacggacaggagaatggccacgtgaaaagcaatggagacttaacccccaagggtgaaggggagtcaccacccgtgaacggagcagatgaggcagctggggctactggtgatgccatcgagccagcgccccctagccaggaagctgaggccaagggggaggtcgcccccaaggagacccccaagaagaagaagaaattctctttcaagaagcctttcaaattgagtggcctgtccttcaagagaaatcggaaggagggtgggggtgattcttcagcctcctcaccaacagaggaagagcaagagcagggggaaatcagcgcctgcagtgatgagggcactgcccaagaagggaaggctgctgccacccctgagagccaagagccccaggccaagggggcagaggccagtgctgtctccaagggaggagacgcggaagaagaggcagggccccaggctgcagagccatccactccctcgggcccagagagtggccccgcatctgccagtgctgagaatgagtagctgggcgggggctggtgggtgatctctaagctgcaaaaactgtgctgtccttgtgaggtcaccatctggaccttgtgccctggctgccttcctgtgcccagaaaggaaggggcttgttgccccgtcccagccacgctccctcttctccctcctgtggattctcccatcagccatttggtcttactattaggccagttgaa

SEQ ID NO: 326 - DNA, 8399 bp, Rattus norvegicus
tactgcagaggtctctggtgcatgtgtatgtgtgtgcgtgtgtttgtgtacgtatgttctgcccctgtcaggctgcagcccttgtgaaacacttggtcaccttttgcaagaaggaatctctgaatcgttgcaactgaaggtgcggactcggctcgggagatgttgttccttactgcagatagataattttcctttttatcaggaatctcacatgaagagtaaagagtaattaaaatgtgcaggatgacaagatggagcaaacagtgcttgtaccaccaggacctgacagcttcaacttcttcaccagagaatctcttgcagctattgaaaggcgcattgcagaagaaaaagctaagaatcccaagccagacaaaaaagatgatgatgaaaatggcccaaagccgaacagtgacttggaagctgggaagaaccttccatttatctatggagacattcctccagagatggtgtcggagcctctggaggacctggacccctactatatcaataagaaaacttttatagtattgaataaagggaaggccatcttccggttcagtgccacttctgccctgtacattttaactcccttcaatcctcttaggaaaatagctattaagattttggtacactcattattcagcatgttaattatgtgcactattttgacgaactgtgtatttatgacaatgagtaaccctcctgactggacaaagaatgtagagtacaccttcacaggaatatatacctttgaatcactaataaaaattattgcaaggggcttctgtttagaagattttactttccttcgtgacccatggaactggctggacttcactgtcattacattcgcatatgtgacggagtttgtggacctgggcaatgtctcagcgttgagaacattcagagttcttcgagcattgaaaacaatatcagtcattccaggcctgaagaccatcgtgggggccctgatccagtctgtgaagaagctctctgacgtcatgatcctcaccgtgttctgtctcagtgtgtttgctctaatcgggttgcagcttttcatgggcaacctgaggaataagtgtgtacagtggccccccaccaacgcttcccttgaggaacatagcatagagaagaatgtaactacggattacaacggcacacttgtaaatgaaaccgtgtttgaatttgactggaaatcatacattcaagactcaagatatcattatttcctggagggtgttttagatgcactactgtgtggaaatagctctgatgcaggccaatgtccagaaggttacatgtgtgtaaaagctggcagaaaccctaactatggttacacaagctttgacaccttcagctgggcatttctgtccctgtttcgactgatgactcaggacttctgggaaaatctttaccaactgacattgcgtgctgccgggaaaacatacatgatattttttgtgctggtcattttcttgggctcattctacctgataaacttgatcctggctgtggtggccatggcctatgaggaacagaaccaggccacattggaggaggctgaacagaaggaggcagagtttcagcagatgctggagcaactgaagaagcagcaggaagccgcacagcaggcggcggcagcaacagcatcagaacattccagggagcccagtgcagcgggcaggctctcagatagctcttcagaagcctccaagttgagttcaaagagcgctaaagaaaggcggaatcggaggaaaaaaagaaaacagaaagagcagtctggaggggaagagaaagatgatgatgaattccacaaatccgagtccgaagatagcatcaggaggaagggcttccgcttctccatagaagggaacagactgacctatgaaaagaggtactcttccccacatcagtctctgttgagcattcgcggctcactgttttccccgagacgcaatagcagaacaagtcttttcagcttcagagggcgagcgaaggacgtggggtctgagaatgattttgcggacgatgagcacagcaccttcgaggacaatgagagcaggagagactctctgtttgttccccgaagacatggagagcgacgcaacagtaacctcagccaaaccagcagatcctcccgaatgctggcggggcttccagcaaacgggaagatgcacagcacagtggattgcaatggtgtggtttccttggtgggcggaccctcggttccgacatcgccagttggacagcttctgccagaggtgataatagataagccagctactgatgacaatggaacaactactgaaactgagatgagaaagaggaggtcaagttctttccatgtttccatggactttcttgaggatccttcccagaggcaaagggcaatgagcattgccagcatcttaacaaatacagtagaagaactagaagaatccagacagaaatgtccaccctgttggtataaattttccaacatatttttaatttgggactgttctccatattggctaaaagttaaacatattgtcaacctggttgtgatggacccatttgttgacctggcaattactatctgtattgtgttaaatacccttttcatggccatggagcactaccccatgactgaacatttcaatcatgtacttacagtaggaaacttggttttcactgggatcttcacagcagaaatgttcctgaaaatcattgccatggacccttactattatttccaagagggctggaatatctttgatggtttcattgtgacactcagcctggtagaacttggccttgccaatgtggaagggttatcagttctccgttcattccgactgctccgagtcttcaagttggcaaagtcctggcccacactgaacatgctcattaagatcatcggcaactcggtgggcgcactgggcaacctgaccctggtgctggccatcatcgtcttcatttttgccgtggtcggcatgcagctgttcggcaaaagttacaaagattgtgtctgcaaaattgccactgactgcaaactcccgcgctggcacatgaacgacttcttccactccttcctgatcgtgttccgagtgctgtgtggggagtggatagagaccatgtgggactgcatggaggtcgcgggtcaagccatgtgccttactgtcttcatgatggtcatggtgattaggaaccttgtggtcctgaacctctttctggccttgcttctgagctcatttagtgcagacaaccttgcagccactgacgatgacaacgaaatgaacaaccttcaaattgctgtggacaggatgcacaaaggagtagcttatgtaaaaagaaaaatatatgagtttattcaacagtcctttgttaggaaacagaagatcctagatgaaattaagccacttgatgatctaaacaacagaaaagacaattgtacatctaaccacacgacagagattgggaaagatctggactgtctgaaagatgtgaatggaaccacgagtggcatagggaccggcagcagtgtggaaaagtacatcattgatgagagtgactacatgtcattcataaacaaccccagcctcaccgtgactgtgcccattgctgtgggagagtctgactttgaaaacttaaacacagaggactttagcagtgaatcagatctagaagaaagcaaagagaaactcaacgaaagcagtagttcctcagaaggaagcacagtagacatcggggcgcctgcggaggaacagcctgtcatggaaccagaagaaacccttgagcccgaagcttgcttcactgaaggctgtgtgcagagattcaagtgctgtcaaatcagtgtggaagaaggaagaggaaaacagtggtggaaccttcggagaacgtgcttccgaatagttgagcacaactggtttgagaccttcattgtgttcatgattctcctcagtagtggtgccctggcctttgaggatatatacattgatcagcgaaagacaatcaagaccatgctggagtatgcagacaaggttttcacttacatttttatcctggagatgctcctcaaatgggtagcctacggctatcaaacgtatttcaccaatgcctggtgttggctggacttcttaattgttgatgtttcattggtcagtttaacagcaaatgccttgggttactctgaacttggggccatcaagtccctaaggacactaagagctctgagacccctaagagccttatcacgatttgaagggatgagggtggttgtgaatgccctgttaggagcaattccatccatcatgaatgtgcttctggtttgccttatattctggctaattttcagcatcatgggcgtaaatttgtttgctggcaaattctaccactgtgttaacaccacaactggtgacacatttgagatcaccgaagtcaataatcattctgattgcctaaaactaatagaaagaaatgagactgcccggtggaaaaatgtgaaagtaaactttgataatgtaggatttgggtatctttctttgcttcaagttgcgacgtttaagggttggatggatatcatgtatgcagcagttgattccagaaatgtggaactgcagcctaagtatgaggaaagcctgtacatgtacctgtacttcgtcatcttcatcatcttcggctcgttcttcactctaaatctattcatcggtgtcatcatagacaacttcaaccagcagaagaagaagtttggaggtcaagacatctttatgacagaagaacagaagaaatactataatgcaatgaagaaattaggatcaaaaaagccacaaaagcctatccctcgacctggaaacaaatttcaaggaatggtctttgactttgtaaccagacaagtgtttgacatcagcatcatgatcctcatctgtctgaacatggtgaccatgatggtggaaacggatgaccagagcgattatgtgacaagcattttgtcacgtatcaacctggtgttcattgtgctgttcaccggcgagtgcgtgctgaagctcatctccctccgccattattatttcaccattggctggaatattttcgattttgtggtggtcatcctctccattgtaggaatgtttcttgcggagctgatagagaagtatttcgtgtcccctaccctgttccgagtcatccgcctggccaggattggacgaatcctacgcctgatcaaaggcgccaaggggatccgcactctgctctttgctctgatgatgtcccttcctgcgctgttcaacatcggcctcctgcttttcctggtcatgttcatctacgccatctttgggatgtccaactttgcctatgttaagagggaagttggaattgatgacatgttcaactttgagacttttggcaacagcatgatctgcctgttccaaatcaccacctctgcgggctgggacggactgctggcccccatcctcaacagcaaaccccctgactgtgaccctaataaagttaaccccggaagctcggtgaagggggactgtgggaacccatccgtggggattttcttttttgtcagctacatcatcatatccttcctggtggtggtgaacatgtacatcgctgtcatcctggagaacttcagcgttgccaccgaagaaagtgcagagcccctgagtgaggacgactttgagatgttctacgaggtctgggagaagttcgaccctgacgccactcagttcatggaatttgaaaaattatctcagtttgcagctgctctcgaaccccctctcaacttaccacaaccgaacaaacttcagctcattgccatggacctgcccatggtgagtggagaccgcatccactgcctggacatcttgtttgcttttacaaagcgggtcttgggcgagagtggagagatggacgctcttcgaatccagatggaagaaaggttcatggcttccaacccctccaaggtctcctatcagccaatcactacaacgttaaaacgaaagcaagaggaggtgtcagccgttatcattcagcgcgcttacaggcgccaccttttgaagcgaacagtaaaacaagcttcattcacatacaataagaacaaactcaagggcggggctaatcttcttgtaaaagaagacatgatcattgacaggataaatgaaaactctattacagagaaaactgacctgacgatgtccactgcagcttgtccgccctcctacgaccgggtgacaaagccaatcgtggagaaacacgagcaggaaggaaaagatgagaaagccaaagggaaatgaacacaaacaaacaaaaaataataaattgggtgacaaattgtttacagcctgtgaagtcaaaggactcctttaggaagtcaatgccaaactgactgtttttacacaaattcactttaaggtcagtgcctcaataagacagtgacccccttgtcggcaaactctgtgactcttaggtaaaggggagatgaccttgacaggaggttactgttctcactaccagctgacactgctgaagacaagagacaaatggctatgcagactgtagggaccagcgtaaaggggtgcagagctataatttgggggtttaacgtgaaacactttagtgtagtaactgtattcaccgtttgcatttcaactgccacatttgtcaggttttgtacaaactctgttagtggattcatcttttttttaaatccatatgttgtttgttacatgtgactatttttgtaaacggggtttctgttgggaaacagactaaaggaactcttttccctgtgtgtcacctgggggtattgacatccatacagccctcccatctgcacaacgatgtggttttgcatgtgagggcatgctgtaccttacgatcatgcatgagaaaaaagtcacaaggaaagcaaagtcggttcttcaacagttctacatcatctgtgtttctgcggggggacgggggggatgtactgaggtgatcatgagaccatgggctttgccgagctggctttgtcaactctagcccttagtccaaggagattgatcgatcagacaggtcattgagtcttagtaggtgcaaacttcatccaaatgtctggagtcctgttacgtttctgttcactgtctcttcaaagtctctaaattatgactctgactccctacccccagccctagcagagcgaattgaccaaaagaaccctttataaattcccgcttaaccctgcactttgtttagccatcttcagctctcagcgaggttgacactgtaatgtgttaatgaaatgctatttattgtgtaaatagtcattttactctgtggtgcacgtttgagcaaacaaataatgacctaagcacagtatttattgcatcaaatacgtaccacgagaaacgtagagtgcaagctgtccgctggtaatatactgtattctgtaccattatagatagtgtggatgctgtcagtgcatgtcgatattaccatgctgcggtatctagtttctcccaccactcagaatctcatactcatgagacaccataggtcagtggctaagtcaaggaaaccgttcagcagatttcatttctttaagtcattaagcaatagtttgcagcattttaacaatgtctgggttgtttttcaattctaagtggatgacgttcaatgtatagccagactgtacatacatgttcggaagacaacactactgcttaacctgttaaaacatgtttagagttttataagcaagtataaataactgtacaaagtcactttcttttgtttttcagcatcatgtacatatgaagaggaaattatcttcaggttgatatcacgatcacttttcttactttccgtccacagcagtttttcatggaagatatttgctaactaagaaatgaaaccatgacggggtagtggtagatctctgcttttttaatcacgggctttaagtttggattatttcataattttaagggacaaagtacactcacaacctcacatccaaattatgatttgcaattgggaaagggtagaacatttgatttatgtttattatagtgtctgtgcgaacagatgaccggaatgctttttttttctcattttttctttattccctaatttctgtttatttttctttgctttggaatcacgcatctctagattgttctaaatataaacgtgagcttcggaatttcttttcctcaaaaacagagaggatgacacttacatagtcaattatatcaagatatttgtgtttcttacagaagcagaccataggcacctctttttcttaagaaaaaaaatatttaggcaaaccgtattcatgaactgcatgttggaaaatgctactattgcccaaaatgatgctaatcacaattaaaaatgtgcaaatctaataaaaattaattttttatttt

SEQ ID NO: 327 - DNA, 2892 bp, Rattus norvegicus
  misc_feature (2888)..(2888): n is a, c, g, or t
ggtggggaaccagaccagaaacacttctgagtcaagagcttgrattckgmacgwggtggaaagcactgagacgtgaagatgagtgarcttgaccagytgcggcaggaggccgagcaactgaagaaccaaattagagatgcccgtaaagcatgtgcagatgcgactctttctcagatcacaaacaacattgatccagtgggaagaatccaaatgcgaaccaggagaacactgagggggcatctggcaaagatttatgccatgcactggggcacagactcaaggctccttgtcagcgcctctcaggatgggaaactcatcatctgggacagctataccacaaacaaggttcatgccatccctctgcgctcctcttgggtcatgacctgtgcatacgctccttctgggaattatgtggcctgtggtggcctggataacatctgctccatttacaatctgaaaactcgkgaaggaaatgtgcgtgtgagtcgtgagctggcaggacatacaggttatctatcctgttgccggttcctggatgacaatcagatagttaccagttctggagacaccacatgtgccctgtgggacatcgagaccggccagcagacaaccacgtttactggacacactggagatgtcatgagcctgtctcttgctcctgacaccagactgtttgtctctggtgcttgcgatgcttcggycaagctctgggatgtccgagaagggatgyrcmggcagacctttacaggacacgagtctgacatcaatgccatatgtttctttcccaatggcaatgcctttgccactggctcagacratgctacatgcaggytgtttgacyttcgtgcagaccaggagctcatgacctactcccatgacaacattatctgtggtatcacatctgttyccttctccwmgagygscmgmmtyckscwcgvkggmkaygacgacttcaactktaatgtctggsaygsrctcaawgctgacagagcaggtgwcctagctgracatgacaaccgagtcagctgcttgggggtgactgatgatggcatggctgtggcaacaggatcctgggacagcttcytcaagatctggaactaaggccayagcaggtggatggatgccatggcgactggaagaccattccamccttraagcgttactgcgatagcatatcyyatccmmccmtwctaasgtgrmcacccacacctcccctcagaacttcaaaagggcaagatcttttttccttcacttattgctgaaaccaagagcacaactcccattaagagaaggatctctgtgctgtaaactaaaacaaattgtgcatttttctggggccattgtctttggtttattttgtkwtgttttttgttwttgttwtktwtgtcttggkcaaatttttaaaggaaatactacaataaaaatgttaaccagaarrwaammmwvarwawrawwrwgagagagacacaccttcttactagttcatttgcatttaaatcagtgatcctgatctgtggcawtcatgaaaaacaagttgaagactttgtttatctggaattgtttctaaatataagtcatttgtagcargamwwwrraarmawwmamrtttcttccttaaacatattcctttatgttcagtagttaagagaaccagagcccatgggggtgtctgactgtcactgatgcatttttgtccctggcttgcwwwwwwwwwwwwwwwwwwttttttgkctcatgtcacagatgactgtttcgcacaaacacagcatagtggaagaaaaaattcagaagcarrgtagccaagcacatgttatgatggccacgaatgcttggtcagaatccttccctttgctcagcagtgaacttattcccagcacccttccctcctcactgtccagtttctgttctttccttgggtttcctgtgaagttggagggaagtttgtagtcatgtgacactagccgtcctgcccctgctgtcagatttttwttctccagagaggtgcctgtyctgtgcttggatagtcagtttgtgtatgaaacaatgtacaaatcaatgttttgaaaataatgatctcagactttctaagttaaattttaaacaatttgattgtttgccatattgggtgggtttactcttagaatcgcatgctgtagaaatgctctaaagtgcatayasgaskcagtccttagatgttctttttattttaagaaataacctcttcaagttgtaaccgyggcggctttgtccattactgttgctattctgcacacatatcggmassagsargcgctttacacactcgagtagtgggataagtcactgttttctttacttwacaagatgatagtcctgttgggaatgactgctgctggcttcaggaagggagggaagctgctccgctgyctctttgccacttcctggaagcagcctccatggaacagcctttgcatmtgaggcaaccatttttacaccgygcagatmttcgtggttatcatctcaaakccatgttcagcakcagcgtttggacagcagtgttctgtgggccctcccatccccmkatatcctgcacccctcatagcagtagtggmttcgmyattctgwtktmygsagcgkcckgtacmrmmctgtgctgtgactgtgcggtaggyctggacatggcaaagagaatacagcgaagccccttctcttcytaccaaacgactctgtagagctctctgcaccctgtaccctttccaccttttgtatttaattttaaagtcagtgtactgcaaggaggctggatgcaagatagatactatattaaactgtactgttatttaagatgtaataaarmaktttkwchtkvddraaaaaaaaaaaaaaaaaaaaaaaramagtcttggcgnccgc

SEQ ID NO: 328 - DNA, 1726 bp, Rattus norvegicus
cgatcgcgcaagtcggacccgtggatcacagcctgtagatcgcggcccgggcctggaggacaacagcaagtgaagggggttcctcttcctgaaggaggggtcatggccttmttgttgactacccgacggctggtctgcagttcccagaaaaacctccacctcttcacacctggwwccagatacatcagccaagctgctgccaaagttgactttgagtttgattatgatggaccactcatgaagacagaagtcccgggccctagatctcaggagctaatgaaacagctgaacacaatccagaatgcagaggccgtgcactttttctgcaactacgaagagagccgaggcaactacctygtggacgtggatggcaaccgcatgttggacctgtattctcagatctcctctgtacccatcggttacaaccatccggctctggcgaaactcgttcaacagcctcaaaaygcgagcactttcatcaacagacctgccctgggcatcctgcctccagagaactttgtggacaagctccgggagtccttgwwgtcggtggcgcccaaaggcatgtgtcagctcatcacgatggcctgcgggtcctgctccaatgagaatgcattcaagaccatcttcatgtggtaccggagtaaagaacgaggtcagagaggtttctccaaagaggagctggagacttgcatggttaaccagagtcctggatgcccagactacagcatcctctccttcatgggtgctttccacgggaggaccatgggttgcttagcgaccacacactccaaagcaattcacaagattgacatcccttcctttgactggcccattgctccattcccacggctgaaatatcccctggaggagtttgtgacggacaatcagcaagaggaggcccgctgtctagaagaggtggaggatctwawtgtgaaatatcggaaaaagaagagaacagtggctgggatcatcgtggagcccatccagtccgaaggtggagacaaccacgcatcagatgacttcttccggaagctgagagacatagccaggaagcatggctgtgccttcttggtggacgaggttcagactggaggaggctgtacaggcaagttctgggcccatgaacactggggcttggatgacccagccgacgtgatgtcgttcagcaagaagatgatgactgggggcttcttccacaaggaggagtttcgaccaagtgctccttaccggatcttcaacacctggctgggggacccatccaagaacttgctgctggctgaggtcatcaacatcatcaagcgggaagacctgctcaacaacgtggcccatgccgggaagaccctactgaccgggctgctggacctccaggcccrgtacccccagttcgtcagccgggtgaggggacgaggcaccttctgttccttcgacactcccgacraagccatacggaataaactcatcctaattgccaggaacaaaggtgtggtactggggggctgcggtgacaaatccatacgtttccgtcccacgctggtcttcagggatcaccatgcccasytgttcctcaacattttcagtggtatcttagcagacttcaagtaaasaagccatctscacgacattcagagaaagctctgtcccagcggtgtcaacttgattagtttgcctaattcatattttcacttcaaagtttatcagaggcgaatgcataaactaaagggtc

SEQ ID NO: 329 - DNA, 1843 bp, Rattus norvegicus
ggaacccaggagctcgcagaagccggtcaggagctcgcagaagccggtcgcgctcccagcctgcccgaaacccatgacccagggctgtcccgagcgccgtctgaagtgggggtccggctctgcagggccccggctgctgctatgacttctttgccactcggtgtcaaagtggaggactccgccttcgccaagcctgctgggggaggcgctgcccaggcccccggggctgctgcggccactgcaaccgccatgggcacagatgaggagggsgccaagcccaaagtgcccgcttcactcctgcccttcagcgtggaggccctcatggccgatcacaggaagcccggggcaaaggagagcgtcctggtggcttccgaaggggctcaggcggcgggtggctcggtgcagcacttgggcacccggcccgggtctctgggcgccccggacgcgccctcctcgccgsggcctctcggccatttctctgttgggggactcctcaagctgccagaagatgctctggtgaaggccgagagcccggagaagctagatcggaccccgtggatgcagagtccccgcttctccccgcccccagccaggcggctgagtcccccggcctgcaccctacgcaagcacaagaccaaccgcaagcccaggacgmccttcaccacggctcagctactggctctggrgcgcaagttccgccagaagcagtacctgtctattgccgagcgcgccgagttctccagctcgctcagccttaccgagacccaggtgaagatctggttccagaaccgccgtgcyaaggccaagagactgcaggaggccgagttggagaagttgaagatggccgcgaagccaatgttgccgcctgckgcsttcggcctctcctttcctcttggkggycctgcagcggtggctgcagctgccggcgcctcactctacagtgcctctggccctttccagcgcgccgcgctgcctgtagcgccsgtgggactctacaccgcccacgtaggctacagcatgtaccacctgacataggtgggcccagagtcacctccctgtggtgccatcccttccccagccacctcttctaggcagcgggagtccttcctaggaagctckgctgcccaacaccacctggccccttctcttaaacccttcgctacacagttcctcctggccatcgcatcttaaarttcctcctccctcttccgaccccttctgggaagaaaaaaaagtggccggaagtgtctaggtttttcgagaaaaatttatattyacasgtgcgagttataaatgtggaaactgggggatgcaaaggcgaagagatttatccgtggtccccagcarawttarargctgaaggagaccagaggccaaaaggactagaggccatgagactccatcagctgcttccggtcctgaaaccaggcaggactgcacagagaaattgttatttggtgctycmararacsagccmagccytatagaaagcaaggagcacagctccttccaytgtcagactccaaacgcwttgcagcaaagcattgctctkagggggcagggtgcrtgctgstgsttcacgaaggtaggttgaaragactttcccaggaccagaaaaaaaraarwwaaaaaacaaaatctgtttctatttaacagtacattttcgtggctctcaaacatcccttttgaagggatcgtgtgtactatgtaatatactgtatatttgaaattttattatcatttatattatagctatatttgttaaataaattaattttaagctacaaraaaaaaaaaaaaaaaaaaacaattgcggccgcaagcttattccctttagtgaggg

SEQ ID NO: 330 - DNA, 1705 bp, Rattus norvegicus
gccggtgctgggctctgtagctcggtactccagcctctcgtcatggcctcggaaaagcctcaggacctaatggtcacctgcaccgcgccggtcaacatcgcggttatcaaatactggggaaagcgggatgaagcgctgatcctgcccatcaacccctccctgagcgtcacgctgcaccaggaccagctaaaaaccaccacaactgcggccattagcaaggacttcacagaggaccgcatctggctgaacggtcgtgaggaggacgtggggcagccacggctccaggcctgcctgagagagattcgccgcctggctcggaagcggaggagcacgggagacggggatgccctgcccctcagcctcggctataaggtgcacgtggcgtcagtgaacaacttccccaccgctgcaggcctggcttcctcagcagccggctacgcctgcctagcctataccttggcccgggtctacggggttgagggagacctctcagaagtggcccggcggggctcaggcagcgcatgccgcagcctctacgggggcttcgtggagtggcagatgggggaacaggccgatgggaaggacagcatcgcccggcagatagccccagagtggcactggccccagctccgagttcttatccttgtggtgagtgcagagaagaagccgwcgggcagcacagtgggcatgcagaccagcgtggcgaccagtaccctgctcaagttccgggctgaswcsakkgtgcctgagcgcatgaaggagatgacccgttgcatccaagagcaggacttccaggccttcgcccagctgaccatgaaggacagcaaccagtttcacgccacctgcctcgacaccttcccgcccatctyctacctcaatgacacctccaggcgcatcatccagctagtccaccgcttcaacgcccaccatgggcagacgaaggtggcgtacacatttgatgcgggccccaatgctgtgatcttcactctggaggacaccgtggccgagtttgtggcggcagtaaggcacagcttcccccctgctgcgaatggagacaagtttctcaaggggctgcaggtggcacccgttcttctctccgatgagctgaaaacttcgctggctacggagcccagccctggtggggttcagtacatcattgccactcaggtgggaccaggacctcaagtcctagacgaccctcaccatcatctgctaggcccggatggcctgccacagcgggacctttgatctctcccatgtgcatctggagaaaggggttgctcccgggagctcgggagctcctgtgctgatgggccacgtccaaaggcttgcttgatgacacctaggggtgtctcctgtgatgagcagctgtctgggcagccggggacccctctcaagtgcctcaccttcctgctggctagccgaccttagggaagaggagtcggcgtctctcccaccgaagatgcccccgagggcctytaagygtgaaggatgagggctcagacagcagtgcctytkttgagactcaggccacagtttctttgagaascctcytggtgagggtaggggctgtggaacccacaggtagggtccattgtgggtktggatktaccacgaaggtgcagtygatggacccgatgmccacaggaataaagtgtgccactgctgcctgccaaaaaaaaaaaaaaaaaaaaaaaaaaaaacc

SEQ ID NO: 331 - DNA, 1282 bp, Rattus norvegicus
  misc_feature (1230)..(1230): n is a, c, g, or t
  misc_feature (1233)..(1233): n is a, c, g, or t
tttttttttttttttttwwtgcttataaattatatttattagtatggtcaggtcaggataagaaaggagtttgggctttgattataaaatgcagcatctttctctgattctcttggctaaacttttcctcttyttttttyywtttttttcyttgctgtcttccatctttctggctcgtatttccctcattaaatcaaaaaataccttgtcaacgttggcgcgcgttttagcagacgtctccacatagttaacgttccactggtcagctctgttttttgcctcttctacagaaacctgccttttatcttctaaatctgatttgttaccaaccaggagaaatgggacattcycatcttcttttactcttaaaatctgttccctgaagtccgctgtagctgcaaaggactccatctctgtsrtrsmgaakwcacagaggaatccttccccacttcggaagtagttgtctctaattgcagcgtagtcttcctgccctgctgtatctaagatgtcgatctgcacttcctccccatccagcactaccttcttcctgtagcystctgcyttggtaggttcatagtcttctacaaactcatcatacatgaactgcagagtcagagcagacttgcccacaccaccactgcccaccatgatgactttgtgtaaggccaaagaattctgacccttgggcttgtttgcagccatcctgtgtgyrgycytcagaggmctgaaragawtckgcamsgmsrtgccatcsagactggtaggmmrasggaaavwbsggsrcsasgtradccacgsccacggwcgcatcggtaakcmccgcaagcacccaggagsccscgggaatgctggaggcatgcatcmccmcargwtcaactttracaaatrkcatysaggttacttcggcaaagttkgcatkagkcattmccmcytkaarmggmacsavrgctthtgcccaactgwcaacctggmyvaatyatggmcgttgstcagcgagcaracacggktcaatgcagcaaaaamcaagawtggagttgctyccmtcattgrcgytgttcgatcaggsyamtacaaagttykggggaaggggaagcyycmtargcaaccwgtcatcgtraaggccaagttyttcagcaraaragctgaarrgarrwtaaagggtgtgggaggkgcctgtktcctggtggcttaarkccmcttcrrwggvtaattaaatgcaaacmtttwmmnwrnvrhmwawamamaaawmwmrmrrmmaaaaaaaaaaaaaaaaaaaaaaaaa

SEQ ID NO: 332 - DNA, 1527 bp, Rattus norvegicus
ccamsmssgcgagtacaacctycttgmagctcctccgtcgmcggtccacacccgccaccagttcgccatggatgacgatatcgctgcgctcgtcgtcgacaacggctccggcwtgtgcaargmykrmkycrygsrygwckawgywcscmsggccgtcttcccctccatcgtgggccgccctaggcaccagggtgtgatggtgggtatgggtcaraaggactcctacgtgggcgacgaggcccagagcaagagaggcatcctgaccctgaagtaccccaktgaayacggyatygwhmccaactgggacgatatggagaagatttggcaccacactttctacaatgagctgcgtgtggsccctgaggagcaccctgtghtgctcaccgaggcccctctgaaccctaaggccaaccgtgaaaagawkacccagatcatgtttgagaccttcaacamcccagccatgtacgtagccatccrggctgtgttgtccctgtatgcctctggtcgtaccactggcattgtgatggactycggmrackgggtywcccacactgtgcccatctatgagsgtkmcgcgctccctcatgccatcctgcgtctggacctggctggccgggacctgacagactacctcatgaagatcctgaccgagcgtggctacagcttcaccaccacagctgagagggaaatcgtgcgtgamattaaagagaagstgtgctatgttgccctagacttcgagcaagagatggccactgccgcatcctcttcctccctggagaagagctatgagctgcctgacggtcaggtcatcactatcggcaatgagcggttccgatgccccgaggctctcttccagccttccttcctgggtatggaatcctgtggcatccatgaaactacattcaattccatcatgaagtgtgacgttgacatccgtaaagacctctatgccaacacagtgctgtctggtggcwccwccatgtwcccaggcatygctgacaggatgcagaaggagattwctgccctggctcctagcaccatgaagatcaagatcattgctcctcctgwgcgcaagtactctgwgwgkattggtggctctatcctggcctcactgtccaccttccagcagatgtggatcagcaagcaggagtacgatgwgtccggcccctccatcgtgcaccgcaaatgcttctargcggactgttactgagctgcgttttacaccctttctttgacaaawcctaacttgcgcagaaawaaawaaatgagacatttggcatggctttattggttttttgctttttgctttwgctytttttaaaytyyyyyttyaaaaaggrctttttttttttgctttgatttggcgcttttgactcaggatttawaawctgkawcggagrakgcgaccgyagatgattggagcaaacatcccccaaagttctacaatgtggctgaggactttgattgtacaatggtttgtgattatggtttttttacatagtactcccagtatatacggcatagatg

SEQ ID NO: 333 - DNA, 1685 bp, Rattus norvegicus
gtgaaccggcggttcccccgcttctgttcctagtcctcccaagtcacagcccgattcccggaggcccgagcccttagccagggcggggtggcgcgggccgaaaggacgccatcccggcctcggccatggaggctcccgcgccgtctctcacggaggaggacttaactgaagtgaagaaggacgctttagagaatttgcgagtttacctgtgtgagaaaatcatagctgagagacattttgatcatctacgagcaaaaaaaattctaagtagagaagacacagaagaaatttcttgccgaacttcaagtagaaaaagggctgggaagttgttagactacttacaggaaaaccccaagggactggacacccttgtggaatccattcgcagggagaaaacacagaacttcctgattcagaagataacggatgaggtgctaaagcttcggaatataaaactggagcacctcaaaggcctgaagtgcagtagctgtgagcccttcgcagctggagccaccaacaacctttctaggtccaattctgatgagagcaacttctccgagaaacagagaccatccacggtcatctaccatccagagggagagtcgagcactgctcccttcttctctaccgagtcatccctgaatctgccggtcctggaagttggcaggctggaaaacagcagcttctcttcagcctcgcttcctcggcctggggaccctggggccccccctttgcccccagacctgcggttagaagagggggggagttgtggaaactcaagtgagatgtttctccccttacggtcacgggctctttcacggcagtgacaggtcactgcgagttgttctaatagtggtgcaaatggtgtggtggatatcatctttttataaatcacgggatgcgcgtcttaaatcacaggtgcacataacattctctgtaaataggattggaagtgtaatggagcacactctaggggcagcttggtgtaaatcatggtggtcgtgtacttttcagcattgtccttttttattattttaagtgttttggtattttgaacttttttataagactaattttatcaaaatakttctcaatttgagaaaacaacttgtggaccgaaaaccctacargttttccgcctggttgtgtttcctggtgatctgacagtacattttagcagtaagctgttctgactttcaggaaagccagacatggggagagctgytgacacaccctcaggagaatgtcccactccgtgcttctgagaagccgtcaggttctgaggaaacacctgatggcgttgagccttgtgatctcagttgsccagaatttgttgtwtaccttgccmgtatgattgtctttgccttttacagaccttgtgtcctcagtcttggcctgaagaatkttatyccggcagggcgctccttgtaattaattggtaacacttgtaattagctaaagtccttgctytgagcctttccttytctkccgatgrgcamtgccatgtggagttactgtattacaaagttggctaactttacacmtttaaaaagtgctgrttattttcttttaaattatacctatttctgacatytaactcctatatatttytwttwtttaaaaattaagaaatgaaaagttyytwttaacaataaaatttttttaagtaaaaaaaaaaaaaaaaa

SEQ ID NO: 334 - DNA, 1817 bp, Rattus norvegicus
  misc_feature (1408)..(1408): n is a, c, g, or t
caaaagkrgagcymsrccgsaaggwggckgcmagmkssckrgarsyagkrgaksscccggagctgswggrmyksrgcrgcggcgccgccatgtccgacagcgagaagctcaacctggattccatcatcgggcgcctgctggaagtgcagggctcacggcctggaaagaatgtgcagctgacagagaacgagatccgtggtctttgcctcaaatcccgggagattttcctgagccagcctattcttctggagcttgaggcgcctctcaagatctgtggtgacatccatggccagtactatgaccttctacggctgttcgagtatggtggcttccctccagagagcaactaccycttcttgggggactatgtggatcggggmaagcagtctttggagaccatctgcttgttgctggcctataagatcaaatacccggagaatttctttctactacgtgggaaccatgagtgtgccagcatcaaccgcatctatggcttctatgatgaatgcaagagacgatacaacatcaaactgtggaagactttcaccgactgcttcaactgcctgcccattgcagccattgtagatgagaagatcttctgctgccacggaggcctgtctccagacttgcaatccatggagcagattagacgtattatgcggcccacggacgtgcctgaccagggcctgttgtgtgatctgctgtggtctgaccctgacaaggatgttcaaggctggggcgagaatgaccgtggagtctcctttacctttggggccgaggttgtagccaagttcctgcacaagcatgatttggacskcayswgsagagcacatcaggttgtaraagatggctatgagttctttgccaagaggcagctggtgacactcttctcagcycccaactactgtggcgagtttgacaacgctggcsccatgatgagtgtggacgrgacactmatgtgttcsttccagatcctcaagcccgytgataagaataaggggaagtatgggcagttmagtgscytgaaccccggagsccgtcccatcactccaccccgcaattytgccaaagccaagaaatagcctccrtgtgytgccctytgccccagatgacggattatttgtacagaaatcatgctgccatgggtcacactggcctytcaggcccacccatywtkkkkwwywywkykktwagtgtctttcstttatttwktaaagaatcaatagcagcatbtaattcsccagggctccctcccaccagcacctgtggtggctgcaagtggaatcytggggccaaggctgcagstcagggcaatggcagaccagattgtgggtytccagccttgcatggytggcarccrgatcytggggcaacccatytggtctcttgaataaaggtcaaagctggnwwmwmvmmawrrmmwmwrwmwmmctcatcccagatagtgggccagcagtcctttggtacaaagccaccggggagggcagacagtggctggacatgggcccagccagggctagtcaggtctagaggcaattgggattctaagccaaggcccaagtgttaggaccacagaagggtctgatgggagttcatgattggcagagagcgtgtgttcaacattgatcttttttacaggcaggtgagcctaaggaagcttaagtttctggctctgaccagatactgtagagcctcacagtaagaggtgaagaatctgtcaggtgatagccgggcaccaaagtatacgctgagtaaacaggacaaacatgggtgcctaggtatctctgaagcagacagccatgtggggcctacccaag

SEQ ID NO: 335 - DNA, 1748 bp, Rattus norvegicus
cttagaacctggactcagaccttcataagagccacaaagaaaccaattctgaaccctatcttggctttggatcctggaagagaatcgctaaacacagagcagacccagtgagtgagcaggtgttttggacaatggactggttgagcccatctctattataaaaatgtctcagagcaaccgggagctggtggttgactttctctcctacaagctctcccagaaaggatacagctggagtcagtttagcgatgtcgaagagaacaggactgaagccccagaagaaactgaaccagaaagggagacccccagtgccatcaatggcaacccatcctggcacctggcggatagccccgcggtgaatggagccactggccacagcagcagtttggatgcgcgggaggtaatccccatggcagcagtgaagcaagcgctgagagaggctggcgatgagtttgaactgcggtaccggagagcattcagtgatctaacatcccagcttcatataaccccagggacagcatatcagagctttgaacaggtagtgaatgaactctttcgggatggggtaaactggggtcgcattgtggccttcttctcctttggcggggcactgtgcgtggaaagcgtagacaaggagatgcaggtattggtgagtcggattgcaagttggatggccacctacctgaatgaccacctagagccttggatccaggagaacggcggctsgkkmmgaaycmcgcmcstwgtgkgtccgcymmttrwgygkcystcctctgtggagatccctaactgccctttttggtctcctggcatggttgttgaagatatcgattattcaggagacattcctggcttactttaataccaggggttaactttgggaatattgatgaccctgtttttaaggaacctgtatttttcattctggctacccttgtggccccgcagtttcatagttttgttccaatttctcggcaaagaaaaacagcctgtgtgtttacttggcttaaaacctaggagagtagcaagttctccctgtgttctgctcactctcacgtaatgggtcaccttggctggggggggaaggtaatataatacctggaggaactgcagagctgataaccccaggctcctgtgtgctcgcatgcatgctattcagaccatttggtcaggcaggagccccactggcttgactggctgaatattgtctgattttagagaaggtggtctgagccaattgtgtttgtgctgtgcccctaagttcattttcaccatggttggcttgtttggggagcccttgctgtgccccaggactttgtacctcactgccctggatcagttggggatctcccagctgctctggcccagtgtttttctgctcagggccctggggcctctttactaaagcactgtttgctgctggcagacacgaaccaggtctgtgaggctccataggaaattaagatttggtgacagactggacgtgggtgtgagtcctgaccctgtcacttaactggccatgtgaccttggtcaggctgacttaccttctgggcctcagcttctcacagactgttgtgactcttaaagataaagcgagcagaagctgacaccagtgagtgccttttcttctgctcacccttgtgctcaccagggtgagatagaggtgagaatgcccttactggtgaccactgtggtaggcatttaccgttcggagggaactccattctggaataggggagaatgcgac

SEQ ID NO: 336 - DNA, 1666 bp, Rattus norvegicus
  misc_feature (1641)..(1641): n is a, c, g, or t
cagctgataggcttgcaaagaccctaaccctatcatcgacggccgcacagacgtgaacctggcctacctgggtgccaagcctaggagcctgcagacgggctattgcaaccatactccccccggaacccaaagacttgcgggattgrakwscgryckcaswgaghmywcmkwgmkcymcacygccscygyyskcmyasycaccatcacacccgggaggagccgcassygycgcmgccggccccagtcaccatcaccgcaaccatgagcagcgagsccgagacccagcagccgcccgccgcccccgccgccgccctcagcgccgccgacaccaagcccggctccacgggcagcggcgcgggtagtggcggcccgggcggcctcacatcggcggcgcccgccggcggggacaagaaggtcatcgcaacgaaggttttgggaacagtaaaatggttcaatgtaaggaacggatacggtttcatcaacaggaatgacaccaaggaagacgtatttgtacaccagacggccataaagaagaataaccccaggaagtaccttcgcagtgtaggagatggagagactgtggagtttgatgttgttgaaggagaaaaggktgcggaggcagctaatgttacaggccctggtggagttccagttcaaggcagtaaatacgcagcagaccgtaaccattatagrcgctatccacgtcgtaggggtcctccacgcaattaccagcaaaattaccagaatagtgagagtggggaaaagaatgaaggatcggaaagcgctcctgaaggccaggcccaacaacgcsggccctatcgcagscgaaggttcccaccttactacatgcggagrccctatgcgcgwcgaccacagtatyccaacccccctgtgcaaggagaagtgatggagggtgctgacaaccagggtgcaggagagcaaggtagaccagtgagacagaatatgtatcggggtyacagrccacgattccgcaggggmmytcskcrcsmrrgacagcctagagaggatggcawtgmarakgacarwkwawwtyamrgaratkmracyyawrrwcagcagscacytcaacgtcggtatcgccgcaacttcaattaccgacgcagwcgcccagagaaccytaaaccrcamgatggcaaagrgmcaaaagcagccgatycaccagytgagaattcgtccgctccyraggytgagcasrrmrkgsytrrgyaradgccggcttaccatythwmccatcatccggtttggtcatccaacaagaagaaatgaatwtgramttccmgcawtaaraaatgamcaaagdttggagytgaagmccttawgtgcttkytttytgcccgttgwccmgatccaytagaactgtytscatkwtytatgcagcmtgggskttwwatwatttttacytaaaratgtctcttkttggtamtgmcaaacgtgttttttwwraaraaaaaaaaaaarvmctsskkyybytcrwkacacctttaacggtttttaaattgtttcatatctggtcaagttgagatttttaagaacttcatttttaatttgtaataaagtttacaacttgrwwwwwwmaaaaaarwmaacaaactgyaagcacctgttaataaaggtcttaantggwhwwhaaaamrraawwmaaaaa

SEQ ID NO: 337 - DNA, 1977 bp, Rattus norvegicus
gggcatgagtggctcggctctgagcttcaccatattcccaggaagtatccttgggttcctccaaatagccactgtgctcactgtgctcctgctgctcctcaagacagcccagttctacctgcacaggcgatggttactcagagctacccagcagttcccatccccaccttctcactggttctttgggcataagatcccaaaggaccaggattttcaagatattctaacacgggtaaagaatttcccaagtgcctgtccacagtggctctgggggagcaatgtgcgaatccaagtgtatgaccctgaatacatgaagctgattctggggagatcagacccaaaagctcatggytcctacagatttctagctccctggattgggtatggtttgcttctgctgaatggacagacatggttccagcaccgacgaatgttgactccagctttccactatgacactctgaaaccttatgtgggcatcatggcagactctgttcgcataatgctggataaatgggaacagattgttggacaggattccaccctggagatcttccaacacatcaccttgatgaccttggacaccatcatgaagtgtgccttcagccaagagggcagtgtccagttggacagaaaatacaagtcctacatcaaggcagttgaggacctgaacaatctcttttttttccgtgtacagaacatgtttcatcagaatgacttcatctatagtctgtcctctaatggccgcaaggcccacaatgcctggcaacttgcccatgattacacagaccaagtgatcaaatcaaggaaggctcaacttcaggacgaggaagagttgcaaaaggttaagcagaaaagacgattggatttcctggacatccttctgtttgccagaatagaaaatggaagcagcttatctgataaggacctgcgtgctgaagtggataccttcatgttcgagggccatgacaccacagctagcggtatctcttggatcttctatgctttggccacaaatcctgaacaccagcagggatgcaggaaggagatccagagtctcctaggagatggagcttctatcacctgggacgacctggacaagatgccctacaccaccatgtgcatcaaggaagctctgaggatctacccacctgtaacagctgtgagcagaatgctcagcacacctgtcaccttcccggatggacgctctttacccaaaggtatcacagtcatgctctccttctatggccttcatcacaacccaactgtgtggccaaatccagaggtgtttgacccttatcgatttgcaccagagtcttcccgacacagccactcattcctgcccttctcaggaggagcaaggaactgcattgggaaacagtttgccatgaatgaactgaaggtggccgtggccctgaccctgctccgctttgagctgctgccagatcccaccaggatcccaatccccataccaagactcgtgttgaagtccaagaatgggatctacctgcgtctcaaaaagctccaataatcttgacagcacaagacagctccaacagcatgctgtctgccatttgtctttctgtcagtcactcttgtccccactccatctgctcacatctcattctttcttctcaccttgttcacctccacccaccttmtgctgtgcttctggtctccttgtctgtcagtctttctatmtcgacttctggaakttctacctgcttttctctctacctggcccctacctgacttcatgtttgaccttgaccttaatgatctccctaaattacaccstgccttctcttstgcatatttccttstattmtaytgtttgtctgtgcttaaattgagctttataccaatgtcataattgattayaatagaagtattgccctatgattcgatataccaggtgttwttcatgatttcattagaataaagctcaggtcattgcarwaaaaaaaaaaaaaaaaa

SEQ ID NO: 338 - DNA, 2907 bp, Rattus norvegicus
acgatggctgccgtgccgggctgtcctcacaacgcctgctcaggaactccgtgagccgcatcgcatcagagcttctggaccagctgctgactctagggcgtcgtctcgcactgctgctccaggctcgctgtcaggcggtctgcgttctcccccacccccaggggagggcgggtccgcgcgggttgcggacagcccggactaggcccgcggctccggtggggacgtcgctgcgggcggcactgctgctggcgtccaagatgtcgaccaagaatttccgagttagtgacggggactggatctgccctgacaagaagtgtggaaatgtaaacttcgccagaagaaccagctgtaacagatgtggtcgagagaagacaactgaggccaagatgatgaaagctgggggaacagaaataggaaagacactggcagagaagagccggggcttatttagtgccaatgattggcagtgcaaaacttgcagtaatgtgaattgggctagaagatcagagtgtaacatgtgtaatactccaaagtatgctaaattagaagaaagaacaggatatggaggtggttttaatgaaagagagaatgttgaatacatagaaagagaagaatctgatggggaatatgatgagtttggacgtaaaaagaaaaaatacagggggaaggcagttggtcctgcatctatattaaaggaagtcgaagataaagaatcagagggagaagaagaggatgaggatgaagatctctctaaatataagctagatgaggacgaggatgaagatgatgctgatctctcaaaatataatcttgatgccagtgaagaggaagatagtaacaaaaagaaaagcaataggcggagccgctcaaagtctcgatcgtctcactcaaggtcttcatcacgstsrtcctsssmmwmaartkcwmsgtsywgktccaggtcccgttcaagaagctcttccagctcgcagtccaggtctcactccggttccagagaacattccagatcccgtggttcgaaatcaagatccagctccaggtccacaggggctcttcttccccaagaaaaagatcttactcgagttcttcatcatctcctgaaagagacaggaagaggagtcgctctagaccttcttcaccagctgttcgcaaaaaaagacgaacgagatcacggtcacccgaaaggcaccacaggtcgtctccggatcaacccattctggttcccgttcaagttcaaaaaagaaataatgtattaaaatttacatctttaaaaaacattgagtacagtgcatgaagcatattttttaggaagttgatgtctcatttggtcagaagtactacatctgctagtagaggtgcatgcctttattgcttttcaaaacaataaaactgttcatttgtgaaactgaaagtaaattgcattttaagccatactgtkccccagataaatgctctgtccattatttacaaccatttacttcgtttaaaaccatcctagcgataacggagtacttttgtkycctactttaaatcctgtccttttcatttctaaatgttctattggcagagacggttgcctgggcttgcctggacttcagacacataggcaaagctagtaagctagttggagtaaccagttcctgttcatgtgggaatagtagtcaacctggttatgttctttacctatgccagtaatttcttaccagaggtaaagtacattgcaaagctgacaactgggaacaagctgagggtgccttagaatcattgtctcttaccagctttacacctcttaatgcaagaggattatagaaattacagaaggaaagggaaggttaaccacatattacttcaaaatgtctttctcaaagtttaagaaatgtggatatcctttaaataaatctagttaccaaatgttgtacttgattgataaaagatttttaaaaaggctaaatcatagttaatgagccaattgatgagagcttttgaaacttgtttctcagtgacaggctaacaaagacatgaatttaagtgaacatttgccttgtgatgtctgatttttaacattgtagatatctaagtaacagaagaattcttacttccccacaatttaagcaaaatcatttttctcacctggaaaaaaaaacatatggcttaaaatgctttcagagttttatttctcaaattaaaatctggtcacttgagatccattttgttctctggttwaamrgykmwaaggtttctcttaacagtcttttcagcagcaaaagcaaggtaagtatataagggacaacagttatgctggggctccttgtgagggaattacttcctgtttctcctttagwatttgtctgctgcagtttaaatataagtaaagccttctgagatgtttagtagacagaksrmacgaaabgkywykwktttaaagtgagtgtttttcttytcaactgatctaaagatgaaaacaaaatatcgtacgtagaaatattttggyaakakkykkacamgmkktcctgtgtywyttgtcytawtttccttgmtgcatttactgtaggttgcacacgaactcttactctcttgtaattgtgcctcagacttctcgaaagtcgactttctgagttgcccagatcttctagatcckacgtgttagccttggwyyrtyhttgtgctttctgtatttaaaacttgagctgtactaggcaaatgcaarattawaaatttagctaataggarkttacaaacagttcaratgattatgatttgatttggtttaattgarctgtactarttcawttcawaaggaaatgatactgtagacaaatgtaaataaaatctgtgagtcaammawmaarwrwwrwwwattagaaataaactaggatgttctaagctttgamwraawrwmmwaarmwc

SEQ ID NO: 339 - DNA, 1723 bp, Rattus norvegicus
taatgtccagggctccaggaagagatgtccttgtggctggaggccgcagtgcctgatgtttctcctgactctgcaacggagttgtggaagacagaacctcaagatgcaggagaccagggaggcaacacttgcatccttagggaggaagccaggatgccccaatcaactgggggtgctttaaggatagggttggagtcatccgagcctacagccctgctccccagggcagagaccctcccagagcctacagaacttcgtccacagaagcggaaaaaggggccagcccccaaaatgctggggaacgagctatgcagtgtatgtggggacaaggcctctgcgttccattacaatgtgctgagctgcgagggctgcaagggattcttccgccgcagtgtcatcaagggagcacgctacatttgccatagcggtggccactgccccatggacacctacatgcggcggaaatgccaggagtgtcgccttcgcaaatgccgccacgcaggcatgagggaggagtgtgtcttatcagaagaacagatccgcttgaagaaactgaagcgtcaagaagaggagcaggctcaagccacatcggtgtccccaagggtttcctcaccgccccaggtcctgccacagctcagcccagaacaactgggcatgattgagaagttggtggctgcccagcaacagtgtaacaggcgctccttctctgaccgacttcgagtcacgccttggcccattgcacccgaccctcagagccgggaagcccgccaacagcgctttgcccactttactgagctggccatcgtgtccgtgcaggagattgttgactttgccaaacagctccctggcttcctacagctgagcagggaggaccagatcgccttgctgaagacctctgcgatcgaggtgatgcttctggagacatcgcggaggtacaaccctgggagtgagagcatcaccttcctcaaggatttcagttacaaccgggaagactttgccaaagcagggctgcaggtggagttcattaaccccatctttgagttctccagatccatgaatgaactgcaactcaatgatgctgaatttgctctgctcatagccatcagcatyttytytgcagaccggcccaacgtgcaggaccagctccaagtagrgrgactgcaacacacatwtgtggaggccctgcatgcckwkgtytccatcaaccacccccasgaccgaytgatgttcccacggatgytaatgaagytggtgagcctccggactttgagcagcgtccattcagagcaagtgtttgcacttcgcctgcaggacaaaaaamttccccctytgctytccgagatytgggatgtccmcgaatgactgtttyyccgtgtcctctgtgttggccacgcagctgaagcttactgaytgcttcctagaggtggrgcagactgaggrgggcaaacmttcytgggcgytgggtgaaagrgacccttgcwtggcaytaaagrgrgtcaaagggttgggtgttttktggctgytgggcagttggggacctactaacgttgtwtkccatytgaaggccttgttgacycaaccaaataaaytagccmggrgrgcmamwwwrwrmarrrwwmwtcaggccctgcccaaaaaaaaaaaaaaaaaacgactaacgttgtatgccatctgaaggccttgttgacccaaccaaataaactagccaggagagccactttgt

SEQ ID NO: 340 - DNA, 3429 bp, Rattus norvegicus
aagcgggcagggcggggcgcgccyagcgggagcgagcccggcgcccaccgcagagactgtcgcctggtgcctaggttcccaacaggaatatccacggactgaagtgatggagcgcagtccagccgtctgctgccaagaccctcgagcggaactggtagagcgggtggcagccatcagtgtggcccacctagaagaggcagaggagggcccagagcctgccagcaatggtgtggaccccycaccccgggccagagctgcctctgtgatccctggcagtgcttcaagacccacaccagtgcgtcccagcctctctgctagaaagttctccctgcaggaaagaccagcggraagctgtctagaggctcaggttgggccttactctacaggacctgccagtcacatgtctcctcgggcttggcggagacccaccatcgagtcccaccatgtggccatctcagacacagaggactgtgtgcaactgaaccagtacaagctgcagagtgagattggcaagggtgcctatggtgtggtgaggctggcctacaatgaaagggaagacagacactatgcaatgaaagttctttccaaaaagaagttactgaagcagtatggctttcctcgccgtcctcccccgagagggtcccaagctcctcagggagggccagccaaacagctgctgcccctggagcgtgtataccaggagattgccattttaaagaaactggaccacgtgaatgtagtcaagttgatcgaggtcctggatgatcctgctgaagacaatctctatttggtgtttgacctcctgagaaagggaccagtcatggaagtgccctgcgacaagcccttcccagaggagcaagctcgcctctacctccgggacatcatcctgggcctcgagtacttgcactgccagaagattgtgcacagggacatcaagccgtccaatctgctccttggggacgatgggcacgtgaagatcgccgactttggtgtcagcaaccagtttgaggggaatgatgctcagctgtccagtacggcagggaccccagcattcatggccccggaggccatytctgacaccggccagagcttcagtgggaaggccttggatgtatgggccactggggttacactgtattgttttgtctacgggaagtgcccattcattgatgagtacatcctggccctgcacagaaagatcaagaatgaggccgtggtgttccctgaggagccggaggtcagcgaggaactcaaagacctgatcctgaagatgctagacaagaatcctgaaacaagaattggggtgtctgatatcaagttacacccttgggtgaccaagcatggagaggagcccctcccttcagaggaggaacactgcagtgtggtagaggtgactgaggaggaggtgaagaactcagtcaagctcatccccagctggaccactgtgatcctggtcaagtctatgctgagaaagcgttcctttggaaacccatttgagccccaagcacgcagggaagaaagatctatgtctgcgccaggaaacttactgttgaaagaaggatgtggagaagggggcaaaagcccagagcttcccggagtccaggaagatgaggctgcatcctgagtccctgcatgtgcccagggccatcggcagcatgctcattccgctcctccagaggcccaccgccctcatgcaatcatcgcccctgcaggcagggggctggggactgcagcccctctcctggcccccctcacccattgtgctgcatgacctgcgcacaggcatatccagggacaggattggaatgtgtatcatttggggctcgggggtcccggttggttctctctgttctgatctatcttgtggggaatattagaaaccctacctgactggctggtgaggcccagggcagaaggcaagagaccaaaatagcaggtggagacctggtgggctgcttctcagagaactcccatagtgatcggtggcctgcccagctgctgcacacgaggagtgattgtgtcacttctgtgtggaaggtgctgagtsctggagtcctcagatctctagtgtggatgctacaagtaatgaggcgtgcctgggagaagactgatcttggagaatccagattcctctcattgtcttttacctgagggcttgggtgggagcggctgttatggagagcatcttctggctttgggtagtccgtggtacactgtacggcagtcacgaggatctgacattcatagactgtgttttacacttggcactygctggagaaaggaccaaagtgaatccagcttagagcatagacctgagcctggagcagtgtacttctcctgccaacctcccttcctctctcacggatctccagaatgaaggttacagaacaccaggagtgacaaggagggccacggactctcagcactgtggccctgcagatgtggaagtaactgggatctaggygctgagccgacactggcttactcactacatgctctgatggaggaggctcagccagatgagggaccgtacaagacgcactcctgtcaggctggtggcccttctgtcagttgcttcagtacaggacatcagacagtcagcccacacaggtcagagctgcacagttgggacacacgtggacactgccctttcagaacagatgtcagctctctggattctgtggtcgtctggctattctaatgtttactgataatgctcatagggattggtccccaaagggagatgagcaggactcaggtagccctctctgaaagcctcccataagagatcctggctgcccacatgggtttcaagaatgcaggagggctaggctagaaaagagagaggctgtgcgggagcgctggttcccactcttatcymwgtkcscaygrgwgwrcattgctccttcatgtgcacatgcgtgtgtgtgscmmkmkgctgtatacagcacacttgcatgtctcatactggcacatgcatctgtaatatagtttctatgtcaasttatgcctaggagcagaaggtagcccattgtcmaagggctcccatttcaacccaactcctytgcactaagkcagccagtgtaacccagggcttgaaaacaawtwatctaatcctatctmtaagaatacttttatagagtgaataggaggcaagttatgccaaccaataaayagcaaagagtcagggagcttcaccgwtgggacccacacaggaaaagctcggagttgggtggctggctcattgtccccagcagagccaggaaggcatgctcactgtcacctgttgttgagagctttggttggctttggttttgaatgtmgcacaagtgaacaaactccataagagtgtttataaaaattaacttcttaggaagtgaattaaaaacaataaaagccctttgttgrgttaaaaaaaaaaaaaaaaaa

SEQ ID NO: 341 - DNA, 981 bp, Rattus norvegicus
  misc_feature (451)..(451): n is a, c, g, or t
tggatcccggccgggggctctactctgggcggttcccgctccacttcccagacgctcagagttggagacccttgtccggccttgtgcgcttcattggggaaatcccctcttgatgggaggctcttcgccaggacgggacctggttccgctttcaggaggccatccccacacccctccaagtagtcaaccgggagtgtgcctrtmrsatytgrsvswgmssccawgwwkwhsvmdsbvgvsrcsarvttcvgmsgmraakctccgssgyrckwdsaarattcggcktcacccgtaatccaccsccatgsccgaggaagscatagctgctgraggtgtaatggacgtcaacactgytstacaagagktgytkaagaccsccytcatccacratgscmwasmaygtsrcmkasgmrragctgccaaasccttmracmagckccaagcccatctntgsgkgcttgcatmcaactgtgatgagcccatgtwwgwcaagcyggtgraggcgctbtbksccsaschccaratcamcstgataaaggttgrtgmcamcaagaaactaggggaatgggtaggcctytgtaaaatcgatcgaraggggaagccacggaaagtggttggyyvcaghtgcgttgtagttaagkastatgrymawgaatctcagrccaavgatgtcatyraggagkrsttyaaatgcwmsaratgartaaayamaattywggytcmwhhwdwaaaaaaaawwwwwmwwhmtttkygkyccsycryrmcagacaacatagccctcgagggggggcgcggtgcccaattggccctatagagaggcggattacaataaacggggcgcggtttacaccggcggggactgggaaaccctgggggacccacattaaaacgctggagaaaacaccctttttccattggggaataacaaaaaggccgccccgatttgccttccaacaatgtgccaccttatggggaggggaa

SEQ ID NO: 342 - DNA, 2884 bp, Rattus norvegicus
gtggaggaaagttgcgtgtggcacagacccgacggcgcagcgccacagcgaccgggggatcgtgtgtcttggaaaaaaaagtcgctgtccccctaagcgagacccacaagcgagcgggccccgtgggcccggggacgacgccccctctgcggcgtggactttgtcggtggccttctaggaggaggaatatggcatctaaagggtccccttcttgccgtctggttttctgcctcttgatctccgccgcggtcctcagaccaggcctcggatggtacactgtcaactcagcatacggagataccattgtcatgccttgcagactggatgtacctcagaacctcatgtttggcaaatggaaatatgaaaagcctgatgggtccccagtatttattgcattcagatcttctacaaagaaaagtgtgcagtatgatgatgtaccagagtacaaggacagactgagcctctcagaaaactacactctgtctatcaacaatgcaaagatcagtgacgaaaagagatttgtgtgcatgctagtgaccgaggacaacgtgtttgaggcacctaccctggtcaaggtgttcaagcaaccatctaaacctgaaattgtaaacagagcagcgtttcttgaaacagagcagctaaaaaagttaggtgactgcatttcaagagacagttacccagacggcaacatcacgtggtataggaatgggaaagtgctacagcctgttgatggagaggtgtccatactttttaaaaaggaaattgatccaggtactcagttgtataccatgacttcctccttggagtacaagacaaccaagtctgacatacaaatgccattcacctgttctgtgacatattatggaccttcgggccagaaaacaatttattctgaacaagcaatctttgatatttactatcctacagagcaggtgacaatacaagtactgccaccaaaaaatgccatcaaagaaggggacaacatcacccttcagtgcttggggaatggcaacccacctcctgaggagttcatgttttacttaccagggcaggctgaaggcataagaagctcaaacacttacacactgacagacgtgagacgcaatgccaccggggactacaaatgttctctcatcgaccaaagaaacatggcagcttcaacaaccatcactgttcactacttggatttatccttaaacccargtggggaagtgaccaagcagatcggtgataccctgcctgtgtcttgcacaatatctgcaagtaggaatgcaactgtggtgtggatgaaggataacatcaggctccgatctagtccatccttttctagtcttcattatcaggatgctgggaactatgtctgtgaaactgctcttcaggaggttgagggactgaagaaaagggagtcgctgaccctcatcgtagaaggaaaacctcaaatcaaaatgacaaagaaaactgatcccagtggactgtctaagactataatctgccatgtggaagggtttccaaagccagctatacagtggaccattaccggcagtggaagcgtcataaaccaaacagaggagtctccttatattaatggcaggtattatagtaaaattatcatttcccctgaggagaatgttacattaacttgcacagcagaaaaccaactggagagaacagtaaactccctgaatgtctctgcgataagtattccagaacacgatgaggcagacgatataagtgatgaaaacagagaaaaggtgaatgaccaggccaaactaattgtgggcattgtggttggtctcctcctcgccgccctcgtcgccggtgtcgtctactggctgtacatgaagaaatcgaaaactgcatcaaaacatgtaaacaaggaccttggtaatatggaggagaataaaaagctagaagaaaacaatcacaaaacagaagcctaagagaggagttgtttagatgtcctgagaaaaaaacatataaagaaattgaagcatgaacgtgattgtatttaagacatatacaaagacaatgacagcaattcatggttcaagtattaagatgttcatcctactaagctgtcctgggatcttrgagaattatctcaagtaaaacaatgaaataaagttataaaattacaacaagattwrkyarccmtsataataggkmatawgttgkryykcrwwkgwttttyyttttctgtaaatgtctgcactgaggatttctttcagtttgccttttatgtaaattttttacgtagctatttttatacactgtaagctttgttctggsagwggctgwtrattggaksdrcmryrtaakgtttwtttyaattktttwtatggatagtytgagcaggtkcggttctgattctgattgctatcmgtaatgccccmaactttcttgtgaggatctgaaacccaaaggyrgsarttmkgagakkgggacatggatcttgcccaatcagaagctgktttttttttwwwwaaaaaaaacctgsagagtcaggagcaccataagatatgatggtctctatgtgccaacgggttccccgaagcgggtcacawacacatacggcaacaccacatgtgaatgatacttttaaactgacaatttcgtcytctctgaaaaaagacatacacagagtttgtataacactttacttaacgacacttgctagaraattacmtystgttttwaaaaaaaatwwggaaaatgtaaagaagaatatctaatatgtcagagaaagttgkaaacaaatcacagctcgcatccccatagtcgcagatcacgatgtaaatcactgtaattaaaattggtgttaaatcctttgggttatccactgccttaaaatgacacttatttccttaaaaaaaaaaaaaaaaaa

SEQ ID NO: 343 - DNA, 3901 bp, Rattus norvegicus
atcaacaaccagaccccccagaactcccagggactaaaccaccaaccagagagtacacatggagggacccatggctctagccacatatgtagcagaggatgggccttgtagggcatcaagggagaagaagcccttggtccggtaaaggcttaatgctgcagtgtaggggaatgtcagggcagagaggtaggagggagtgcatctgtgggtgggtggggaggtcagtcgcagccgcgcggccctggcgcgcgtcacgagggcgagcgggcggcgagcagggggtggggccgcggccggaggggcccgagcggctgccgagcaaaagccggaggaacggggcgcgggcggctgcggtcccggtggcggcgggggaagatggtggcgctggagacgggagcagctggagagcagctttattcccaggcttggcacggtcgctgtcactagcgccgcctgctcccgcgggcccgcgacccagctgtcaggcaaggccccgtgaagccaaaatgagcacacagtgagccagcgcagcctctcgccagccatcccccgacgcccaccatgaaccacttggagggctccgcggaggtggaggtggccgacgaggcgccaggaggggaggtgaacgagtccgtggaggccgacctggagcaccccgaggtggaggaagagcagcagccgtcgcccccgccgcccgcaggtcacgcacccgaggaccaccgcgcgcatccggcgccgccgccgccgccaccaccgcaggaggaggaggaggagcscggmgagtscctggctcgctcgsccagcaccgagagcggcttccacaaccacacggacaccgctgagggcgacgtgctcgccgcggcccgagacggctackaggcggagcgcgcgcaggacgccgacgatgagagcgcmtacgccgtgcagtaccggcccgaggccgaggagtacacggagcaggcggaggccgagcacgccgaggcggcgcagcggcgcgcgctgcccaaccacctgcacttccactcgctggagcacgaggaarccatgaacgccgcctactcggrctatgtctacacgcaccggctcttccaccgcrccgaggacgagccctacgccgagccmtacgccgaytacggcggcctccaggagcacgtgtacgaggagatcggggacgcgcctgagctggaggcgcgcgacggcctgcggctmtatgagcgggagcgcgacgaggcggccgcctaccgccaggaggccctaggcgcgcggctgcaccactacgacgagcgctccgacggcgagtccgacagccccgagaaggaggcggagttcgcgccctacccgcgcatggacagttatgagcaggaagaggacatcgaccagatcgtgsccgaggtcaagcagagcatgagctcgcagagcctsgacaaggcggccgaagacatgcccgaggcggagcargacctggagcgcgccccgaccccgggagggggacaccccgacagccctgggctgccagcacctgccgggcagcagcagcgagttgtgggaaccccgggaggcagcgaggttggtcagcggtacagcaaggaaaagagggatgccatctcgctggccatcaaggacatcaaggaggccatcgaagaagtgaaaaccaggaccatccgttcgccttacacccccgacgaacccaaagagcccatctgggtcatgcgccaggacattakccccacaarggactgtgacgaccagaggcccgtggacggagattctccgtctcctggcagttcctcacccctgggtgctgagtcatcamtcryrccccttcatcccggtgaccccacggaagcctccactaataaagagtcaagaaaaagcttggcttcattcccaacctacgttgaagttcctggaccctgcgaccctgaagacttgatcgatggaattatttttgctgccaattaccttggttccactcagctactctcagacaaaactccctccaaaaacgtgcgcatgatgcaggcccaggaagcagtaagccggatcaagacggcccagaaattagccaaaagcaggaagaaggctcctgaaggcgaatctcagccaatgactgaggtggacctcttcatctccacccagaggatcaaagtgttgaatgcagatacacaggagcctatgatggaccaccctctgaggaccatttcctacatcgcagacattgggaacatcgtcgtgctgatggcccgcaggcggatgccccgctccaactcccaggagaatgtggaggcctctcacccatcccaggatgcaaaacggcagtacaagatgatctgtcatgtctttgagtctgaggacgcccagctgatcgcacagtccatcgggcaggccttcagcgttgcataccaggagttcctcagggccaacgggattaacccagaagacctgagccagaaggagtacagcgacctgctcaacacccaggacatgtacaacgatgacctgatccacttctccaagtcggaaaactgcaaagatgtcttcatagagaagcagaaaggagaaatcctgggagttgtgattgtggagtctggctggggatccattctgccaaccgtgatcattgccaacatgatgcacggaggccccgccgagaagtcggggaagctgaacatcggggaccagatcatgtccattaacggcaccagcctggtgggcctgcccctgtccacctgccagagcatcattaagggcttaaagaaccagtcccgcgtgaagctgaacatcgtgaggtgccccccagtgaccacagtgctaattaggaggccggaccttcgctaccagctgggtttcagcgtgcagaatggaattatctgtagcctcatgagagggggaatagctgagagaggaggtgtccgcgtgggacatcggatcattgaaatcaacggccagagtgtcgtagccacaccacacgagaagatcgtccacatactctccaatgctgttggggagatccacatgaagacaatgccagcagccatgtacagactgctgacagcccaggagcagcccgtttacatctgagccgcacctccgcggcgtggcagcatgcatggaggactctcctcaccgtggttgtgtttcttgtgctgcatctgtgtgtccactgagacattcccctctcgcacccaacgtttggttttacacaggaagagaagaatcggcaagggcctctttgctctctgtctctctccagttcgcttttttatgttccatccttaacaccagggaagtttggtgtgtgccctcctgagggtggagagcagctaatatacctaggatcatggtggaggcctttgggggatcttaaagtggttgttactgcccaaggaggcatcatccctccccaagagacacacacttccctgaaggagctctcagaggcagcacaggagatgactgagcagtgcctaaaactcacttgctgatctctccgccctcctcacctcactgatggaaagatggttggtgacaggtgacagcactgaatatccttaaagcccacatctttaaggatgtttgctgcctgctgtgtagttggagccccgcacattatttctgcccagaatttctgagccacttttaaatcccttccctagtttcttttagttgcaatgtgtgtgctaattcaggcctaacttctgagaaacaaggacaaggatgctgtgacacccacctcagaggtcctggcaagtcacagggcctccaaggttccccaggtttccaaggttaccaattggaggataaccactggcaggtactgtcctaacgtacttgcacaggcgcttatgtgtaacacacacacacacacacacacacacacacacatgccacccacacacaa

SEQ ID NO: 344 - DNA, 2305 bp, Rattus norvegicus
gaattcccccggttcttctctctaggtcccctatctccgccccgggcctgaggggcgcaccgaccgccaccatgagttcgttcagctacgagccgtacttttcgacctcctacaagcggcgctacgtggagacgccccgggtgcacatctccagcgtgcgcagcggctacagcacggcgcgctctgcgtactccagctactccgcgcccgtctcctcctctctgtcggtgcgccgcagctactcatccagctccggctctttgatgcccagcctggagaacctcgatctgagccaggtagccgccatcagcaacgacctcaagtctatccgcacacaggagaaggcacagctgcaggacctcaacgatcgcttcgccagcttcatcgagcgcgtgcacgagctggagcagcagaacaaggtcctggaagccgagctgttggtgctgcgccagaagcactcagagccttcccgcttccgcgccctgtatgagcaggagatccgtgatctgcgactggcggccgaagacgccactaacgagaagcaggcgctgcagggcgagcgcgaggggctggaggagactctgcgcaacctgcaggctcgctacgaggaggaggtgctgagccgcgaggacgccgagggccggctgatggaagcccgcaaaggcgcggatgaggctgcgctcgcccgcgccgagctggagaagcgcatcgacagcctgatggacgagatagccttcctgaaaaaggtgcacgaggaagagatcgccgagctgcaggctcagatccagtatgctcagatctccgtggagatggacgtgtcctccaagcccgacctctccgccgctctcaaggacatccgcgctcagtacgagaagctggccgccaagaatatgcagaatgccgaagagtggttcaagagccgcttcacggtgckaaccgagagcgccgccaagaacaccgacgcagtgcgcgctgccaaggacgaggtgtcggaaagccgccgcctactyaaggctaagaccctrgagatcgaagcctgccggggtatgaacraagctctagagaagcagcwssaggagctggaggacaagcagaatgcagacatcagcgccatgcaggacacaatcaacaaactggagaatkagctgcgaagcacgaagagcgagatggcyaggtacctgaaggagtaccaggacctyctcaatgtcaagatggcattggacattgagattgcagcttacaggaaactcttggaaggcgaagaaaccargctcagtttcaccagcgtgggtagcataaccagcggctactctcagagctcgcaggtctttggccgwtctgcttacagtggyttgcagagcagctcctacttgatgtctgctcgagcattyccagcctactataccagccacgtscaggargagcagtcagaggtggaggagaccattgaggctacgaaagctgaggaggccaaggatgagcccccctytgaaggagaagmagaagargagragamgsagaaagagsmgggggagrmagaggaagrtgcwgaggmgrmasragctghcaarratgagycwgaasakgscmaagmagragamgghsgwgagrrwgaagmgsaagasaccmmmgartyagmagaggamgagmagamagasgarastgctgrsgakgagcmagctgctmmbamgmmagatygagccccmttccyaactatcccaggaaaaaagtctccccaaatcaggtcaacctcatcaccaaaccaaccagttgagttccagatcctatacagattaagaagtcaatatatgtataattctgagatgacttaggttggacattcaatgwwgwgctatgactttcctccttatgcagagwatctgyttgctwgcagagtggctwwctgscttgctgccaacctgwgcatggtccatgctwatgagttcakgawctacggbaatgtgaawyacacmgatgtttacamtaatartaataaaaaarccacacatacmcaacwtgaatwaatgaattcactaatgkkcatgtgcaacttcatggaaaaatartcatttgaaacttyarkggttagaaattaaagacctcgagktwtgtgcaataaatagtaaataaagttacagtggatgamamamamaacaaaatatatcttcacttgtccgtgtcttttttttcctttttaatatttctccgggggggggccggacccaatttgcctttagggggtggtttacaattactggccggggtttacaccgcgggactgggaaaccctggggtaccacctaat

SEQ ID NO: 345 - DNA, 4556 bp, Rattus norvegicus
gcggccgcagcctgggctcccgcggcggcggcggaggtcagcgccgacggcagcccgcacctgacggcgtgacggccacattgactcttcgtgcactgggcccagtctatcagatcttctgcactgtgtatctgcacagttgctgatatgtgttcaagatgagtgggatgggagaaaatacctctgacccgtccagggcagagaccagaaaackcawggaatgtccggaccagctcggacccagccccaaaaggakcacggwgaaacgtaaccgcgagcaggaaaataagtacakwkwkkwwytykywkwkytgatctttgcaaactttaatgatatcgacaacttcaacttcaaacctgacaaatgtgccatcttaaaagaaactgtgaaacagatccgccagatcaaagagcaagagaaagcagccgctgccaacatcgatgaakkgyaswmgtcmgatgtktcgtccacggggcagggcgtcatcgacaaggacgcactggggcctatgatgcttgaggcccttgatggkttyttyttcgtcgtgaacctagaaggcaatgtggtgttcgtgtccgagaacgtgacgcagtatctgcggtataaccaggaagaactgatgaacaagagcgtttacagcatcstgcatgtcggggaccacacggaatttgtcaagaacctgctgccaaagtccatggtgaatgggggatcctggaccggagaacctcccaggcggaacagccataccttcaactgtcggatgctggtgaagcctttgccagattcagaagaggaaggccatgataaccaggaagcacatcagmmatacgwgacgatgcagtgctttgctgtgtctcagccaaagtctatcaaagaggagggcgaagataagcagtcctgcttgatttgtgtggcaagaagagtccccatgaaggaaaggccagcccttccctcatcagagagctttaccacccgccaggacctccaaggcaagatcacttttctggacactagcaccatgagagatgccatgaaaccgggctgggaggatctggtaagaagatgtattcagaagttccacacacagcatgaaggggagtctctatcatacgccaagaggcatcaccatgaagttctgagacaaggcttggcgttcagtcagatctatcgtttttccttgtcagacggcactctcgttgctgcacaaacgaagagcaaactcatccgttcccagactacgaatgagcctcagcttgtgatatcgatacacatgcttcacagagagcagaatgtgtgtgtaatgaatccggatctgactggacaagcaatggggaagccattgagtccaatgagctctagcagccccgcccgtcaggccatgtgcagtgggaacccaggtcaggacgtggccctcggtagcaatatgaactttcccatgaatggcccaagggaacagatgagcatgcctatgggcaggtttggtggttctgggggcatgaaccatgtatcaggcatgcaagcaaccactcctcagggtagtaactatgcactcaaaatgaacagtccctcacaaagcagccccggcctgaacccagggcaacccagctctgtgctctccccacggcatcgcatgagccccggcgtggctggcagtcctcgcgttccacccagtcagttttcccctgcaggaagcttgcactccccagcgggagtttgcagcagcacaggaaatagccatagttacaccaacagttccctcaatgcactgcaagccctcagcgagggccacggggtctcgttagggccatcgttggcttctccggacctaaaaatgggcaattcgcaaaactccccagttaacatgaatcctcccccactcagcaagatgggaagcttggactccaaagactgttttggactttatggggagccatcagaaggtacaactggacaagcacaggccagctgccatcctgaagagcagaagaggcccaatgattccagcatgccccaggcggccagcgaggacagggctgagggacacagccggctgcatgagagcaaagggcaaaccaaactcctacagctgctcaccaccaagtccgaccagatggagccttcacccttgcccagctctttgtcggacacaaacaaggactccacaggcagcttgccagggcctgggtccacgcatggcacctcgctcaaggagaagcataagattttgcacagactcttacaggacagcagctcccctgtggacttggccaagctgacagcagaagccacaggcaaagagctgaatcaggagtccagtggcacggctcctgggtcagaagtgactgtcaaacaggagccagcgagccccaagaagaaagagaacgcactactgcgctatttgctcgacaaagatgatactaaagatattggtttaccggaaataacccccaaactcgagcggttggacagtaagacagatcctgccagtaacacaaagctaatcgccatgaaaactgtgaaggaggaggtgagctttgagcccagtgaccagcctggcagcgagctggacaacttggaagagattttggatgatttgcagaatagtcagttaccacagcttttcccagacacaaggccaggagctcctactgggtcagttgacaagcaagccatcatcaatgacctcatgcaactcacggctgacagcagtcctgtcacacctgtcggagcccaaaaagcagcactgcgaatgtcacagagcacttttaataacccacgaccagggcaactgggcaggttattgccaaaccagaatttaccacttgacatcacattgcaaagcccaactggtgctggacctttcccaccaatcagaaacagtagtccatactcagtgatacctcagccaggaatgatgggtaaccaagggatgttaggaagccaaggaaacttagggaacaatagcacaggaatgattggcagtagcacttcccggtccagcatgccttctggggaatgggcaccacagagtccagctgtgagagtcacttgtgctgccaccactggtgccatgaaccggccaatccaagggggcatgattcggaacccaacagcaagcatccccatgcgagccaacagccagcctggccaaagacagatgctgcagcctcaggtcatgaacatagggccttctgagttggagatgaacatgggaggccctcagtataatcaacagcaggcccctccaaaccaaactgccccctggcccgagagcatcctgcctatagaccaggcatctttcggcagccagaacaggcatccctttggcagctcccccgacgacctgctctgtccacatcctgcagccgagtccccaagcgacgagggcgctcttctagaccagctctatctggccttgcggaacttcgatggccttgaagagattgatagagctctggggataccagaactggtcagccagagccaagctgtggatccggagcagttctcgagtcaggagtccagcatgatgctggagcagaagccccctgttttcccacagcagtacgcatctcagacacaaatggcccaggggagctataatcccatgcaagatccaaacttccacaccatgggacagcggccaaattataccacactccgaatgcagccccggccgggcctcaggcccacaggcattgtgcagaaccagccaaaccaactgagacttcagctccaacatcgcctccaagcacagcagaaccgccagccgctaatgaaccagatcagcggcgtttccaatgtgaacttgactttgaggcctggcgtgccaactcaggctcctatcaatgcacagatgctggcccagaggcagagggaaatccttaaccagcatctccggcagagacagatgcatcagcagcagcaggtgcagcagcgaactttgatgatgagaggacaagggttgaatatgaccccaagcatggtggctcccactggtttaccagcagccatgagcaacccccggatcccgcaagccaatgcccagcagtttccatttcctccgaactacggaataagtcagcaacctgatcctggctttactggagctacaactccccagagtcctctaatgtctccccggatggcacatacgcagagtcccatgatgcagcagtctcaggccaacccagcctaccagcccgcctcagacattaacggatgggcacagggaagcatgggcggaaacagcatgttctcacaacagtccccaccacactttgggcaacaagcgaacaccagcatgtacaataacaacatgaacatcaacgtgtccatggcaaccaacacggctggcttgagcaacatgaaccagatgacaggccagatgagcatgacctcagtgacctctgtgcctacatcagggctgtcctccatgggtcctgaacaggtcaatgaccctgctctgaggggaagcagccttttcaccacaaaccaactgcctggaatggacatgatcaagcaggagggagatgggtctcggaaatactgctga

SEQ ID NO: 346 - DNA, 1894 bp, Rattus norvegicus
tttttttttttttttttggactaccaggaagaatgatctttattaaacatgctgtcctttcaaggaccattccattacccatgtsawgawrgaggtcagagtggaaacaggtgtgakcggaagcaacagaaggagtcatggytgccaaagtgtttgagtccatcggaaagttcggcctggccttagcagttgcaggaggcgtggtgaactctgctctatataacgtggatgccggacacagagctgtcatcttcgaccgattccgtggcgtgcaggacatcgtggtargggaagggactcacttcctcatccssyrsgwrcagaagccaatcatctttgactgccgctctmgaccacgtaatgtrccggtcatcaccggcagcaaagacttgcagaatgtcaacatcacahwacgtatcctcttccggccggtggccagccagcttcctcgtatctacamcagcattggcgaggactatgatgagcgggtgctgccatctatcaccacagagatcctcaagtcggtggtggctcgattcgatgctggagaattgattacccagcgagagytggtctccaggcaggtgagtgatgacctcacagagcgagcagcaacattcgggctcatcctggatgacgtgtccctgacacatctgaccttcgggaaggagttcacagaggcggtggaagccaaacaggtggctcagcaggaagcagagagagccagatttgtggtggaaaaggytgagcagcagaagaaggcggccatcatytctgctgagggtgactccaaagcggctgagctgatcgccaactcactggccaccgccggggatggcctgatcgagctgcgaaagctggaagctgctgaggacattgcttatcagctctcccgctctcgkwacatcacctacctgccagcagggcagtccgtgctcctccwkctcccccagtaaggccagccagccagggcctccatcgctytgaatgacgccttccttytgccccaccccagaaatcactgtgaaatttaatgattggcttaacatgaaggaaataaaggtaaaatcacttcawawmwmwwawwawmaaawraarmwwttattgttacactttttgcccactttcataacaaaattgccaagtgcctatgcagactggccttccaccctgggtgctggcagtcggcggaagaaaggcarggcartgtgtgtggtggacggkgagccagckggcagcctgagtagaccttgagcctccattctgccatatattgaagatttacagacagtggkgcacacacgtgaaccaaaagcaagccctcaatttttccagccatacgaayycggacasabgmrgcksasgagggcctragraagtgstctgtyttaactgtaagsccakwssytmttaaccgtgaccagcggaagcaggtgtgtgcgtgcgamtagggcatggagtgaakaatctgcccatcacggtgggtgggcmtaattttgctgcccccaccagagacytaaactttggatagacttggatagaataagaggcctggactgagatgtgagtcctgtggaagacttcctgtccaccccccacattggtcctctcaaataccaatgggattccagcttgaasgakwgcatctgcmrggrhwgarmacacmtgcyaagswvmygtsvrymtgmctwcycrswccctctyttmgagattgcccttccttcccaagggctstgggccagagctccgaaggaagcaatcaaggaaagaaaacmcaatgtaagctgctgtcaataaatgacacccagmccctcmarmhrmaaaaaaaaaaaaaaaaaatggaagcggccgcaagcttattccctttagtgagggttaattttagcttggcact

SEQ ID NO: 347 - DNA, 1169 bp, Rattus norvegicus
tctccgctcswcswssggtagcagccgccagcacagtgtccgctgctgggcggggtgtcggcggatcggtcggttggtttcggcttcggtgtcgctgcgtttgagttgggccgtcatggctgagttggatccatttggcgctcccgccggtgcgcccggtggccccgcgctcgggaacggggtggcgggcgccggcgaggaagacccggccgcggccttcttggcgcagcaggagagtgagattgcgggcatagagaacgacgaggccttcgccatcctagacggcggcgcccccgggccgcaggmacacggcgagccgccggggggtcctgatgcggttgatggagtgatgaatggcgaatactaccaggagagcaatggtccaacagacagttacgcagccatttcagaagtggatcggttgcagtcagagcctgaaagtatccgtaagtggagagaagagcagacagagcgcctggaagccctcgatgccaattctcggaagcaggaagcagagtggaaagaaaaggcagtgaaggagctggaagagtggtacgcaaggcaggatgagcagctacagaagacaaaagccagcaacagggtggcagatgaagctttcyryraasrascctkcgmwgacgtgrtwsgywadgkcasramsakmarcyayhshwkcwavagcchdvammaggcagcrgaagaagcctttgtaaacgacatkgacgagkswtmcccakkcactgagtkggagcggktggcccgchtgwstramttyamccysaagwccagcaaacwgkccaaasakstcyywsgcatsygctcagtcctcatctscmtgaagcaggcgcccytggtgcattgaagagccacccygtggaaacactacgtctccgatyttaatcctactcagtgaagctgttcacgcaattggattaattawgcckagttcttthkgwcsarrccwwdkgtybkbrgasktgatcaytgdktstgahtgcatstttcchkmaamtgtgttmtcsmtggcattcagagaagagagaggaarasgaagggaggggagcycccaacagwagcctcaacctgtgcttwtgtgcattattmtgagaataaawttbtgtttcmhvcawwwwaaaaaaaaaaaaaaaaaaaaaaatgttgtgcggccg

SEQ ID NO: 348 - DNA, 2007 bp, Rattus norvegicus
  misc_feature (481)..(481): n is a, c, g, or t
ctcgctgcggtccaagcaggtaaagcggggctcggcgaacgcgcgcgacccgaggggcgtggtccgcggtcccgggggtcccggcccggcccttcccgcttccctgtgtccccgcagacacttcgccatgggcaatacgagcagcgagcgcgccgcgctggagcggcaggctggccataagacgccgcggagggacagctcggagggcaccaaggatggggacaggcccaagatcctgatggacagccccgaagacgccgacatcttccacaccgaggaaatgaaggctccagagaaggaggagttcctggcgtggcagcacgacctcgaggtgaatgagaaagcccccgcccaggctcggcccaccgtatttcgatggacagggggtggaaaggaggtctacttgtctggatccttcaacaactggagcaaattgcccctcactagaagccaaaacaacttcgtagccatcctggacctnccggaaggagagcatcagtacaagttctttgtggatggccagtggacccacgatccttccgagccaatagtaaccagccagcttggcacagttaacaacatcattcaagtgaagaaaactgactttgaagtatttgatgctttaatggtggattcccaaaagtgctccgatgtatctgagctgtccagttcccccccaggaccctaccaccaggagccttacatctctaaaccagaggagcggttcaaggccccgcccatcctcccgcctcacctgctgcaggtcatcttgaacaaggacacgggcatctcttgtgatccagcgctgcttccggagcccaaccacgtcatgctgaaccacctctatgcactctctatcaaggatggagtgatggtgctcagtgcgacccatcggtacaagaaaaagtacgtcaccaccctcctctacaagcccatatgagaggatgagccagccgtgggccacgggacagcaggcgggagccgctgggctctccgtgtgcatgcgcatcctcactccgggacatctcacccccacatagtcctccttgaaggtctgtccaggcacagccagaaatcggatggacggcagaccgtggtcccagcaccgcaggcagtgcgccaggctctagtgctctaagcatcatccctctgctggcccgagatgtctacagccagacctgaatgctggttcctgctagaaaacctaggacaggaactgaagtcaccaragscctcatcatccctgctgaagcctggcttggaagaaagcagtgctcggtcttgcctgtccttccgaatcacagcagtagattgtagactccatggaatttcagtgtccaatttccagatgcagcttcgcaatcgattcctgacactgtgcactgagaccttcttaaccasagwggctggctgtccactctcacttaaggcaataagtcaccaggacgagactatrggtcatgtgactactgagcaataatcgttstcaaacmgacwtcagraaccactsccatttytccatcaagccagacgatcctkaggactgaccaccatgggaggttgtccaccttatttcagttgcagtgtyggscrhgktassgtgacaacctggtygaagtgcccgccctctttttagttctagcacgtgctactcagctgggggccgtgtctccagtgagcagagagtgtacacggtggttactattgccygatcctaagagagcttggcaccytgcggcagactgctaggttccagcagggttggcacgagtgaacctatgtgtgctcagtgtgatttccacagtgatgtcacmgacgyrcccattggtacaggctcctgtcacctgtcagcataggtaggcacaagctctgtggtgtccgctatttggttaaacctgagttttgggtaccttttgttactgttttcaaaacacggacttgctgtcatcttgatgtacaagtttcaataaagctttgkaaaataamwrraaaaaaaaaaaaaaaaaa

SEQ ID NO: 349 - DNA, 3030 bp, Rattus norvegicus
gaattccggcgtccgcccgggacgggcgcggctccggcgacatgtgcggcgggcggggaggcatctggctggctctggccgcggcgctgctgcacgtgtccctgcaaggcgagttccagaggaggctgtacaaggagctggtcaagaactacaacccgctggagaggccggtggccaacgactcgcagccgctcaccgtgtacttctccctgagtctcctgcagatcatggatgtggatgagaagaaccaagttttaaccaccaacatttggctacaaatgtcttggacagatcactatttgcagtggaacatgtctgagtaccccggagtgaagaatgttcgttttccagatggccagatttggaaaccagacattctcctctataacagtgctgatgagcgctttgatgccacgttccacaccaatgttttggtgaatgcatctgggcattgccagtatctccctccaggcatattcaagagctcctgctacattgacgttcgctggttcccttttgatgtgcagcagtgcaaactgaagtttgggtcctggtcctatggagggtggtcactggacctgcaaatgcaagaggcagatatcagcagctatatccccaacggagaatgggatctcatgggaatccctggcaaaaggaatgagaagttctatgagtgctgcaaagagccatacccagatgtcacctacacagtaaccatgcgccgtaggacactctactatggcctcaatctgctcatcccttgtgtactcatttcagccctggctctgctggtattcttgctgcctgcagactctggagagaaaatctctcttggaataactgtcttactttctctgactgtcttcatgctgcttgtggctgagatcatgccagcaacatctgattctgtgcccttgatagcacaatacttcgccagcaccatgatcatcgtgggcctctctgtagtggtgacagtgattgtgctgagatatcaccaccatgaccctgatggtggcaaaatgcctaagtggaccagaatcattctcctgaactggtgtgcatggtttctgcgcatgaagaggcccggagaggacaaggtgcggccagcttgtcagcacaagcctcggcgctgcagcctggccagtgtggagctgagtgcaggtgctgggccacccaccagcaatggcaacctgctctacattggcttccgaggcctggagggcatgcactgtgccccaactccagactctggggtcgtatgtggccgtttggcctgctccccaacacatgatgagcacctcatgcacggtgcacacccctctgatggggaccccgacctggccaagatcctggaggaggtccgctacatcgccaaccgcaaccgctgccaggacgagagtgaggtgatctgcagtgaatggaagtttgcagcctgcgtggtggacccgctttgcctcatggccttttcggtctttaccatcatctgtaccatcggcatcctcatgtcagctccaaactttgtggaggctgtgtccaaagactttgcttaatgttatcaagtaggaaatgcgcagataagaagagaatctggagggatgctccaagagtgtgccagctgcctgagtggttgctgagacttgctgatcctggttgcatgaagattcagctttcgtggttcgggtccctggagtcattcctctgccctgagaggaagatgaaagattcttcttcatcctttgtcatcacagagattttgccgttgctgcagtcagtgttaccgctgcgtgtgtcccgtcccactatggcccgctctctgaccctctgtgcactgctgcttgctggagaagactggactccagccgttgctgcccccttcattccctggtgactcttgctgccttaactggtcattttacagactgtagcttcacaggaatgccacctgcgtaaagctgctgtggactggggaattctgccctggttgtacagatctcagaaatggttccattgtctgctggttgttccagagaaaaatgactgatcctgaactgtcctggacttgacactttcgctgctattgtagcagccattactgctgcagacattgtgtctgcagtgtctggagttatcctcccccaatctattgttagacaaacacagtgggtaaactttctggagtagttactaacaattgggaattctaaattctattataggagcggcttgactacggcccttggtggtaacagctgaggtgaaccagatgaggtgcccgctatttatcgggagtggctctgtttggtgcagccctatgctgtggattagtgttcatgctgtggttggtttgcaaactcagatctcaacagaaacgtgacaaggccgttatcactcaagcacttgtggtcattgtacaaggggcctcccctggaatttggttatctatgctcaggaattagttggtatctgagttctctgctcttgcaccccatggatctgtggatccattgcactgggatgagagagactcaatgatcctttgatcagcccttccacatcgctgaggtttcctcattgcacgcgatagggtgatcatgatttgttataaaataaatgatttgtgataaattataaataaatagggggagatgtagagggccgctttaacattcgccaccacaagatggcgctggcttccactgtgccccacggggaaggccaggatagcttctgccattacaagatggcgctggcctccgccgccgagccgacttcctttcaggaagttaactgtgtgcgcatgtgcaagagtgccttcgtgccaggtctttgcccactctggggcgtgcctaatgagatcatgggtaagcgaccaatcaggtgtggatgtgccgcactagggtgtatatgagccgcgccatgcaggcgcgcggggctctctttaagatttaataaaagttttggctgctgtaaggaaaaaaaaaaaaaaaaaaaaaaaaaaaaaaaaaaaaaaaaaaaaaaaaaaaaaagccg

SEQ ID NO: 350 - DNA, 645 bp, Rattus norvegicus
gcrgcrcrwssgcttgcctggaggaactaagctacagtctctckcggctgctggcctgkatatggaccctgagasctgcccctgwcctactggtggwtcctgcacctgctcggacaaatgcaaatgcaagggctgcaaatgcacgaactgcaagaagagctgctgctcctgttgccctgcaggatgtgagaagtgtgccaaggactgwgtttgcaaaggcgaagagggggccaaggccgakaaatgcagctgctgccagwgaggactcccacacagcctatgtgaatagwgctgcgtgtccctggtggrgcgwggctgwtgcccccctcyctggcttyctgctccgsskcgtgtgaataaatcccatgcacagcawrwraaaaaaarrwmaadhrmmawmarwaawraawmacctcaagagcataagaaaactccaggggggacccggtacccaataccccctataggcagtcgatttacaattacttggccgccgatttacaccgtcatgattggaaaacacctggcgtttcacaccaccactctaaatataacaaacagctttaaatgcctgtcaaagaatccccctttcggccaacttggcttataacgctaaaagagcccatactgatatcgcattcctac

SEQ ID NO: 351 - DNA, 1042 bp, Rattus norvegicus
tccaggctgcaccactggcaacaaaaaatgcaggccctactattcctgatggctcttctcttgccttctggagctggagctgaggagattatcggtggtgtggagtctagaccacactcccgtccttacatggcccatctggagatcaccactgagagaggttacaaggccacctgtggtgggtttcttgtgacccgccaatttgtgatgactgccgcacactgtaagggaagagaaaccactgttacccttggagttcatgatgtgagcaagacagaatccacacagcagaagataaaagtcgaaaaacaaattgttcacccaaattataacttctattccarwskccatgatatcatgttactgaagcttcaaaagaaagccaaggtgactcctgctgtggatgtaattcccctgcctcagccctctgactttctcaagcctgggaagatgtgccgggcagctggctgggggcaaactggagtgacaaaaccaacctcaaatacactgagggaggtgaaacagagaatcatggataaagaggcctgtaaaaactattttcattataactataacttccaggtctgcgtgggcagtccaagaaagataagatcagcatataakggagactccggaggaccactagtgtgtgctggggtggcccatggtattgtatcwtatggacgtggagatgcaaagccccctgcagtyttcacccgaatctcccmatatgtgccctggattaataaagtcataaagggcaaggatctgaccagcctgagtctgcacgagtcagagtctccaagctagagaactcttttgatatcccttgggatcaacaaagcytgtccccagcctgtcacytgcttgtcccatacctgttcccagcytgcccccaacttgcccccagcccatccccagcctgtcccaagcctgtccctaggatgatctcaacaatacacaagtctgtggtgatggattgttccctgtaaagcacctcaataaagacataacctcmagcarmaaaaaaaaaaaaaaaaaa

SEQ ID NO: 352 - DNA, 75 bp, Rattus norvegicus
ctattcaacatgtaccttactcgagagcggcgcctagagatcagccgtagcgtccacctcacggacagacaagtg

SEQ ID NO: 353 - DNA, 6839 bp, Rattus norvegicus
agatacttctgataatttctgtctaaattatgaaaatgaaattttctatggatgttacacacagcatctttccactcattctgaacctatctttgacttatcaggcaattaaaaacaactgaagtatgcattctgtttcataagaggcagcacatggatgcaccagtatgaagtccagtgtggttatttgggaaatcttctgtacactgattagtgtcagacatttagtactcatttaaataaatgtgttgtgcttaactatgctaaggatactgaaaatcaaatagccagggaaaattggcaagccatattccatgataaaaaaaaaaaacccacaaaagattacctaaaaacaaaagacaacatcaatatataaatagccaaaatgcagacatggtagcataggccttggttcccaacagaagagggaacaatctctctgacttcgaagctagcctgtctacatagaaactccagactagccagagttactgagaccctacctcaaaatcaaaaagcaataaaattcaaaacctatagttatcagaaaaggcttactaaattcacccttatatattttcttttgtgaaaattctatctcaaaatctgaaatatgaaatagaaatattttatatgtcgctcactcaggatatagcaacatcttagctactactgagcatttcatgtactgaacgaggaattctacactcttggcgccagggatgacaagtaataaaagggttgtcacaggagcagtagatgactgactctgagcctacaggaggctgtgctgggaaacactggtatataagccatagcaacctgtggtgagactctaacaagtagagcttgtcttccagagatgaagggaggacatctactctgaaaccatgacgtggaaaagtggggactgttaacagaagttcaagaatccactcagatgaggtaacccagtcacaaaaaaacacacatggtatgtattcactggtaagtgggtattaggaaaaggctcggaatacccacaatacaattcacagaccatatgaagctcaagaaggaagacctaagtgtggatcagtccttcttagaagggaacaaaatactcacaggaagtagaaggtgggagggacttgggaggaagagagaaggggagggagaaaaaggggatggagagcaggtatgggaaagagacagggtacatgtacagagggtcaggtaattgaacagaagtgtgtagcagtgggggatggggaactggggatagccacctaaaagccccagatgccaggaaagcaagaggcttccagggcccaatggggatcgacattagctgaaatacccaacaaagagagagaatttgttgagaccatatccagaggtttggcatggtccctggttgggggatggggccacccactcatgtccaaaattttaacctagaagttgctcctgtctaaaggaaacacaaggacaaaatatggagtagagacttaaggaaagatgacccagagagtgccccacctagggatccatcccacatacagacaacaaacccagacactattgtagatggcaagaactgtttgctgataggagcctgatatgaatgtctccagagaggcttcgctagtgccttaccaatacagatggagatgcttgcagtcaaccattggactgagcacagggaccccaattagagtaggagttaagggaaggattgtaggagctgaaggggtttggaaccataggaaaaacaataataccaaccaaccacaacccccagacctcccagggactaaaccatcatccaaagagtacacatagagggacccatgactccagctgcatgtagcagaggatggccttatctggcatcagtgggaggggaggcccttggtcctgtgaaggcttgatgacccagtataggtaggggaatgccagggtggtgaggtgggagtgggtgggtgagcaccttcatagaagtagggggctgaggggtgagataagggtttccaaaggggaaacgggtaaaggggataatattcgaagtgtaaataaataaaatatccaaaaagaaagaaaaaagtgatagagaaaacagaagaaaaataaagctacccagcaacatcaaagaggaggagctgggcccaaaaccaattaaccacactcattaactcaattaactgcaagtcatttatgaacatgtatacaccaatctcatgttgataaaagcactacaaagaagaacatttagaggttttaacagaggaaaatgatgctggtacatggatttagtccacccaagcagagcagttagatcggagcttgaggctaaccttgtctacagaacaagttccaggacatccagagctgcacatagaaatcctgtcttggaaaacatacaaacaaatgcttgaaaagtacatccgagctttttatgccaacagtgactgaagaattaagaaatcgcattcaagggggctgggtacctaagaatacacaacacaaggaagcattctgtacccaccagcttagtggctgaggaacttcaactttctgtccatctacctccaggtcctccaattccttaaaatacttgttcttcaagcaatggagaatctcttttgcatggctatgaaaaaataagcaaatttcacagtaatcgaaagaggagagttgtaagatttaataactttaagattgcaagcgttttaaatgtaaagccagttctgataagacatcccataatcgccctggggtgtgcagacttcatttttagcactgcgatcctgttaacatgtaagaaagcgcacaatgattttctatttccctccagtttactgttgtgttggaccacagattgcacacaccttacaaataaggtaaatggaatactgcatttcagcccagcttcatttcttatttggaacaggtcttggggatggtgtatactgacagtcagggagaggcaaagtttcgtgctgctcagatgaaccgatcagttcacccatcccccaccccacccaggtctttcccaggttgccttttctattcttgttctaatctcccacatgcaagtgccaaagcaaccctggctgctctatagctccctctccaaagcccccaagtccacatcttagaaaagacacaccaaacttaccttttgtaaccagtgattctcaatgtggctgggagggctctcgaagtgagcccatgaattggtcccattctcctccggcacgatcttgagttcctgatagtagtgtcaaagagcttgttctcctttatgatctcgggatatccaccttcccagccctgacaggaaagcgacaggtgagcaagctccaacacccgctaacccagcccacgagcaagctcccaacgcgcgccacggggcacccctctctcctggcacctacctcctggccgcgctttctgctgccgtcgctgccgtcttcctgcctcaggctgcggcggctgctggaaccgccggccccgcgcccgccgccccatggcccacgcggcagcacagcggagcgcacacagctacccaccgcacagcacacacgcgtacttccggctgcatccccagaccccgctgctgggtcctagccggggcagtcaagaatatgcctgaaagatacatactgtctcgccgaaagcttgagcgagaaaagagtggtattcataccgagaacgtatttcctcaaaacaaccccaaacgccactaagcgtgaatctctccgtcttacccgtagactcatgcacctgtacttggacgacctgatcatggtcgtgcgcagagagtcactcgcgagtgttgacctcggacctgttcgtctctccgcgtaggcggtacagaccgtggaggggcgtgtgtttgcagagctggggcagagcgagattcggtttcgagcaaagaggcggggtctgtgtgctggggaggcggggctttgtgggtgctgcgaggctctgggactctgctgtggtgctgagggggcggagctccggttgcactctcccgggcccaagaagctctgggccaatgtgtaattctcaaagatcgggagggggcggggctctctgtgtgggcggggctcaactaaggcgccattccccccaagggcggggctcctgtgtgggcggggttttgcccaatccggctcgcgtttggattccgggcgggagggtatcgtctggtggtgctagcctgtggtcctgtccccgcccgagcaggtggctcgcccctcccctgggcaggtacacactgctggagaggtggcccgtctgcgccctcctcctggccttatatgaggctccactcggacacccggkawkswkyamactkctcrwsstacmrctgatggagttggatgagctgtgcctgctcgacatgctggtctacttggaaggtttcatggccttcgtgtccattgtggggctccggtcggttggctctccgtacggccgctactcgccgcagtggcccggcatccgagtgcccgcgcgacctgcctggttcatacaggagctgccctcgatggcctggccgctgtacgagtacattcgtcctgcagccgcgcgactgggcaacctgcctaaccgcgtcctgctggctatgtttctgatccactacgtgcaaaggacgctggttttcccggttctgatcaggggagggaagcccaccctcctggtcacctttgtcttggccttcctgttctgcaccttcaacggctatgtacagagcagatacttgagccagtttgcggtttatgctgaagactgggtgacccatccctgtttcctgacaggctttgccctgtggttagtgggcatggtgataaatatccactcagaccacatcctgaggaatctgagaaaaccaggggaaactggatacaagatacccaggggaggcctgtttgaatacgtatctgcagccaactattttggggagctcgtggagtggtgtggctttgcactggccagctggtccctccagggtgtagtgtttgcactgttcacactcagcacactgctcaccagagcgaagcagcaccatcagtggtaccatgagaagtttgaagattaccccaagtcaagaaaaatactgattccatttgtgctttagtgctctgttagcgctgttgcctcccatgagctgagtctgtctgtctccctggtgactttgctctgagcacttacgaatgaattgttttccttaattctcctgcagcccctttctcaggaaaggctgggggtgggggggtgtcgtcccctggtaaaggacaaagccaatgataaactaatccaccacatgcagttaggggctacactgcctgctggatccgaagcaggtagccctgagtcattatggcgctctctgacttcagcaatcagcagcccttacaatcctgcaagattccacccaagtcagcagcagtcacgggcctccttcactgatgtgtgttstgcctgctcagcccytgccacagaggcytggaggtgtgggagtgtggcmtaagcacagtctgccatccttgaccgcagacctsttggacccacccccactccctccagacavtggtaagagaagccttcytgcaacatgtcctgtcctcaggaggtgagacagcagagtgcttccattcaytcgatgaccccatttttgctmttcctttgggctagaattcwttaaggtccytaaaaacaaaacaaaactttttcttaatagtacaaaacaaaatatcaaaacaaaatttgttattttgaatgcacccaaggaccaatcatgtcacacaaagaaagytcagggmtagcctgggctgtgtagggagaccctgtttgggaaaaaaaaaawraarawaacaaccagctaactgtccaaagaagtgaccgcagtaataaaagacgccgcccacacaggcaccagcttgggagaaagatgtgcgcctgggattgtaaacccactgttgctctgggcaggctgaggcccactggtgaagagccattcccaccggacccatgcacactgcctcggggcagcgtctgcactcacctctcacccgctgccaccacagctaaagaacagaacggatagaactgtgtgctctgaacccagtgaagatgctgcatgaagacctgcaggcacacctgatggcgtgcacggtgcccaccactcgcctgactcggaccatctctgtgtgcccgctgccacctctgtgtgccctttccagctggctttcccatcagggcttcctcagctcttctgctctcagacagaaactattctctgttcctctggttcgcagaatgtctagatttgacccagaaaacttcatkacacagctacttcattttaacaaagagcagtgtttaatggggaactacccttcaatcctttaccctccccttttctggccaagtaactgcttgaaaacctaaagcactaaacattgtaggtctcctctcaaaacctcaggcctgtctggtgtgttctgaaacgtttgtgtggaaggagatattcagctgagaccctgggaatgtttgctgtgaacttgacctcccttggagggcatggtgctagataaacttggaacctaggactccaggttgctaggcrgatgccctgacactaagccacatcacacattagctctgtgatgcctctttctttatgaaggaccaagctgcccacatactaagtgagattaatttaagaggaatcctgtcctaacactgtatacttcattccctacaactcaacttacttgtatgaaccatgattgttaaggaaattaataaactacatttwtargtamaaaaaaaaaaaaaaaaaa

SEQ ID NO: 354 - DNA, 2917 bp, Rattus norvegicus
gagctcaccaacttagctagatgagctgcccagctaaccctagggatctacgtgagtctactcttccagtgctgtgcttgcagaaatgaattggcattaatatggattcaagggaccaggacccagatcctctggcttccttggcaaatactttagcaacagcatcatttccccagaccttcatttaggttatttggagcaagtctgattctttcattaagtaaatgtttcagtatttatttttctatgtttatatttattactattaaaactgtctttattatataaataatatattacacaagcatgtgcacgtgtacttctagaggtaagagaacaactttcaagagtcagttttcttattcaactgtagtatgggatccagggatcaaactcaggtcaacaagttttttagtttttgttttgttttgttcttctccactgagccacttggacagccttgttttttcttctcctcagccctctcttctttttcctctttttctgagcctgagtctcatatcgccctgtgtgacccgaaactgcctatgtagaccagactgaccttcaactcactgagacctgcctgcctctgtctctgtctttggagggctaagatttaaggattgtcctatgaccagcaacttttggaaaaaaaacactttacagtatatatttattgcaagttttctcaatttttacttcacctacaaaaataaatgggatagctctggactttgaagccatgtgataaataaaatgaaatgaagtcctggtatgtgattatctttgtaatttgggtaaaagtcaaattacttgttttaatggaagaaaaattatgggacataaagaatgaggattcttcaaagtagctgctgaggcctgaccatgtatttgagagagcaaacaatagaatgttcctgagcttgcaggcagtggtgttataaacacacatataagaatgctattattatcttggccctaggcaaccgatgtgctgaagaaaaaccttctagtgacatctttcaaagctcagctacttgagaaatacaggaaatttactcagagataattctttctactcagaattgcctcaacacagtggcaatggggcttagactacacactgtcgtcagtgcatttaaattccgacagcataaattttgaaaaccctgcagtgcctggaagtccttctgtgagatgagtaatagggtttgtgcccattgtgacagagtcactaaacttggatggacatttgctccaccaaatttagagggatcttggagagcaaaaaacaacttgtgaaattatcgctgtaagtggatagaaggaattagggcaacctaattcctaatccaactgttggtgaacacgactatgtggagccgtattttctacagtggattgctatatttattctaactgtgcgaatctttctattcataccacataaacttgcactttgtgatagaatagaggtgccagattcgccttttactttatttgtgaatggaaaaggagcctttaaaagtataatgacatgaattgctaggtatggtgtcttgtacccttgatcccagagaggtggaggcaggaaagtcaagagttcaaagtcatcttttgctggccagttcagtttgagtccagccatggctgcatgagagagtctgtctcctacatcaaaaagaaataaattatgagataagaacaaaaaggcatccctccttggtttttgcttcggttcctgcctccggttgtctgctttgaattcctactccacttctcttcctgatggactaccagcaggacctgtctgcccaaacgaagctttcccttcgcaagttgcttctggtcagaaaattttatcccagcgatagaaagcaacctgagagaaaagaagaggagaagtgctttaaaaaaaatattgatgatactaattggaaatgaattaaggagttgtagggaggaaggacaagatagtgactgctgttggtatggtagaggctctgcaggcttcctaaccagggtacttagaatagtggagtttcgggaattctcatgatgtctgtttgcttttgagatatggcttcactatgtagcttaggctgacctgaactcatccatagatacttcgtgcttcccacgtgctgggatgacaggtgcgagctaccacacttgcaagggatacaatgctttcttcacacagaagttattatacgctttacaatgtattcagacttgggattctgcctggtttgttgttgtttctgaattggaacgtgtgtgttctatcctttgaaatgtcttaaataggtcaggggttttgagtttggggagaaaagcttgaaaaggtttgcattttaaagtgattcaacattgttcaactgttttttatacacacacacacacatatgtataaataaataatttgaggtttgtttaaaacatcgctttttaaagactttaaaaatgctcaacataattcattatcttttcaacttcactttttagtcttttggaaaaaagtaggaagtagtgactgcttaagggcaagcagcagtaaaacacacacacacacacacacacacacacacacacacaaacatgcacacactcgcatactcctaggaccagttaggtcacatgtttttaaagcatattttctgacttcaaagccttgtttctgaaaattaagcatgtacatttataacattagtcttcaccagaggagctctggccctctcttgaattccaccttaacatccacagagaccagcccatttcttagcccctcctaccagcgggagaagactttctcaaagtcggaactgtgaagggctcccatcagggctcccgactgacagagagctagaaggcacagagaaacctgaggattctcatttaacatctgggaact

SEQ ID NO: 355 - DNA, 322 bp, Rattus norvegicus
ggcacgaggcctgctgctggtcctgtccacaaggagcccccaacctttctcagactcaactgcagacacaacccacmgccactatgtctgacgaggaaactgaacaagttgaggaacagtacgaagaggaagaggaggcccaggaggaagaggaagyccaasmagaggagaaaccaagacccaaacttactgctcctaagatcccggaaggagagaaagtagacttcgatgatatccagaagaagcgtcagaacaaggacctcatggagctccaggccctcattgacagccactttgaagctagaaaaaaaaaaaaaaaaaa

SEQ ID NO: 356 - DNA, 90 bp, Rattus norvegicus
agtcagccactatgaggagggtcgggaagaatttgcgttttcagtggaaacaagtgcgtactctatcgatgactgtgattgactcgatct

SEQ ID NO: 357 - DNA, 2767 bp, Rattus norvegicus
agaaaggcagacacaagagcaagcctgcacgtgtgaaggcatccacagaagaagtaccttctctggaaaatctcaccgtgactgaggccggctgggatggcctcagactcaactggactgcagatgacctggcctatgagtactttgttattcaggtacaggaagccaacaaggtggagactgctcacaacttcacagtacttggtaacctccggactgcagacatcccgggcctcaaggctgccactccttatagagtttccatttatggggtagctcggggctataaaacacccgtgctctctgctgagaccttcacagggaaaactcccagtttgggagaggtgactgtggctgaggtgggctgggatgccctcaagctcaactggactgctccagaaggagcctatacgaactttttcattcaggtgctagaggctgacatgacccagactgtccagaacctcacagtcccaggaggactcaggtcagtggacctacctgggctcaaagcagccacccgctattacatcaccgttcgaggggtcacccaggacttcagcacagcccctctctctgttgaggtcttgamwkmsgagatccctcaactgggaggcttgtccgtgactgaggtcagctgggacagccttacactcaactggaccacagatgatctggcctataagcactttatcattcaggtgcaggaggccaacaatgtagaggctgctcagaacctcacagtatctggtagcctcagagttgtggacatcccaggcctcaaggctgataccccttatagagtctccatctatggggtgatccagggctatagaacaccaatgctctctgctgatgtctccacasscaaagaacctgaaattggaaacttaaatatttctgatgtaactcctgagagcttcaatctctcctggacagctaccgacsggatcttcgacatgtttactatcgaaattattgattctaataggttgctgcagacagcagaacataatatatctggtgctgaacgaactgcccacatctcgggccttccacctagtactgatttcattgtctacctctctrgaawkgcwsmcagcawccgtascaaraccwkcmgtrysacagscaycacagaagctgaaccggaagttgacaaccttctagtttcagatgctactccagacggtttcygtctgtcctggactgctgatgaaggsatattcgacagttttgttatcaggatcagagataccaaaaagcaatctgaaccacaagaaataaccctcccttcccccgaccgtaccagggacataacaggtctcagagaggccactgagtacgaaattgamcyckmtggaatmrgmcgkggaaggcgatcccagccagkcagtgccatagcaacaacagccatgggctctccgaaggaaatcatgttctcagacatcactgaaaatgcagccacagtcarytggagggyaccgactgctcargtggagartttccggattacttatgtgcctgtaacaggaggtcccccatccatggtgaccgtggatgggacggatactgagacccgactggtgaggctcacccctggagtggagtaccacgtcagtgtkattgccatsaagggwtktgaagrmastgakcckgtctcggggtctctaatcacagctctcgatggtccatctggycttctgasagccaacakcacrgactcakwwkycttggccawrwrgcakmcggmsrttscsamtgwsgacagwtaygtcakytcckammcaksrrasagagtgccagaaattacccgcacagtgtctgggaatacagtggagtykgawctacatgacctggagcctgccacagagtacacactgagtgtctttgcagagaaaggtcaccagaagagttctaccayygctacgaaatttaccacagacctggattccccaagagaattgactgctactgaggttcagtcagaaactgccttcskcacswggagacctccccgggcatcggtcactggatacctcctggtctatgagtctgtggatggtacagtcaaggaagtcattgtggggcctgacaccacctcctacagcctggcagacctgagcccatccacccactacacagcaagaatccaggcattgagtgggtccctgaggagcaaactgatmcaaaycatcttcaccacaattggactcctatatccattccctagggattgctctcaagmaatgttgaatggcgacaccacctctggcctctataccatctatataaatggtgacaagactcaagcactggaagtctactgygatatgacctctgatggmggtgratggatcgttttcctgagacgcaaaaatggacgtgaggacttctatcgaaactggaaggcctatgcmactgggtttggagaccgcagagaagrttctggcttggactggrtaacctgagcaaaatcacagcccaagggsaatatgagctccgggtggacctacaagaccatggggagtcagcctatgctgtgtatgacaggttcagtgttggagatgccaagagtcgctacaagctgaaggtagaaggatacagtggaacggcaggtgactccatgaactatcacaatggtagatccttctctacctatgacaaggacacagactcagccatcaccaactgtgccctgtcctacaaaggagctttctggtataagaactgtcatcgtgtcaaccctgatgggcagatattgggg

SEQ ID NO: 358 - DNA, 1150 bp, Rattus norvegicus
cctcggctgagctgcattccaatcccagctacatccggagcccagctacattcgagcccagccacatcccgagccaaccttccagaagcaccatgaacccaagtgctgctgtcgttctctgcctcgtgctgctgagtctgagtgggactcaagggatccctctcgcaagaacggtgcgctgcacctgcatcgacttccatgaacagmcgctgagaccsagggccataggaaaacttgaaatcattcctgcaagtctatcctgtccgcatgttgagatcattgccacaatgaaraagaacaatgagaagaggtgtctgaatccggaatctgaggccatcaagagcttattgaaagcggtgagccaaagaaggtcwaaaagagctccgtaactagagagaagccactcgccacagtgctgagaccgatggacagcagagagacggtctctccacctccctttacccagtgtgcggctagtcctaactgtccctgtttctcctgaccatggtcccatcagctgstactcccactacagsgtgatggacaaggcctggtcctgagacaaaagtaactccagcagcaaggcttcccaattctctaagagctggtccgaatcttccctcaggcagctatgacggctctcctagctctgttcygtaagctatgtgcaggtactaatctcttcagcatgtgccatgccccagcctgctccacacaccctccttctccctagctctaagctcatcagttctgagttcacctgagctcctttatttcaaatgcagtccaggtgagatggcaaatcaagtttgtcagaacaaacttaccaccaccttcccaagggaatttcataactcagaatactcacaggaacctagacatgcatgtttaaatattatttaatgaccgactgtacaaagtggaactcctagatgtattttttgtacgattttcattgtatatgtaagaacttgtgtggttaagtatgtatcaatgggtagttaaagtttacataggcaaatgctttgaatgctacatattacaagatgtgttggatggttttcaaaataaaatgtactgtattgaatgtagtatgagaccaaaaaagtaataaagtaataataactgamawraaaaaaaaaaaaaaaaa

SEQ ID NO: 359 - DNA, 1635 bp, Rattus norvegicus
cttgcgttgcaccggggcagagtgcgggccgcgacggggcgggcggactctcgggcactcagagtgggtctcaggtcttctgcgcctggagctcgaatctccgtcccgaactccacccagcccgggaccccgacccggaccctgacccggatcagacccggcccggcccggcccccgcccccgccccctcgggccgatggactactcctacctcaattcgtacgattcgtgcgtggcggccatggaggcgtccgcctacggtgacttcggcgcctgcagccagcctggaggcttccaatacagtcccctgcggcctgcctttcccgccgcggggccaccgtgccccgcgctcggctcctccaactgtgcgcttggcgccctacgcgaccaccaacccgcaccctactcggcagttccctacaagttcttcccggagccgtccggcctgcatgagaagcgcaagcagcggcgcatccgcaccacgttcacgagtgctcagctcaaggagttggagcgcgtcttcgccgagacccactacccggacatttacactcgtgaggaactggcgctcaagatcgacctcactgaggctcgcgtgcaggtctggttccagaaccgccgggctaagttccgcaaacaggagcgcgcggccacggccaaaggcgcggcgggagcgacgggcgccaaaaagggcgaggcgcgttgctcgtcggaggacgacgactccaaggagtccacgtgcagccacacgcccgacagcaccgcgtcgctgccgccgccgccgcccgcacccagcctggccagcccgctcctgagccccagccctctgcccgccgcgctgggctccgggcccgggccccagccactcaaaggcgcgttgtgrrcaggrgwggcgggcsgygrsggtggcgggcsmskcwcgggcrcwgcagagctgcttaaggcctggcagccggcggaacccggaccaggtcccttctctggagttctgtcctcctttcaccggaagcccggtcccgccctgaagacaaacctcttctagccgcgggcgtctgtaggcaaccagcctgccccgagagacacccccaccctactggacctgacattatccctccctatacccggcagcctgcctggaagctycccgtcgsccccactacccagtgtctgatccctagaccaggtcccccttcgttgtaaaacaagccagggccactctcgtctggagtactaatcaccaggacccccctccagggcagcggaagccctttcttgctaggcttccttaggagcagggatcaaattgcacctgtccctaactcagagcccagtcatagaggctctaagaagccgagctcctacgacttttcagctagctgggccactcactccttgaaatcaagcaacctgaagagtcccaccgctaatcccaccctaacgagtcacctcccttccctagccagtatgtcgcagagattagacactagaggggaagagctgtcggggaacggaacaaagtggtttccttttcctttattttttttctttgaaaaacgtgtaatttattaaggtgattttgctcaatccaaataaaacttaatttattgaagacawmaawaaaaaaaaaaaaaaaaa

SEQ ID NO: 360 - DNA, 2857 bp, Rattus norvegicus
taagtgaagtgagaacctggattattctgtggccctgtgcgcttgtcctcccggtgtgtctcctcggggacggatctgcgccggggagaagtgggcgacggtggaagcggcggcggaggcggcggccggtcctttctagctgggctctgcctgaggtggcgctgctcgggattcctggacccatctcagctgcttgtggagccccagaagagtctagcttcccatgagagcctggcagaggagctgtaattagagatgtccagtgtcctgaagccttaaatgcttgcttcccagagccctgcctgaaagagaagagaacgatgaccaagttacaggaggcagtgacgttcagggacgtggccgtggtcttcagtaaggaggagatggggctgctggacgctgcccagaggaagctgtaccacgatgtgatgctggagaacctcaggaacctcctggcagtgggaggccagagtccaaataagatgaagactgttgatgcaacaggagtgaggtgccttttactggggcagcttctgtactgggaaataacaggccacgatgccaacaaactggccagagctccggaagctgtagtccacactcaaggaaagggttctcacttcctggagcaaggccactcctcctgccacagggaagcagaggagcctcgccggccttctgaggatgacagttctctcgacagtctgacacgtgaccattccagcactactgaaaatcaggaatttctgtctgggagagcccaggggtcttggtgtaaaacacatcttaggaaaagacagaaccatcagaaacactgtctgcagactctgatgaaaaacaagccagagctgttgactcagcattcccctgtacaaagaacacaggaggacagcaggcatagctctagcgtccccattcaacaaagtgttcatccaggaagaaagcgctactggtgtcatgagtgtggcaagggtttcagtcagagctcagctctccagactcaccggagagtgcacacgggggagaagccctgcagggacaacagctgtaggaaaagcttcagtcgtagctctggtcttagcatccaccgccaagtacacactggagagagaccttaccggtgtaaagtgtgtgggaagggtttcttgcggtggtcacacctccaggcccacgagagaattcacacaggagagaagccatataagtgtggagaatgtggtaaacgcttcagctgtatttcaaaccttcacacccaccagagattccacagcaaggagaaaccatacaagtgtgacaagtgtgggaagtgcttcagcttgaacttcaaccttcacattcatcagcgggtccacacaggagagaaaccgtataaatgtgaagagtgtgggaagtgtttcagcttgagcttcaacctccacagccatcagcgggtccacacaggagagaagccatataaatgtgaagagtgtgggaagtgtttcagttcagcctcaagtttccaaagacaccggcagatccatataaaagagaagacacttcatcgtgatgtgtgtggaaagggcagcagccgggactcgaatcttcagactcaccagagagtgcacatacaggagaagccctatcggtgcaacagctgtgggaagagcttccgctgtagcatggatctcaacatccaccgccgagtacatactggagagaaaccttacaagtgtgaggtgtgtgggaagggcttcaattatttgtcacacctccaggcccacgagaaaattcatgcagatcagaagccatataagtgtgaatactgtggcagacgcttcagctatagttcaaaccttcacacccaccagagagttcacacgggagagaaaccctataaatgtgaggagtgtsrsrarrgcttcagtctagcgtctagtctacaggctcatcaaagagtccaamctggcamgaagccattcaaatgcaatgcatgccawaagcgattcagtcaggcctggaacctccaggcccaccagagagtgcacactggggagaagccctacaagtgtgacacgtgtgggaaagccttcggccagaggtccagtcttcaaatccatcagagaattcacactggggagaagccattcaaatgtsmggartgtgggaagkmgttcagcttgaattcagggcytactgctcacsggagggtccacacgggagagaagccctatgaatgcacagagtgtgggaaaggcttyagtcttgcctcaagtctacgaactcatcagcgaattcacaccggcgagaaasccttccaatgcaatgagtgccagaagakgttcagtcaggtctcacacctccagtcscaccagagggttcacacaggggagaagccttacaaatgtgacacctgtgggaaggccttcagtcaaaagtctggtctccaagtccatcggrgarttcacactggggagaagccgttcaagtgtgaggagtgtgggaaggaattcatctggagctcagggcttagtgctcaccggagggtccacacaggagaaaaaaccctgcacggttagcagtgtgggaagggcttcagtcagacctcacacttccgattaacagtctgatccaatgtaaacacagcaggatcattatatcaaggctgttacaaaataattgaaaacaaagtgtaaggtagctagtatacaatgagaaaaagcagtatgacacatggtgaaattatacaattagtcagatagcatcctggtaggaaatgacacatatagatttatatttaacaattttgcatcccctgtatcccctggatatagaattaaaagctcaatcagatgcaatcaggaaaaaaaaaaaaaaaaaa

SEQ ID NO: 361 - DNA, 1947 bp, Rattus norvegicus
ggcacgagaggactttgatcttcaggatgcctcagaagtggatttctgctctgctcctactgcagataagtttctgcttcagatctgggaactgtgggaaagtgttggtgtggccattggaatacagtcactggatgaatttaaagataatactggatgaacttgtacagaggggacatgaagtcactgttctcagaccttcatcttccgtctctcttgatcccaaaaaagcatctggtcttgtatatgaaacatctcctacaacttccaataatgatgaagtagaaaagtctttttacccagtgggtgatatgtggacatacgatgtgccaaaatatacatgtttgagatactacccatctttgaacaaaatgttcgggcaattttctgatttgtggttacagctttgtagagaagttgtttcaaacaaggaacttatagcaaaactaaaggaatcccagtttgatgtggttctttcagatgctgttggtccctgtggtgagctgatagctgagatactgcagttaccatttgtgtacagtcttcgctttgccaccgcccctggaatagaaaagtacagtgcaggacaacccttccctccctcttatgtacctattattttgtcaggatttagtggtcaaatgacattcatggagagagtggaaaatatgctatgtttactttattttgattcctggttcgagtcatttcctgctaaggattgggatccatttttcagcgaaattttaggaagacccactacaatggttgacacaatgaagaaagcagaaatatggctcattcggtcctactgggacttggagtttccccgcccatccttgccaaacattgagtttgttggaggacttcactgccaacctgccaaaccattacctaaggaaatggaagactttgcacagagctcaggagaacatggtgtgtgggtgttttctctggggtcgatgatcaggaacataacacaagaaagggctaacacaattgcatcagccctggcacaaattccacaaaaggttttttggagatttgagggcaagaaaccagacaccttaggacccaatactcgggtgttcaagtggataccccagaatgaccttcttggtcatccaaaaactaaggcttttgtaactcatggtggagccaatggcatctatgagtcaatccattatgggatcccccccatggttggcatccctttatttgcagaacaacgtgataacgttgctcacatggtagccaaaggagcagctgtttctatagattttcatacaatgtccagttcagatttgctcaacgcactgaaggcagtcatcaataacccctcctataaaaagaaagtgatgtggttgtcagccattcaccatgaccagcctctgaagcctctggacagagcagtcttctggattgagtttgtcatgcgtcacaaaggggccaagcatctgagaccacttgcacataaccttgccctggtatcagtacactctctggatgtgattggattcctgcttgcctgtgtgctggccattgttttacttgctgtaaaatgctgtctgtttctttaccgattttttgtaaaggtggcaaagaataaaagggactagggttctttaagaaggaaggctgtgatctgtggtcgtgatrggcatgactactccctttattgctggaactatatatcagatgctccttgttttagaagacattgagctaattgatttatctatagatgtymcactatargttaagaaagtawccrttttaaatctttattttctcaaatmmaycgttttcatattgattctcgatgtgwtagtgctgaggatartgataatccctgaaacaccaacttgcttatgggcaaagatataggaagcctaaactttttactgtgaattttcagatatttataaaataaaattgaataaaatt

SEQ ID NO: 362 - DNA, 1007 bp, Rattus norvegicus
  misc_feature (387)..(387): n is a, c, g, or t
cgctttggtctccagtcccagacaggacacaggccagacatgatggctscastwcaactyytagggstwkctgctgctytgsctccsagccatgagatgtgacayyvagvtsacmcagtctcchtcaytmctgtcwgcatctgtgggagacagagtcactmtyarbtgcaargsargtcagaatwttdwyardwwyttavmstggtaycarcaaaarcwtggmgaakctccmmaaskcctgatwtaywatryhaacadwttgcaarcggrcryyycrtcamggttcagtggcagtggatctgghacwgattwcacamtyaccatcagcagcctgcagcctgaaratkttgccacatattwytgcywkmagywtdhharthkkssvhnsacgttbgghdswggsacsaagywggarhtvaamcgggctgatgctgcaccaactgtatcyatcttcccaccatccayggaacagttarcawctggaggtgccwcagtcgtgtgcytcrtgaacaacttctatcccagagacatcagtgtcaagtggaagattgatggcastgaacracgagatggtgtcctggacagtgttactgatcaggacagcaaagacagcacgtacagcawgakcrgcacmskctcgttgaccaaggytgamtatgaaagkcataacctctatacctgtgaggttgttcataagacatcatcctcacccgtsgtcargagcttcaacaggawtgagtgttmgacccaaaggtcctgaggtgccacctgstccccagytccttccaatcttccctcytaaggtcytsgrgwsktcmmmasaagbgayswwssamwghygcggtgskvcwwwycwmytmyccacctcatyctcmtwccwwtcyytggmwttgwtsatgctaatatttggggaatattaaataaagtgaatctttgcacttgaaaaaaaaaaaarrrraaaaaaaaaaaaggaatggaagcggccgcaagcttattccctttagtga

SEQ ID NO: 363 - DNA, 197 bp, Rattus norvegicus
aggacgcaatgacccagttctgtgaggctgaattctctgtcaagacccgaccccacctgtgctgcaaacagcgtggggaggagcgattctcttgcttccagaaggaagctcctcggcccgactacctgctccgaccctgccccatccaccagactggcatttcctcaggaacccaactgcctttccctccggggttg

SEQ ID NO: 364 - DNA, 256 bp, Rattus norvegicus
  misc_feature (57)..(57): n is a, c, g, or t
  misc_feature (114)..(114): n is a, c, g, or t
gatgagaaatcccaggatgcagtaggccttgaacagcagcacctattgaccacagcncccagttccagcagcagctccctggagagctcagccagcgctggggacaggagagcnccccctggggtcattcccaagcaagagtcacagcggaggccaagggtctcaggaagcctgtgccggctccaggagttcagattcttcccatggcagccacgggacccatgtcaacgtcacctgcatcgtgaacgtctgtagc

SEQ ID NO: 365 - DNA, 3456 bp, Rattus norvegicus
atgactcttaaagttcttctggcgacagtcctaaccttgtgtcatggcttcaatttggacactgaaaatcccatgaccttccaagagaatgcaagtggcttcgggcagagtgtgatccagcttggtgaaacccgagtggttgttgcagccccccaggaggtaaaggcggttaaccagacaggtgccctctaccagtgtgactacagcacaaaccggtgcgaccccattcccctgcaagtacctccagaggctgtgaatatgtccttgggcctgtccctggctgctactaccgtccctccacagctgctggcttgtggccccacagtacaccagaactgcaaggagaacacttacgtcaatggattgtgctacctattcggctccaacctgctgaggaagccccagcagttcccagaggctctcagaggatgtcctcagcaggagagcaacattgccttcttgattgacggctccggtagcatcaacacgatcgactttcagaagatgaaggaatttgtctcaactgtgatggascagttccaaaagtctaaaaccttgttctctttgatgcagtactctgatgaattccggactcacttcaccttcaatgatttcaagagaaaccctgacccaaaatcacatgtgagacccataaggcagctgaatggaaggacaaaaactgcctcagggatccgtaaagtagtgagagaactgtttcagaaaatcaatggggcccgggacaatgccgcgaagatcctagttgtcatcacagacggagaaaagtttggtgaccccctaaattatgaggatgtcattcctgaggcagaggaagcagggatcattcgctacgttattggggtgggaaacgccttccacaaaccacagtcccgcagagagcttgacaccatcgcgtctaagccagctggtgatcacgtgttccaagtggacaactttgaagctctgaataccattcggaaccagctccaggaaaagatctttgcaattgagggcacccagacaggaagtaccagctcctttgagcatgagatgtctcaagaaggctttagcgctgccattacctcyaacggtcccttgctgggctccgtggggagctttgactgggcaggtggagccttcctgtatccatcaaaggataaagccagtttcatcaacacaaccagaatagattcagacatgaacgatgcttacttgggttatgcttctgcagtcatctcgaggaaccgcgtccaaagcttggttttaggggcacctcgatatcagcatatcggcctggtggtgatgttcaagcagaatttcggtgcctgggagccccacactgatatcaagggcagccagatcggctcttattttggggcctccctctgttctgtggacatggacgctgatggcaataccaacttgatcctcattggggcccctcatcactatgagaagacccgagggggccaggtgtcagtgtgccccttgcctagggggagagcacggtggcagtgtgaagctattctccatggcgatcagggccatccatggggtcgctttggggcagcattgacagtgctgggagatgtgaatggagacaaactgacagatgtggccattggggccccaggagagcaggagaatcagggtgctgtctacatttttcatggagcatcagtagccagcatcagtacccctcacagccagcggatcgcaggcgcccgcttctcccccgggctccagtactttgggcagtctctgagtgggggcaaggatctcacaatggacggcctgatggacttggctgtgggggcgcaggggcgtcttctgctgatcagagcccagcctgtgctgagactggaggcaaccatggaattcagccccaagaatctagcaaggagtgtgtttgcgtgtcaagaagaagtagtcaaaaacaaggatgctggggaggtcagagtctgcctccaagtccgcaagaacaccaaggacaggctgcgagaaggagacatccagagcactgtcacttatgacctggctttagaccccggccgctcagttgtccgagccttctttgatgaaacaaagaacggcatactcaggcgcatccgggtctttggattgacacagaaatgtgaaaccctgaagctaattttaccggactgtgtggacaactcagtgagtcccatcatcctgcgccttaattacacactggttggggagcccttgcggtcctctagggaccttcggccagttctggctatggaggctcagaggatcttcacagctatgtttccctttgagaagaattgtggcaatgacaccatttgccaggatgatctcagcatcaccgtgagttccacacgcgtgaacactttggtggtgggagactcccgggactttgacgtgagtgtgactctgagaaatgatggcgaggattcctatgggaccaaggttacctgctattacccatctggcttgtcttaccggaaggtgtcagcaagccagaaccagttctccaagaagccttggcgtgtgatagctgagcccagttcttctgaagggcaaggggttctgaagagcaccatctgggacataaaccatcccatctttcccgctaattctgaggtcacgtttaatgtcacatttgatgtggactctgatgcctcccttgggaacaaactgctcctcaaggtcgttgtgaccagtgagaacaacgtgtccaggaccgacaaaactgagtctcagttggagttgcctgtgaagtacgccatctacatggtcgtcaccagtggtgagagttctatcaaatatctcaacttcacagcttcagagatgaccagtaaggtcatacagcatcagtaccagttcaacaacctgggccagaggagcttccctgtcagcgtggtcttctggatccctgtccagatcaacaaggtgaccatatgggatcctccccaggtcaccttctcccagaacctctcaagtgtctgtcgcactgagcagaaatccccctctcactccaagttccaggatgagcttgaaaggaccccagtgctgaactgctctgttgcagtctgcaagagaatccagtgtgacatcccttccttcaacagtaaagaaatattcaacgtcaccctccagggcaatctgctatttgactggtacatcgagacttctcatgaccacctcctgcttgtgagcactgccgagatcctctttaacgactccgcatttgccctacttccggggcaggagacgtttgtgaaggctcagacagagaccaaagtggagccatatacagttcacaatcctgtaccactcattgtgggcagctccgtcggaggcctggtgctcttggctctcatcactgctggcctatacaagcttggctttttcaaacgacagtacaaggacatgatgaatgaagccggtggccaagatggcccacctcagtaa

SEQ ID NO: 366 - DNA, 3179 bp, Rattus norvegicus
cggccgccagcgccgcccgccccgcgcgcgcctcggycccgggtccccgcggcgcggycccctcgtakcgcargggcgggcgaccgykgactggcggrcgccgcgcggttccaaggcggacgtgttcaatggaagtatgctaccabctgccggtgctgcccctggacaggccggtcccccagcacgtcctcagccgccgaggagccatcarcttcagctccagctcggcgctcttcggctgcccgcatcsccggsagctctcgcasagacgtggagctatttcctatgacagttcygatcagactgcgttatatattcgtatgctaggagatgtccgagtgaggakccgagcaggatttgagacasaaagaagaggttcccacccgtacattgacttccgtatttttcacgctcaatctgaaattgaagcatccgtctccgccagaaacatcagaaggctgctcagtttccagcggtatctcagatcctcacgattttttcggggtgccacagtttgtagatctttaaatattttagatgaggattacaatggacaagccaagtgtatgctggaaaaagttggaaattggaattttgatatctttctgtttgatagactaacaaatggaaatagtctagtaagcttaacctttcatttatttagtcttcatggattgattgagtacttccatttagatatggtgaaactccgtcgatttttagttatgattcaagaagattaccacagtcaaaatccttaccacaatgcagtccatgctgcagatgttacccaggccatgcactgttacttaaaggaacctaagcttgccaattctgtaactccttgggatatcttgctgagcttaattgcagctgccactcatgatctggatcacccaggtgttaatcagccatttctcattaaaaccaaccattacttggcaactttatacaagaatacctcagtcctggagaatcaccactggagatctgccgtgggcttgttgagagaatctggtctgttctcacacttgccattggaaagcaggcatgagatggaggctcagataggtgctttgatactagccacggacatcagtcgccagaatgagtacctgtcattgtttagatctcacttggataaaggtgacttacaccttgacgatggcagacataggcatttggttctacagatggccttgaaatgtgctgatatttgtaacccatgtcggaactgggaattaagcaagcagtggagtgaaaaagtaacggaggaattcttccaccaaggcgatatagaaaaaaagtaccatttgggtgtgagtccactttgtgatcgtcagactgagtctattgccaacatccagattggttttatgacttaccttcaggagcctttatttacagagtgggccaggttttcagacacgaggctgtcacagacgatgctcggacacgtggggctgaataaagccagctggaagggactacaaagacaacagcctagcagcgaggatgccagtgctgcatttgagttgaactcacagctattaactcaggaaaatcggttatcataaccctgaaccagtgggacaacttccctcctgcaagattgtggaaatgtgaaatggtcttgagttgaagaactggttctgactgctgaggtttccaaggaaatgatgtcagcgttatttatcaagattatcttctgttggatcatttgagcccattttttaataggacatgaatatatagcaatatgcatatggcttttgtatgaaaccttaagtatgtaaagctcagcaggagaaccagaaaggattaacaaaggaagattttttaggtgtgccatgtgctttcaaagtgtgtattcttcaagccctgaaacttgaactcaacctcagcagcaatgttgatgcaaccagtccaatggaacagcgcatctgtcccttccactactctgagaaaacagaaatgtgaagtgcccagcctctgctgcctctggcaagaatgcatcaatgtttacaaatccaatctgaaatcttggttctaattgcctcgagacttattgtgaaggaaccactgaccgttctcagctgagctggagactgcagctcttcgcagcgtttgccttttcttctttggatgtcaatgtcatcaacgcctcccacttgttttgttctgtgcactggagtctgagcatttaccacagataccacatgaagctttcactccagggctgtttggcaatgcagattccttttgtaactattagtttttaacctggggtgggagggaagggacaccaatgtcctagctgtgttctgactctgcagtgaagacactgcatgttgttttcactactgtacacttgacctgcacatgacmrggaaaaaaaggtggaatgtttaacatgccgtatcagctcagggtacttgccmatcagaaataaagtgggatagggaagtgtgtctttcaaatcaagggtactaaaggcccttccgctgcagtgcgtgagaggtatgttgtgtacggctgtatgggtgtgtgtttgcgcgcatgtttgtgcatgtatggctgtgcatgttmtgttccatccgtgtgggaaaggattagaattgtaagcttttatttattgttttagaatgtgacatagtgagcagccacamttgggggargkgraaggtaggtkaagmtskaagattgcwyyagatgccttaaactatgcacaaagctaagtgaccaaacttctcattttgatttgaaaagtgcattgttttcttgtcccccctcctccactttgatgaaatgttaccctttggtggatcttttgatgtgaatagatgttttctagggtaaaatttaaggactaattttagacttaaacactccacttttgtaatgtgttttcagtggtcttatgcatagcaagcacaactgtaactagtttaagagaaacggtgctttcttttagttaatttgtattgcccttgttactgttaaagactgtttattatgtttacagtttgttgcaacagccatcttcttgggagaaaacttgagtgtaaagccatttgtaaaaggctttgcsacactcatttaaacatgtgccttgtwgctgttacctttcgatgaataaaaactggtcttttctcawwwwwaaaaaaaaaaaaaaaaaa

SEQ ID NO: 367 - DNA, 108 bp, Rattus norvegicus
aacgttcacactggggaaaagccctatgaatgcaataaatgtggaaaatccttcagtcagagctgtcaccttgttgctcatcggagaattcacaccggcgaaaaaccc

SEQ ID NO: 368 - DNA, 99 bp, Rattus norvegicus
ctttgtccggggtgcggaaagtcgtttacgaatagctcaaacctcactaaacaccgaacacacactggggagaagccttacgtgtgcaccaagtgtggg

SEQ ID NO: 369 - DNA, 666 bp, Rattus norvegicus
agatctcattacagatggttatgggccaccatgtggttggtgggatttgaattcaggaccttgggagagcattcagtgtttttaaccaaggagcattttttccagccttaacagtcagtttttttttttttttttttttccggagttggggaccaaacccaggcgcttgcgcttgttaggcaagcgttctaccagtgagttaaatccccaaccccttaacagtcagttttttaggtggagatattcccaggatgcatttgggagactcgggtcaggtcaaacacccaaggcaacaccgtgaagcaggtttattgttgagccctataatatgttttttccacaccttgtcacctcctttttcatttattccttggttctgtcactcattaagcatttacagcttatttctggtgccaactaacttgctggacagaaggaagctgggaatgacaaagggcttgccctggagaggtatttatctcaggggaagataaggctcaaataattgtaatctaattgattagaaccaggctaggcagttgcccggctggtactgggacaggggcctagacaagtgttgctggtccagtccttctttagtttaaagatttgtgtgtgaatgtgggagttagggcatgtagaggtcaaagggcaacttttctgcag

SEQ ID NO: 370 - DNA, 1704 bp, Rattus norvegicus
cgcagactggcagcagcgtccgtcggcgcgcgccaccctcctgcgcccttgccaaccatggggccaactcgcaactcttaaggctcagcctcgggccaagggaaatcagagaagctgcgagcagaagccaagatgagtttccgcaaggaggacggggtgagcagcctgtgccagaaggcgctgcacatcatcaccgagctgtgcttcgcgggccaggtggagtgggacaagtgttcgggcatctttccagccgataggagcggccagggcggaggtggcacagacatttcagtcagcctgttagcagttgttgtaagcttctgtggcctggccctgctggttgtctcccttttcgtcttctggaagttgtgctggccctgctggaagagcaagctcgtggcccccaatgtcagtacccttccgcagagcatctcaagtgctccaactgaggtttttgagaccgaagagaaaaaagaagtcgaagaaaatgaaaagccagcaccaaaagctattgagcctgcaataaaaatcagccacacatcccccgacatcccagcagaagtgcaaactgctttaaaggagcatttaattaaacatgcccgtgtgcagaggcaaacgaccgatcctacatcttcatcccgccacaattccttcaggaggcacctaccaaggcaaatgaacgtctccagtgttgactttagcatgggcacggaacctgtcttacaaagaggagaaaccagaaccagcatcgggaggataaaaccggaactctataagcagaaatcagttgactccgagggcaacagaaaagacgacgtcaaaacctgtgggaaacttaactttgcgctccagtacgattatgaaaatgaactcctagttgttaaaattatcaaagctctagatctcccagctaaagattycacaggaacttctgatccttatgtgaagatctatcttcttccggacaggaagaagaaatttcagacccgtgtgcaccggaagactttaaaccctctgttcgatgagctatttcagttcccggtggtttacgatcagctaagcaaccgcaaattacactttagtatatatgattttgacagattttccagacacgacatgattggggaagtgattcttgataatttatttgaagtctctgatctctccagggaagccacagtatggaaagatatccactgtgcaaccacagaaagcatrgacctgggcgaaatcatgttttccctttgctatttgccaactgctggtcgcatgaccttgactgtgatcaagtgcagaaatctgaaggcaatggacattaccggatcatcagatccttatgtcaaagtgtctctgatgtgtgagggccgaagacttaaaaaaagaaaaacaactacaaagaaaaatactctcaatcccgtgtacaatgaagccattattttcgatatccctccagaaaatgtggaccaggtcagcctgtgcattgcggtcatggattatgacagggtgggacacaatgaggtcataggtgtgtgtcgaactggactwgacgctgagggtcttggaagagaccattggaatgaaatgctggcctatcaccgaaagccaatcacacactggcaccccttgctggagttacctggccgagcaaccagttttgacagtcaaggatcctgttcttctcccaggccaccgtccacaccataa

SEQ ID NO: 371 - DNA, 1344 bp, Rattus norvegicus
tgtttttttttttttttagctactgtgggccccacacacggtacgcaggcgtagcatactggcaaaacacttgtacagtctttttagaagactatggaaaagactcagtagataaagaccaaagttctgatcccagaatctactttggtgtgtgaaccaaacttctactgtagctttactaaatgattaatttaatttacaggtgaatcagtggctaacctggctagaaactgctgaagaagaagaatcagaggaagaagctgactaaagaaccagccaaagccttaaawtgtgcaaaacatactgttgctatgatgtaactgcatttgacctaaccactgcgaaaattcattccgctgtaacgtttttcacaatatttaaagcagaagcacgtyagtaaggtttcckwskgcmbarggtttttgwagtgtgatgtcttaatcatagtctaccatcaaatactttaggagtatccttaatgtttagatagaatattagcagcatgcaatwattacatcctaagttytcaarcggaggcagtctattgcaaggaccttytttgstgccagttaccataggctgttttaagtkrgaaaactgaatagcmachctgaatactgtarrsaygsrctttgctcagtaatacttgaghtgbtgcaatmkkysrywatccwtttggttgtyacagaaaaattcttaactgtamttgatggytgdbsccgtamtagtatmttgcctgtmtttctacctmtagtaatgggctttatgtgstagatkktawtatccttgagcctgggcaagtgcacaagtctttytaaaagaaacatggtktacttgcacaaaactgatcastttgarrratcattaatgcccttgrarwggttwykkwggktgtgaaacaaawggygrgaawttgaattggtccytcttwttwtwstattgaaattaagtytacttamwttwycaagkcatgwtcatgccstgrttttatrkwcbtrtatcwrkcarwmrayahwsygrwwckygrhvwmvwdrwamadrmhwwmaaataskatctgcaamgktctggagaaaattgtycmytytgttatygaaggwattgsatttaataytcagtttmagtamctttggcraaatttttaatatatcwtagkctttaattcagtacstgaattggmrcctgttmaasrractcmctwmmttkkacaatgcgctatcactttaatcgctatatattgacttacactctatgtgcaattgtatcctcatcatcctccgtccatgttgtttaaaagctactatcttgacgaaagccttaaatctctcaccctttattccaacccc

SEQ ID NO: 372 - DNA, 228 bp, Rattus norvegicus
tttatgcctagtgctaaaacatcttgaaatggaaataactgtatctacacacacacacacacacacacacacacacacacacacacacacaagttgccatgaaggttaagtggatgtaaaccatttggggtgtgtcttagttcaggttttattgctgtgaacagacaccatgaccatggcaactcgtgttaaggacaacatttagttggggctggcttacaggttcag

SEQ ID NO: 373 - DNA, 889 bp, Rattus norvegicus
  misc_feature (744)..(744): n is a, c, g, or t
  misc_feature (749)..(749): n is a, c, g, or t
  misc_feature (758)..(758): n is a, c, g, or t
tggtgccccgcttccttctgcaacaggcgtgggtcacgggctcgctcgctctctttccaccgbcrtcttggywysgkkttstbcgcacaaaatgcccggtgaagccacagaaaccgtccctgctacagagcaggagttgccacagcctcakgctgagacagggtcgggaacagagtctgacagtgatgaatcartgccagaactcgaggaacaggattycacacagacagccacacwacaggcccagctggcagmcgykgctgagatcgatgwakaacctgwtagtaaagccargcagagkcggagtgagaaaaakgcamkgaaggccatgtscaaactgrgwcttcgrcaggytacaggggttmcgrsagkcrmkwksckgaratytaraaatatcctckwtgtcatcacamaaccggatgtytacamgagcccagcttcagatmchtacatrgwgwktggggarvccamgaktgakgactygtcgcagcaagcacagwtggcagctgctgagawrktyamagttcamggagagrctkktkccaacattyaggagaacacgcagacscygactgkccmagaggrgagcsragamrargasswtgatgaaacggrtgtggaagttaaggmchtaragttggycatgtcmcaagcaaatgtgtcaaragcaarggctkkccgasccytgaaaaacaacmgkaacgatattgtaamkgytrttrtggrrdtdrcawyswamtwhknyghcnshvarrrhnscmkcctcccccttcccccccyktktggtgtttgaaaagtggaactacagcytggtttaaaatktgtactgtttytatcmctaataaagtgtagcttyttgttrrrwrrvmwmaaaaaaaaaaaaaaaaaa

SEQ ID NO: 374 - DNA, 852 bp, Rattus norvegicus
ttttttttttttttttttwyttgagctccatagtatattttttttytcawkaaaggttcaaaaccaaaagcggtttctctttgcagcaaatatacattaaaatagagtctctgtacagccaagggctctgggccctggcttgccccatggccctgcgcctccctggccaaacccaaaaataaatatagtgttattgctctgcagggcgtagaggcagtgctgtcccccatcccttgaggtgggagctgatagggggccctggccaccccagggstcmagsrkytssarmaacwgcttgwgyatkgmktcagrgkkggcaakgsccarwgcwwtsagsagracgtactcctcccgctccagccgtagggcttgcagccgccgaaccagctgcagcarggctgcccccagatcccccagaccagcagcccgtgccccctcttcatccaggaccaggtcctcagcaaaggccarctcatcctgcartggcagtgagcgctgggccacacccagcaccagcacctccatccacayactctgcagtactgacatctggtcagagagtgacagtgaggagaagcctgggatgctcttggcccagctgatggtgaccactatctctctatcaaaaagatcacagagagtggccacagcagggaggtgtccatcagggcttgctgggtcaggcatggcgtacagcttctcaggttcaaccaccagcagatgagacaccagggcgttaactggggctgtcttccggggtcctccagctactgccagaggaccagcagggwaggggcctgggaaaggcaatgggtccacctctggccgccgcttgtaaatctgtcgcctcgt

SEQ ID NO: 375 - DNA, 680 bp, Rattus norvegicus
cacgagsgtggtgtgagtgatactcgggcccgtcgtttcctcgcytcaagcyttcgccttctaacgtttgtsccgggaccgaaamaaaaaaamamgcctgcagttarhkggaagagtcctgccaagatgtctatcggtgtsccaattaaagtcctgcacgaagcgraaggccacatagtkacakgtgagaccaacactggtraagtgtatcggggraagctcattgaggcagaggacaacatgaactgccagatgtccaacatcacagtcacatacagagacgsccgwgtggcacagctggracaggtgtacatacgtggcagcwagwtccggtttctgattttgcctgacatgctgaaaaatgcmcccmtgttaaagagcmtgaaaaataaaamccaaggctcargggctkgccgaggaaaagctgctwtcctgaaggcccaagtggytgcaagaggaagaggacgtggaatggkgcgtkgraacattttccagaagcgaagatagtgctctccattgaagagaactttgycctgtcttctctwwggtttttgggctttgggggtggggcsggsggttatatgtgcatatgtcctgggttttaatatttctctttgtattggagaaactgttaagctaaataaaatttggttttgtgwwwwraaaaaaaaaaaaaaaaa

SEQ ID NO: 376 - DNA, 803 bp, Rattus norvegicus
tttttttttttttttttctagcacatgatgcctaatttacttaacattctttgggagaaaatgtacaaaggcttgagccaggcaccctgacacatgcctattatgatcccagcattcaggaggctaaggcaagaaaatatgtttgaggccagcctgccttacatattgagaccttgtctcaagaaacaaaacawwwkktwkwkkytywttcytgraaggacactgtaatggaggttctttaggaatagtcctgctrtatgcatatttcttgaggctgctacatgaatgagtacatagtgcaaacaaatcaaaggtctacggagactttgytggaatcttctgtctaccaagacaaagctgttggagaatagtactgtatactctggtcataggtccaggcttatttgcttggagaaccaggagggtaaactsctgaatccagcatggctctcctgcgggctgtttccttggccacactgtggtttaaccgccttartcgytcctgtgcmttcygtaaaatattgttgaccaagacaactcgycgcctggcattaagcagcttcttaacataggggtccagatccagggccaccttctgatcctcattgatccsgcwcagtkcygtagctaggttgtcaatttgttcccggagctctacttggctttctctgammgygtgyacrwragmstmsarwygstgcaswgcwggtcgcaggaactccaggagcccctcggcmwmgwggtcgcggcctgtgggccccgccactggggtcccggccccagacacggcagcggaaccagcc

SEQ ID NO: 377 - DNA, 937 bp, Rattus norvegicus
ttttttttttttttttttawttahawtwattwattwattwattwattwattwattwattwattwattwattwattwattwattgtttttcagracatgttttttccgtgkacttctggctgttstggaactcactctataraacaggctggcctcgaactcaytgagacccacccacctacctctcagcttccagagtgstgggattaaaggcctgtgccagcactgcctagcmgacagtccacactyttagytgggaagcaatcctccaacctaacattgttagctctaaccctgagcctcaagcaggaggactgtatattmtagggcagcctgggccacatagtcraactatgttgaaaacawbwykyywkwwtkytkwtkwkwttrtrgaaaagagaattkatkstatvcactgkskgcctccgtgattttaatatgaraaacgtagtgcttatcaaaaattggttwkwtwyttttttttttttaatatactacacaskggattctaacccartgaatgctggcttcagttttcatctccaatctctttcttgatycagtcaacataattcagwaacttggtgtaaaagccgtatccctcaccacacccaatgccccaggatacgatgcctgtagccacccagatatcacgactgcggtccctgactgcaaaaacacccccactgtccccctggcaggcgtyatgcttgagagttgggtccccagaacagaacatattttgagaaaatacatyattactgtttttcgtccggagccacctctggcatgcctytcgatcggctatgggcagacggacaaacctgagattaaaagctattttatcttctgttatcccgaagccgctgacataacccataaggtctttgtcataaaaggtctcattgtctgggagacagatggggaggaggttggga

SEQ ID NO: 378 - DNA, 488 bp, Rattus norvegicus
  misc_feature (39)..(39): n is a, c, g, or t
aagaaagccgtgctgtctgacatcggtgtctcggccttntgggccttcttctggttcgtgggtttctgcttcctggccaaccagtggcaagtctccaagcccaaggacaaccctctgaacgaagggacagacgcagcccgggctgccatcgccttytcgttcttctccattttcacgtggagcctgactgcagccctggccgtacgcagattcaaggaccttaccttccaggaggaatacaacacactgttccctgcctcagcacaaccatagtccctgaaggacagggagtccacactgtcagcagggcccagttgcaggaagtcccagtgttggagatgcttgcccactaggacaggatgaggctgtctggaggagctcgcatggctcaccactggctcactcatgctgtactgcttcctttgtttactctgtgctttygttccttcagtaaacatttattgrgcarmmaaaaaaaaaaaaaaaaa

SEQ ID NO: 379 - DNA, 1438 bp, Rattus norvegicus
aaggttgcagacgtgacagagacaaggctccgagtctgaacaggggtctgcgagtgggtctatctgattccccagtggtctgtgccgcagcgctgatcaagtgctgatagcatctgtgcaagagtcgacggcgattccgacacgatgaccctgaatggaggcagcggagcgggcggcagccgtagcgcgggccgggagcgcgaccgtcgtcgaggcagcaccccatggggcccggcacccccactgcaccgcaggagcatgccggtggacgagcgagaccttcaggcggcgctaaccccgggctccctggcagcgactgcagctggaactcggacacaggggcagaggctggactggcctgaaggctcctccgattcgctcagttctggagacagcggctcagaggatggcgtttacaaggtgcatgctgctggggcgcctggtgtgggcaagagtgctctggcgcgcatctttggtggagtagaagacggacctgaagcagaagctgcagggcacacatatgaccgttctatcactgtggatggagaagaagcatcactaatggtctatgacatttgggaacaggatggaggctgctggctgcctggccactgcatggccatgggggatgcatatgtcattgtgtactcaataacggacaagggcagckwkgagaaagcctcagaactccgggtccagctgcgcgcacgcagacagacagatgtgcccatcatcctagtgggcaacaagagcgatctkgtgcgctctcgtgaggtctctgtggatgagggccgggcytgcgcagwggtcttcgactgcaagttcatcgagacctccgcagcactgcatcacaacgtccaggcactgttcgagggtgttgtgcgtcagatacgcctgcgcagggacagcaaagaggataatgctcgtcgacaagctggcactcgacgacgggagagccttggcaagaaggccaaackctttctgggccgcatagtagctcgcaacagccgcaagatggcctttckkgccaagtccaagtcctgccatgacctctctgttctctaagcccaacggcccccttgtttgtgggtcagyagatggatggaaggctgcccagccaactgctvtaaatgtctcagagttggcccaccctccggtatttctcagaactgtcaactatgcacagcctgtctcacggtcatggacagatagtgctgaccagggaggcaactccaaacgccatcgagcctgggcytatggagatgcatgtgcaggcccacgtgcataccgagcagcctgaaccctgctcttggacaggactctgcctttmtccatgtgggtgtctgcctggagggaggctgttctatatgcttgctgtttgtttacatgcagmtttttgtaataaagactatttcctgvcaaaaaaaaaaaaaaaaaa

SEQ ID NO: 380 - DNA, 810 bp, Rattus norvegicus
tttttttttttttttttkkwkkkytktkwywytwywwytcagtaattactttattaraatgtcagtcccgctccagcaggaggaacggaraggaacmcaawtagcccagggaraataratgkgggtactcttcttcggagtcattgggcctcagcaagccagcccarggtgcarascsaccttgtggscagacarggggtagctccttcwactccacagtsgaagcytactacaagtccttggtgccstggmaaagttccccccacctcataatccargcagatttagaccacaggsatcwctyygysgmataaagcaggscctcakgcaysttcagtkccstcagctttcytsmttkcctmagamagkgmmwgmkwmagtstarsakaggckksawccaggyygtcrttgmcgawywcywggycaaacaagccaggctccttgctsstsycsatgtctgcctgtgcagctgccagccgctttgccwsgykcycctcagtctcagtgttgcgctgccgcartcgtygctcswgcacgwccatcgagggaggctgcacagagatgtagatgggatgcagatcagtcttctttgattgcgcactccttgtaggtcgacatctagcacgcagatgcggttcatggcctgcacagcccggacggcttccttgcttgtcccattacaggttccctgagaactcagcatgctcaatgaagtcccctgctgcaatatcacgctgcatcatctccctggtcacaaagtagtaatctttgccatcttcttcgccaggtcgtgggttccttgtagtgtgg

SEQ ID NO: 381 - DNA, 955 bp, Rattus norvegicus
gaaaacttaaaatctgaagagcatagggggccaccacactttcgtcccatacccaagcaacagctgctgctgctgtcataccctggaccaagcatggacaagctgctgctttggatgtctgtcttcaccagccttctttcagaagcctttgctcagacagacctcaatcagaaggtatttgtgttccccagagaatctgaaactgattatgtgaagctgatcccatggctagaaaaaccgctgcagaattttacactgtgtttccgagcctacagtgacctttcccgctctcagagtcttttctcctacagtgtcaacagcagrgacaatgagctactaatttataaagcaaagttggaacaatatagcctatacattggaaattcaaaagtcacagtccgtggtttagaagaattcccttctccaatacatttctgtaccagctgggagtcctcctctggtattgctgaatyttgggtcaatggaaagccttgggtaaaaaagggtttgcaraagggatacactgtgaawtcctcacccagtattgtcctgggacaggagcaggatacgtatggaggagggtttgryaagacacagtcctttgtgggagagattgcagatttgwacwtgtggghcagtgtgctgmccccagagawcattcattctgtggrcagrggtttcccacccaatcctaatattttggattggcgggccctgaattatgaaataaatggttatgwagtcatcaagccccgwatgtgggmcaacaaaagctcatgaaaatgagatgatcagkgtghwcgaggtcaaggtgscagaactcactcwatctggagttttttcttcttwatgaatgtcctgtctamatatctgccaaataaraatcctatcaaattctaaaaaaaaaaaaaaaaaaaaaaaaaaaarwwwrrmrrmmrmaarctattccatttag

SEQ ID NO: 382 - DNA, 924 bp, Rattus norvegicus
tttttttttttttttttykyyttwtaaadwtkthtywwwkttwtttcaatakttagkctcawttttattaagactgacaabtattgamacttaaaattaccasaggtgcagmahacagtaacargcaattaratcctgcaacgagtgttgctcgaccacgcakttagaaaagcyatgtctcagtctcgkgtckgtattatacctggaaggtccccagctttgtccttcttgactgcagtccctgcaaccagttacacccatggaaatggctccaaatttaaactcttagtggkttaarttwtgragtagracttcakraatttgamattttgattttcacytygwrccwatkstwrgtaaacagtaatgggaccatcactactgtgctggytgtgatcaggtaataatctggkgacatttaacagtttcacatttaaaactgagcccaaggtatcagcagcacawggcatttgcactgctggctctacagcacgttactcttagcaacacatttamgcamatggsagtgttcamagtacaaaaattctatccaggagatgctactggtaaggtcaaggtaataagaatcctatataaaattaggttttgaaatgcagtgtcttgataattaccagctgtgttaaaaactaaagtcagaagaaggaaaatagccacactcattaataaaattttcctttgagaaagtaatgcttccattccaaaaaataagcactaatgattctgaaaaagtgattaatagactgtatctcttttaagccaaagtaaacttttcacctcagaaggttaattcttttacatccctaatatcctctgtccagaactgaaccccatttaaactactgtttaaataggatccataatctaaacattttctcatcatttttcactgagtacttcaagctc

SEQ ID NO: 383 - DNA, 1036 bp, Rattus norvegicus
ttttttttttytwkywtwywttttaggtcatttttttttattattatttccaattcttggtaattaaaatacgtacatgtttacatgttcctgattatgtgggaataataaagtaatgttgatacagtattacaaagaggtttcacagatkagacagcacaaaataaatcagtaattatcttttggggcccattttggggctcargggaaggcactcccaaagattccttggtaacaccttaattggttgttaacactaacaagtacctttacaacttaataattcatgccttttatcaacykgggaagcyctggagaaattttccacacaaatttctttgacagttataaacactgtttgatgactttgagagtatctgggcttccacagatwacattgcccaatcactgaggtttgacgtgtctagcctaacttcatggtactgaagagcaactgcaggaggtgctaatagaagacttctgaattarccctagcttcccaggatcmstygykcccagttcccgtacactgatttcactgtgtccttcagaaccgttcccatatgctttgcccagtcagctctactgaaaggttagctaaawyaacaacagatgtctgtggctatgaaagcaactagtaatcgcaagtcagtttcccccaggcattgtccactatccatagatctttagaaaccatttttcatgaggccaacaagtatttgctyyatcrykatatttgacctatgttgggccatactaaaactgcacttcggtagctagtctcaaatttgagcattaaaatatcttaattttactgcatccacataatatgtaacttttgatgctgaattagagaaatctgacaagtgaaggcttcgccgcaagcgtcacattcataaatttcttgggttttcacttccgcatggatcttctgatggttgacaaggcttcgctgttgactgaaacttttgtcacatttttcacacctataaggtttctctcctgtgtgtattctctggtgctgaatgagacctga

SEQ ID NO: 384 - DNA, 1051 bp, Rattus norvegicus
cctcgacaccgaggccctgtaattatgagcttttcttcatctgctctggttttccttgtggccgggatttatatgtcttcagagagtttccatactgaaattattggagggagagaagtacagccacattccaggccttttatggcttccatccagtaccgcggcaagcatatttgtggaggagtcctgatccatccgcagtgggtgctaacagccgcccactgctactctcgaggccactctcccacggttgttttaggagcacattctctttcaaagaatgagcccatgaaacagacatttgagattaaggaattcatcccgttctcaggatttaagtctggaacgaatgacatcatgctgataaagcttcgcacggctgcrgaactgaacaagcatgtccaactgcttcacctgagatccaaaaactatattagagatggaactaaatgccaggttactggctggggatccaccaagccagatgtgttaaccacctctgatacactgcaggaagtcactgttaccatcataagtagaaaacgctgcaacagccagagctactacaaccataaacctgtwakaayymrgsacakgatctgtgcaggggatsscagaggcsaaaaggattcctgcaagggtgactctggtggtcctttgatctgcaaaggtgtcttccatgccytagtctctgggggctatawatgtggcatctccaacaarcctggagtctacaccctgttgactaagaaatatcagacctggatcaaaagcaagcttgccccgtcgagtgcacattgagatgacaagtggttttcttggatctgccaktcacttgcttctttttccaggacaagcttgcagactggctttctcttcrggsstagctggttatagggasagcatggcacagctggggtatatttctgttccttagaaattcattttgttagggagccatattcttttctcacttgtattaatgatttytttttatcactctggtttcattccaaataaaacgtggaagtctgaaaaaaaaaaaaaaaaa

SEQ ID NO: 385 - DNA, 627 bp, Rattus norvegicus
ttttttttttttttttttacagaacacaaaacaataccctttttattttttttaaaactctggkgaaataggtttccawacgatatccctttaaaaaaaaataataatgtaaaccaacctgkgggttagtcacacggtacagacgtcacgagtgtttacagatgcttaaactatttacaaatgctattctttaggtagtaaaggtttgttgcaattttccagcactttttcctcartaaaagaaatggggatgtgttggkgttcttgtawaaaaattcataaatggagaaagtcaatttcctgagagaagatttgttcttgaaatcgtttttcttttaaacaattgggaatacagaagtgggctgtgggtgtaagaagcatatgtctaaagttaacatttttttaaattattttaagtaccattaagttaaaatgtttmcattcrtkmyraawatgctgttaaatcttakgcaaatgatttaacactgrwtgctgcaacgcaaattgcacttaaaaaaattattgtgtacatggaagaaaaatatcttgtttgctaccctgtttacaaattccaagtgacctcagatcagccacgttacaataaacgttgagataagtcagtcagtg

SEQ ID NO: 386 - DNA, 807 bp, Rattus norvegicus
cggccgccgtcbgatatcmacgacggcgatgggagctcaagcagcagccaccagagcctcamgagcacakccaagtgggcgtcstccctggagaatcttctggaagatccagagggcgtgaagagattcagggaatttctgaaaaaggaattcagtgaggaaaacgtcttgttttggctagcgtgtgaagatttcaagaaaacggaggacaagaagcagatgcaggaaaaggccaagaagatctacatgaccttcctgtccaataaggcctcttcacaagtcaatgtggaggggcagtctcggctcactgaaaagattctggaagaaccacaccctctgatgtkscamragstsyassaycwgatcttcaatctcatgaagtatgacagctacagccgcttcttgaagtctgacttgtttctgaagcaccggcggactgaggaagaggaagaggatcctccggacgctcaaactgcagytaarcgagcttccagaatmtacaacacataagytgagcccttcacccccatggagcagagggatggactctcagactgtgtgcaggatgtcattgctttgttgtgtttgaggaytggagtgtgcaagaccttccctcagaatatgtgtattttaktaactgtttgaccagtaacttytgcatgrwggctaatcctccattaaaaacaaaagtagctttaaagtttcagttcacaaaacacatgagagtcctccagcgytggacactcagagccttttaatyttgattaaagttctcgtgaagctamarrrraaaaaaaaaaaaaaaaa

SEQ ID NO: 387 - DNA, 684 bp, Rattus norvegicus
tttttttttttttttttacaaatgttacacatttttattkbkgttctttktgtargaaamaawagtacacaraaagcataccctcagactgtccctttgatacagtgcagaaaggaggtttaaaatatgtgtcacagatgccgcaccttttgcggycaaaatactaaaatggggggtggrgttgggcagyccttcatattatatatatttatataaaacatatgggaatttgtttttacatggattggtcttcgtttcaaatgtacaatggatatctaaaacawaccacawcawcaacaacaacatcracaattctacacggsaaatattgccaaccaagtcacaccattaatacvgagagggcakggctacgtggtgttttgagkwkgaaggaaagcakaataaataacaggctaagcctgtctacggtgtcagagcgcctcgactacaccggccggatcgakcctcgggccccccacatcccaatgtgctcctttcttttccgaaagccacggcagagacagaaaaacacccagggaagacgtcagaatgtgactctgagtaaggtgaaagacgctggaggaaggaggaaatggaggggccagaggctggggcagcatctcggcggccggacactgttttctttttaaaaaggacaaacagtggctccagatatctgtgtcc

SEQ ID NO: 388 - DNA, 519 bp, Rattus norvegicus
ttttttttttttttttytcagagagatggtgttgatttattgatgttgctttgtaagaacaaatttacagctcagggaggcatcctgggggtgggggtcaggtggttaaaaggctgcacagcagctttgatgtadkktkkywwkwwkkwkktacygccarcagctggtttatttawaatraagggtgggggtrgggtggkkcskrrckgsscarggkcwrtgtmtkrakrcarsyggtkcaccttwcmmwgcaccwswctmayrakgwytctgagmskcratgsctaggaaggggaacagctgctgggatcttcccaycctctggaagctgcaragctcaggaactagacgtagatgctggcatggattcaccaracatggcaggmcacaggaggggaactctagaagtccaggagcagctgagggagcaccttcyccagctgatycacatccacaacatctasgtcctcygcttgggcctgcrawaccccacggacagcagcctctattacaaagatc

SEQ ID NO: 389 - DNA, 520 bp, Rattus norvegicus
tttttttttttttttttccttccttctgaaagcctttatctttatctgcgggatgattttttttcctctccaacagtatcgtgcttactatggagcctttaaacttgtggacagagctgacggagactcggaagacctccaagccttgcgttttctgtctgtgatttccatcgtggacccctggatcttcatcattttcaggacttcagtattccggatgttatttcacaaggctttcacaagacctctgatctacagaaactggtgcagccattcctggcagactaacatggaatccactttgtgagggctttgcatgttctggcaagcagtcaggcatgctagaccaacacttctgaaactgtgacctggacaagcaccagtagcttcattacagctaattgcagttgggtgtttggggctcctcttcctgcctttcacaattgcctgacttgatgtaaggaatccacaggtcccatctgttattgacaaggggaacattccagtcttgggaaaagca

SEQ ID NO: 390 - DNA, 960 bp, Rattus norvegicus
  misc_feature (888)..(888): n is a, c, g, or t
tttttttttttttttttgaaacactgcaaatgtttatggaatggagtctcacgctacagaataactggratctcagtcaccagtatttttatccactcagcataawwwwytwkytytywkwytcygcacacagatagctttatgtaaaatacataaacatttgtccaaattggtacacgtattgcataaatatggcagttaggttcgcatttacagataagcatgtacattgctgtgcaaattatcacartattacaatttcaaaaattattcaaactggtatccaagtaaagsatttagtgaaaaaatacccatgcagaatttaaatatctcagaacaaaatctaagctgtyytcrkbmvradttywywywtttwwwwtagttttattcattttatttgtaymtgtcaaaatacattttttttatttccaaaatagtgggttttgcaactagtttcatgcagaaacaaggtctgctcagtactaccaataaagtcaatatagcacagtagctgttcaattgtagatacaaagaatarataacctaaatacaarrcactaaratattasaaacatgtatttaatcactcttcacaggcatccagacctcacaaatagaaaccacagcatgcctaactgttgtgcacgcagaacatgtggcagtcactcaaactcatcaattatctgcgcattttaccttctcattagaccatgaaatactctgtattcagacccaccattcatacagttcaaatataaccaaaaataaaatcctcacacctatccttgtacctttaaagtcaagaatcctgagcttggtagtaagagtataaccttagatcttcataaaaccaatcaagagagagaggacttaaattctacttaccanaacaccctctctcaaccccaaagtaatctaaaataggcagtagaacacaatgaccttttaaaatgaaggggt

SEQ ID NO: 391 - DNA, 412 bp, Rattus norvegicus
ttttttttttttttttktcatgagtggwaactttattgttccaagaactttacatgaacatcacccgccccacatttgggcacacatataaaaagcacaacctattatacaaatccaatcccttgtctcaggtacagcgtggtcccttcccaggatctctcccagtgccatgggtgggtttcaggggcagcagctgcacttgtctgagccccctttgcagatgcagcctcgggcgcacttggcacagcctgkgggacagcakgggcagcagcttttacgacaggttttacagctgcaggttgtgcatttgcaattgtctccgcagatgcagatccctccagacatacacgtgcattccccagggtccatggtccagsykygtgmscgtctcgcggtggcccgaagccttggc

SEQ ID NO: 392 - DNA, 516 bp, Rattus norvegicus
tttttttttttttttttgaaattgccacgttttattttttttataataatgaaagtcagttaaagtttaaaatattgtcagacacatgtcgtctggcaaacaccgtggacctccacattttttgggaattcacacgtaagctcgcagcacccctatgcagacaaggcccctttggcaccatcacacaataattyattaagctgtgatatttaataagtgtgcacaaatatcatgcaacattaggagcagacacacagacagaaagtgtattagaaacagatttatacaaaaaaaaatgtcttgtaaacaaaagggaaaggggttatttcctgtacaaaatatgcaggcttttcttctttctcttttaatgatctgtaagatgtatcatagtttgggcattttccaaaggtgaaactgtataaaaataaatatcctatatacaaacacacacaggccagtccgaggttagaggcatcacttgttccagcagccttggactggtaagcccctcgtgcc

SEQ ID NO: 393 - DNA, 616 bp, Rattus norvegicus
tttttttttttttttttkkywygttaaaaaacatgtttattttacagtatgtacaatcaggaacgtatttaaaaccattatcagttaaaataaatgaagcataaaccacaatttakcttgttcttagtgtatacatactcacatcaaaatataaagaacacatgaacgtataccagagtcagaggcgtgcgcttcgctacaccttgccatcgatcttggtaagacagatacactccattggaaaaacccatcaataatgattttaaccaaactaacttcctgtgatctgtagtaaccattatgatgtctgtatgaggtagtaactaaattattttggccatgtattaatactcyaaataaaaagaaatatggaagtcataataaaataaggccaacagaagtaaaagtccatgaaaaacgcgaccatgtcactgtggaatgtgacggctcttcagtgtgactgaaatgtctagtgtggagtcctcagcagtgccagtctctyctgtgcacactgtcgccctggcgacagctgcagtgttctaccacggtaccgccattctgtgatttacgttttgcmmwsgtgygwmytaagcacagacaagctatcgcacacgat

SEQ ID NO: 394 - DNA, 885 bp, Rattus norvegicus
  misc_feature (744)..(744): n is a, c, g, or t
  misc_feature (750)..(750): n is a, c, g, or t
  misc_feature (752)..(752): n is a, c, g, or t
  misc_feature (754)..(754): n is a, c, g, or t
  misc_feature (789)..(789): n is a, c, g, or t
tttacattgtattgaatagacccaaaaagatctaaaaggagactttcacttggtgttggtcagatcataaagtgcagtgttctgttgttggaactgctccattcacaaacagctttgcrkasgarrggagctggcttaatgcagcagttkatactgtacttcccatataggaggtmkgasagstcagatcctmkgsmgcacaaggytttttaaggaaggytggtgtscctragtagataattacatcacttgtyccactgtgttgacactgttttcctcatgsatctcctcrgtccmtagctttstmtgmtatgcattttcttcacagtgcagcttgcagtccgttgctgaaaattataagctctgcatmrygwkggcykyamtgtkwttwywtgtttyttttttagcaagcccacatctttbtagggtccaaytacaggatwgattacagactttccattagtgtctatttcttttactctgtgtagactttagaaagtctaatccagagatgggccaattcagaattgactataattgaacmcaggctaaaagtatttmtgsgaggattgacacatagcatgagttatttgacttttgtgtaggrtatttaaaatcttcatttgcagttcatgtaacasttgcgtcttamaattcacmcmmtaaascagtcytgttcaawyytmdwdwawwwwawwawawtggggcttgtacaattttttaagtgaatttagggctttttgntttggntntnttgttgttttggtttggttttcatgtggaatgcanatgggtgctagaggaggctctccacatcactatagtgtaatattattacaccacactgaaatgtattcagaaacagatgtttcatttcattcttct

SEQ ID NO: 395 - DNA, 684 bp, Rattus norvegicus
tttttttttttttttttttttttttttttttttttttttwkcaggttatarcarktkacttcrcakaggracratatwtkkcscgcckacaatttksattgaatakcaacaaaaataatctrtrcagaaaacccaaaggcwatcatatagcatagcatgtaaaatrtgcaaatwtactttaaactgcagttactrtgtarcacttgcaagatwgaactgcatakcaattctagttaacctagtaattgtttgcaggtartcaatgcaaatgttcaaggsacaactaaragttggtacacaagtgtgtgacacacccccctcaratcatgtatttgragacattaaaataacatgatggkatgtttatatttcattacataatgagataccagtttgtctcyaaagctccatgamataccacactgaraatgtctgtgtggttaraacaaamtgctccctgaacttaaaagtgaaagacatgactcttgktagcctawatttaaaaargtatgtatatatatgtacacacatacccacatcatccacaggaaacatcccaaagtcaaaaggaagccattttcatattaaaggttcccattacagtatttcaggacaattctcaaaaactgtatacttctttgccacctctcttggtcaatcttggctacaaaagacactgacgtc

SEQ ID NO: 396 - DNA, 1096 bp, Rattus norvegicus
ttttttttttttttttttagttttgcactttttattatggaaaatttcaaacatatacaaaagtatagagaataatgaaatctcaaacatttatcacacagcttcaacaattatcaagtcagagtcaatctcttttcacctatgtacaaacttataccaccctggattatattgaagcaaggaacagtagcatctctgtaaattttcagtagagttttgtaaaagataagggtttctttagaaagcaaatccacagtacatatcaywwwtwkwwwytyywktaagtcataacgtgtagttttattttaaagtctgtaagatgtggggacacaatacatgtcactggtaccatgaggaagggtgttaacactaaattggagttcamgcctttcccaatataatggtttataatgaaaaaagcgaaacacaacaaccagctgtattggagcctctttggaacccttatgatgagctgagtaaaagtgttgacatcacacaccytgtgacawaactctgtgtctctgtccttgtccttggcataaagttattcttcaggaaagagttgagctgagctccctcattwaaattcytcattttgtgttccccttwacagcagtctctttccctgaagcctttctaagggacaccaatttagcactcmtgctcctctgcatwaacatgcagagagcttcgtactgaggagccagctgactgcactaggaaaaggatgagaaccaccgccaactgaaacagtgakagaggcaaagacacttaggcaactaaatggcacaattagctctgaaaactgcttaactarcagtttctcttcctgcttaccatcaaacaatatagaatattgaatctgtaaarccaaaaagaaccccagcattttmtgcaaggaaatgttaaggtgacattttagaagtagagcattgcaaaaattaaacgtattattctttgtatattaatttaaaatttttrtaaaaactcacaataataggttttcattgtaatgtgttacaattacctttatagcaagagatactttttgaataaaattttawgcaaattwacaacagtacaaaaacacctcgtg

SEQ ID NO: 397 - DNA, 653 bp, Rattus norvegicus
ttctagggtttccacagaggtccaaagatgttaagccttcccaaagatcttaagagttctactggccaccctaaatgctatttactggccgctgtgttactgtttwytkttttwwwtttttgttttaagaaaaaattagaaagaargtctttgccaactcttgtatgggctgttggctttcacacagaggtttaaggtccttatgccaacaccagagaatgctctggccagaagatcctgttgaatycacgtgggcaccagctgtggttgggcaccagctgtggttgggcgccagctgtggttgggygccagctgtggttgggcgccagtggttctattctgcttcttcccttagagtgtccaggcaccagytgtacagcagcctggaaggatgaagaagaatccaaaagggtagggtttgcaggaacctggttctgatgggagtatggaggttggggatggatgggggagaaggacttctctgaagattttagacagtagtcaatgaagcagctctcttagaggatcttcagcaaaacaatttgcgcatgcacactttatttggggtgaaccaggcctatacatgaaccttggagtgtgggtaggagttttyggggtaaaatgtaaattattggatgaagtttaacctcgtg

SEQ ID NO: 398 - DNA, 1001 bp, Rattus norvegicus
agggaataagcttgcggccgcttccatttttttttwtttttttttwtttttcwcaatgwccarctttattttttcaktgcwgaacacaatctgaagttaagatcaaaatccccagtccaatcgatttcaaraccataccacaggggtaaaccttaaaagaagtgaaatctaacakatagatttttttcatttctaagtwcagtatattacagaaggttaaatatactacctctgtgtacttacagctataaaaagatacattaacgataccaattatraakaatgtaacgtttcatattaaaggcattgttgtacaacggaaggacagcaaccctctagtgtactayggtgaagggtagtgcctaragttattgagataccgaagattcagtgtccgaggccgaatcctgattcaaccagttgcgatagtattgctgagggagggaggaaggaaggggattggaawgttacttgtctctgacagggctgagagccccaattcacacmtcrtsttccttatgcacatgctggttatgatagaaggcttaattctcactctcgcccagcccaactttaatcctcaaatgtaagcatcacgtccaattagggaggcacatgctgctgacagtgaaagtatccaaatagcagtcgacccaaggagtttggttctatccttaaagctttatgggaaccattttagctttctgagttcaaacatggaattgcacatgttatgggtatatcaaagaggaaagggagaatgttacagcctgactgagatacctaggtcacttggctgatgggtcgggtcccctatgggacccaggtgttacttgttaaccaaataagaaatggaagcacaggtgggattttgaagactacagagctatgctgtgccagctgtctctcagtggcatgaacttccctgatctagaacaggtaatagagctggagaagagcaaaagaaagtgggcgtgcctgtaaatgagtatggtagatgc

SEQ ID NO: 399 - DNA, 1252 bp, Rattus norvegicus
cacgaggataaaatagatactgatctcaagatttctaatacttttcacaataccttccctaagcaggcacttaagtgtgactaatataagggcccttttttttttcctggaaaatccatttttaattaaaaggaggattaggtgaatgggggtggcttactatatcagtgtggcacttcctaaaccatagataaaccattaacttcagctcccccccacacacccaaattaaacaggcaaatacactagtctacctttgaacaaactgattgaaggagtaaacaaacggggcccccgctggcccagtgagaactcacaggggctcagctcgatgcacagacagtgagtggkkwywkyywwkywbkwkbcagayatcaaataatattttaatttctgaatactttcaattttccttggaatataacacacaaagactcgaccaaacagttcagttattataacttttacagtakacagaaaggttgcacttaaaaaaaaaaaaccttcagtttttttaaaaacacaaagtgtaaactcyaagatactgaatcaatcacgtcacctataagtgccaacagtgttattttgtcatgckgatttcaatggtmctttttaaaaagggggaaatwtcaacaattataatacaargggcktgcawmtwtacaaacagatwtaggattcataacaattcaagaactaagggggggggacccaattcaaattacaaaagttcactttttattcaaaacctcagcttgtgtcttggacacgttccttggctgccaataaatgccacagkkcctthtyttwwwwtwttttttttaraaagctaggtttgtcatggtatggggtgggggtggrgaagctaagtgttgatgtgayccctccagcttgctaattagagtgctcaacttctcstaaaaaaaaaaaatttggccaccacttgtaagtgcatttccacaatctstgagttgccttttaaagttttaggtcttcmtrtgcyattttcatggactcagttttaattcttgcagaacatatattttaatgatacacagtttttaagaasccaagattatatcaaaacttattatagaaccacagaataaactggtttggaaccagaaaagttaaaawamaaaawaawaaaccagctagaggtacatagacacaggacaattaataatttggaaaaaaaatgacttactttgtccattctgctaattttctcccaatcccttaaatgcacttt

SEQ ID NO: 400 - DNA, 633 bp, Rattus norvegicus
tttttttttttttttttacagtagtttatggagacattttatttaccaacttttacaaataaggttttacatkwwttkkkwwkyttttwtkywwywkwaaagttttccagaaagtttwttykwwkywtwwtkttaaagacaaaacagtttattaagttcagctcataatagattttcaaataaaaaatatccagagctgttagcactgagcaaataccctcttattagttatatatatakattttatatatatatacatacacatccacaccactttagcttaattagcagttctcttctttttcctccttttcccttgacttttacttggwgccttctggtttgcactggkctgagctctkatkwwtwwwgkamtmtwmtcwggctccamwrtamycmywtcttmttcttcactatctgawagcactataggggcaccttggctcccaatatcagaaacttctcccgtgtccatctttgtatcatcaagaatgacagtttcatcaatgscaccttcctcctcctcttccttctcagaatcttcaaggtcaccccaggagttttctattccctctccaatctgggcagttccargagtccacagcacaggtttagaaacaacctctggaggag

SEQ ID NO: 401 - DNA, 531 bp, Rattus norvegicus
  misc_feature (521)..(521): n is a, c, g, or t
aaacctcatccattccccagtgtcagcaaaataattgctgacatgctcttcaaccttttgctacaggcacttttccttattcaggggatgtttgtgagtctcttccccatccatcttgtgggtcagctggttagtttgctgcatatgtctcttctctactcactctactgctttgagtaccgttggttcaacaaaggaattgaaatgcaccagcgattgtcaaacatagaaaggaactggccttactactttgggtttggcttgcccttggctttcctcacagcaatgcaatcctcctacattatcagtggctgcctcttttctatcctgtttcctttattcatcatcagcgccaatgaagcaaagactcctggaaaagcatatcttttccarttgcgcctcttctccttggtggtctttttaagcaacagacttttccacaagacggtctacctacagtcggccctgagcagctcatcctccgcagagaaattccyttcgccacatycttcttcytgcanactgaaagct

SEQ ID NO: 402 - DNA, 1097 bp, Rattus norvegicus
tttwtttttttttttttwtdwttttttkamagcaaatacatgatttattgagtgaaaggtgtttcgcggagcgcgtactcgtaawtacaaagttctgagtccccgatgccggsaccctccaggtggagaagctgaggataccacaggacaaagaccattttgggttttawgtcytgkcctatttctggcaagccatcctmctgcctmtmatccaatccagagaatgcmamamgaatgcttaccacatatacgtaaacagtctstwywwtwwwywywkwkkytarcgkggatagcttttatttactaccccractccctttacatktgagctatctgggctccwmstkccstctcccattcaaagtcagcagaattccccgggccatagaggttggggtaaccactcaactaggscacagsccaaatgacctagaagaccctccccatggagaaaaggaagagcacagagaakgcagtctgtcctacctagttyycaatgggsgaaggaggattgaggsgactgsgagagtrcmtcmckycastgscyrykkcwmmktcwmwrcwggggwwtgrawgsagcctcmgcwcygaawsrsgakmagggagaagggatgacggtactgcactgtccccatctcsctggacmcccatccccagcacaggcacccctctctgtccactagcccaggtcagggggattcagaagaagtctctgatggaatccaaggaaacctatttcttcttccgttcttgggagcagcgtgggcaaaaccatttccctcgaggcttggttgtcagccccacacaggcaaagtggaaccactcaatggaacagtctgggttgtcacagccaatcatctctccataggagacctggtgacaaaggcaatatgtgggttcgttgggatccacaggcatatccaacacatcagaggggtggacactgccaaaggtcactgagggcatcccatactcaggacttctgcatgccaagaggaagacaaatgtcatctgcaggaagggaagctacaacctgcgctctgaggtggtagaagatcatggtgaagcatggtgtggcttcttactccatctcagca

SEQ ID NO: 403 - DNA, 703 bp, Rattus norvegicus
tttttttttwkttttwywwwwttacaaaaggaaatttatttcaaaagcrtaagrraayatttacatttaaacaaggtggtaaacaggtgtccttgtggaasaaaaagattcayggcataaagattttctttcaaatttctgragcaaaamgmatactaastcawgaactamtgactakgcaagggaaaggrarcaaaaggataasgamkggatsaatgcasggagttctgtastagacatgaggtcaagttacytstgctgagtttacaaataccctcagacaagakaggaaacattactgtgttcaaasttatattgctatagtcccaattcatttttgttcttgaaatggctttaggccatggctgatttatcyctgaagtccataactagatggtcagagtagtcaastggcaatcccatgttcytgtctgtwcagatkccaagggagcctasgttcagctcagtcctgtggaatgctcasagtttattgccagcactccttagtcaagctgaccaasttcccgkgctcatwtccaycattmtagmcttkcmgaaatatwttysycrtraatacgtgcagtggttctcacaaaggagawtaytttttttttcccagtgtacaagtgatggtaatgaagacacctgtgtaggaatcaaaacctgaaaaaaaccaaaacagcaaaccactaaaaatgtcatc

SEQ ID NO: 404 - DNA, 599 bp, Rattus norvegicus
ttttttttttttttttttkkwwyywwkttwwtwwwtacaattcaggatttattaaaaatcagagttcccctgctgtgccctcctagcactagagaaataaatrwccagagagggcgccactgggtgaatggaaarakaaggtaatctcarggsagattsttatacctacccctcccgttgccaatacctcccacccccactatggstcttgggatatagcacctgarcaggcacctcartccagrtagaacgtggytggcaccaaggcatgtccgccctgcccargargggagacaggscctgggatyacatttccagcccttgakaacmcmgagacytgctccccccargggccagggstgaagcaccaattgraggcacctgagggkkadrggtggtggtggtggtggtarggagaatgggctaacaacctaggcaaaakaagctgaaaggaggtccggcccccaatccakttccagccagtgcctgagatcctgtcccacctcccttcccacttgaagccaaaaggctctatctactctcagctgaggatcttccggggcagttcgacagaggcacggatgaaaactgccctcgtg

SEQ ID NO: 405 - DNA, 891 bp, Rattus norvegicus
cmgcgkctttccwckwgstagacctccctagctccgcccgccgcgtgctcccgcctcccactcggaatgcctgtctggggcggtggaaataagtgcggggcctgcgggagaaccgtgtaccacgctgaagaggtgcagtgtgatgggcggassttccaccgctgctgctttctgtgcatggtttgcaggaaaaatttagacagcacaacagtggcaattcatgatgaagagatctactgcaaatcatgctacggaaagaagtatggaccaaaaggctatggttatggccagggcgctggcacgctcaacatggaccgtggtgagaggctgggcatcaagccagagagtgctcaacctcacaggcctacaacaaatccaaacacttctaaatttgcccagaaatatggaggtgctgagaagtgctccagakktggggattctgtgtatgctgstgagaagatcattggagcwrraargccswggcmcaaaaactgttyccgatgtsccaagtgtgggaagagtctggagtctacaactytgrctgrgaagkaaggtkwwatctactktwwagggtgywamrmaaakmastwwsrgmcmaagrgwwwsggmtayrgwmaaggagcaggggcccttgttcatgctcagtagtgktsyaawcsmagtrrgcatggcaaagamcctccattaatgtggatggcctyaccscactcarsytgtgcatcggccagcactcagcactgtgtagcacacacgstatgtgcacmatcgggytggacaggaagcahtacactctcytgyccatccgctaacgtttaagaacgttyttyymcatttggaataaaattttggtttgrtttgrraawrdaawaaaaaaaaaaaaaaaacattgcg

SEQ ID NO: 406 - DNA, 544 bp, Rattus norvegicus
gccagtggaataagaacacctcctagtatttgaattatcagagagggtcatgcagtgtgtggtttaaaggagattttctgtttctgattgttattaaacatgtgcaaccttcttgtacaggtaaaagacttcctgaaaaccctcacatttcaccgctaacacacactcactggtatagaccaacacgttctgattgggaaaaccctcgaatacagtaggcatatgcttatattttgcaaattatgaggtgattgcctatggtgtggaaacagtctttttagcgctaactagtttggtttcttgaattagttgaattgatcccattgctcattcatgatgaggctaaatagcamatgattttaataccactggtagacccagtcgacacagaacctacatcttccaatcctcagaaaaagcaaatgagcaaacacaaacacattttaaatactggctgagcagaggtacgccattactgaaggcgctgggtgtgacagacaacttgttgctgtgcgttctgtatggttactacacaccgtgagat

SEQ ID NO: 407 - DNA, 614 bp, Rattus norvegicus
accatattgaacacacaaacataacctaaggtcaactgcaaaacatgaagtcagctccaaacagttgwaasmctartaagatrsraakaarcwtykkyykwwywdwkwywkwtytttkwtkwwytttttaakgkgaactggtttatttaaacaaggatccagggtakacccggagaatgttctagtagagcatggcacagacgaaggttagttaayactcactagcasctyacatgagacagaaakatgaaraaggtaacacatcacagawggaaaaccacgcacgcggwaaaggcacctggcaggaragcccgtgtcccarcccctytarcaaggtcgttcttgtgcactcagtctggacagtatttggaagggaacawawrcagttctaatctaaagccgaggctccagggscagcmkcswgcctyttcactcaggstgctggtcatytgccgtgtggctggggactgagtatgctaagcagggatataagctccttccascctttgtttctccmvwmggmmsmmtyccccagtttyagcagtggattctggaagcttttaagcattttaacttgaaaacactaagtaagagcagactgactgaatgtaaac

SEQ ID NO: 408 - DNA, 572 bp, Rattus norvegicus
tttttttttttttttttykkwkbtgkkgkasccatacctttaatcccagcacttaggaggcaraggcctaatttctgagctgaaggtcagcctggtccacagtgagttccaggacatcgagagctatacagacagaccctgtctcaaaatcaacaaacccattcagaatakcatcaamcacawaccttcaktaattacacagaacaaagacctatggctggtgcataataagtacatacgaagaaataawyywywytkytkwwywtaggagtcttggycyttttakgtatacttaacacagagaaggtatggtctcaataagaaaatacactctgtgttcatgtgaacccccccgaatcagccactaagaacactttggcatgaggaaaagagggaaggggagcataaataagactaggaggggaagtcactgctgtacgggcacacacaggcaggagcacaccgccaggggcacagggcctcttctttctgagagagtaatacagcggtacaagagaacagtagccacagactaagcctgcaattgtkggggggaggggaaagatgaacac

SEQ ID NO: 409 - DNA, 909 bp, Rattus norvegicus
  misc_feature (21)..(21): n is a, c, g, or t
ttttttttttttttttttggnttccatttttactttcaatcccagtctttcctttccattacaaaagcaactaaacaaacatggaccggagggcaaaacctaacatttgcaaggcaaagcaactcccagattccaccaccaacacccacagatgccaggcagacagccctcaggggaccagtwwtywkwtytwywyywtwcatgcgtgacattttatttcatagaaaaaaagaaactgatcaaccccaaaaagccaggtggtgcactggctttgtacacgcagactcttccaratagcttctcgtcmggcccggcagggaagggaggggccacgcagccttcagcagttcaaggagacagcaagctgtcggccatggggaagctgggaacgccagtctccttgctctccctggcttggagggaagtggccccacgtgcctgtggcctgctgtgcggggagcggatcccttacarctcattggaggcatcttggtgcgtgcctagctagcgtgagcaaatggtccaaggagtccgagacacaccagtctttgtcctyagtccccctccagycatccaggagctcagtccactgagccattgkaggatttgttgaacttgttgaaggcaaaatctacmstmtgtgysgagatgggctttctgtacagggggtttgaggccatttcataacgggccctggagcgctcgctttggaacttggcaaactctcgacggtcgtggatggtgacgagtagtttccagatggccaggagtgccattccaaccaggaggatgctgccaaccacagccagcaggatggtcatggcattgggggcacttccgcactctggctccctgaggacggtcaagttagactttccattgggcagttctgtgtagctgaacctcgtg

SEQ ID NO: 410 - DNA, 513 bp, Rattus norvegicus
ggaaacgcccctcgggacagctaccacctggtcgggatcagcttcttcattttgggtctgggcaccctcctcccctggaacttcttcattaccgccatcccgtacttccaggggcggttggcagggaccaacagcagcgctgagaccccgagcaccaaccacaccagtcccacagacaccttsaacttccccctctcacccacaaggccctgggtagggcatgaagtgttgtggaaattgaggggaagacaaaaaggcctctgtgaggcctttaggacaagctgggcagggatcrtccccaggtgggattcgactggtctatggaagartaaggctacggccttcatctccctcctagaaggtgctgaccctgtggcccaccgcttgcttcattcctcaaaggtctccagagaggtgcccagagcacttgctcccatctcctcaccccatttctcctcactctgttcccgcatccagtaaaaagtgttcatttctaaaaaaaaaaaaaaaaaa

SEQ ID NO: 411 - DNA, 6701 bp, Rattus norvegicus
cacgagcggatcccgggttgaggagacgccgacccgggcgcagagccgagttcctggaaggaggagcgcgcgggaccccaccgtatggccagctccggcacttcgtccccagtgggcgcggggagccccgatcttgagcagggtgactttggatcctgttattcacgaagctctcaaaagtcggatgccaatgcaagttacttgagagcagctcgggcggggcacctggaaaaggcccttgactacatcaaaaatggagtggacgtcaacatctgtaaccagaatgggttgaatgcgctccatcttgcttccaaagaagggcatgtggaagtggtctccgagctgctgcagagagaagccaacgtcgatcagccaacaaagaaaggaaacacagccttacacatcgcatccttggctggacaagcggaagtggtcaaggtcttggttacgaacggagcgaacgtcaacgcacagtctcagaatggcttcacgccgctgtatatggcggcccaggagaaccacctggaagtcgtcaggtttcttctggacaatggtgccagccaaagcctggctacagaggatggcttcacgccattggccgtggctcttcaacaaggtcacgaccaagtcgtatccctcctgctcgagaacgacacgaagggaaaagtgcgcctcccagccctccacatcgcggcccggaaagatgacaccaaagcggcagctctgctcctacagaacgacaccaatgcagacatagagtcaaagagtggcttcaccccactccacatagctgcccactacgggaatatcaatgtggccacgttgctgttaaaccgagcggctgccgtggacttcaccgcacggaatgacatcactcctttgcatgttgcctcgaaacggggaaacgcaaatatggtaaagctgttgctcgaccggggtgcgaagatcgacgccaagaccagggacggtctgaccccgctgcactgcggggcgagaagtggccacgaacaggtggtagagatgttgctggacagagccgcccccatcctttcgaaaaccaagaatggactgtccccactgcacatggccacacaaggagaccatttaaactgcgtccaactcctcctccagcacaacgtgcccgtggatgacgtcaccaacgactacctgaccgccctccacgtggcggcccactgcgggcattacaaagttgccaaggttcttttggataagaaagctaaccccaatgccaaagctctgaatggcttcacccccctccatatcgcctgcaaaaagaaccgaatccgagtaatggaactccttttgaagcacggtgcatctattcaagccgtaaccgagtcgggccttaccccaatccatgtcgctgccttcatgggacatgtaaatatcgtgtcacagctaatgcatcatggagcctccccaaacaccaccaacgtgagaggagaaacagcattgcatatggcggctcggtcggggcaagcagaagtggtgcggtatttggtacaagatggagctcaggtagaagcaaaagctaaggatgagcaacaccccactccacatttcagccgactcgggaaggctgagatagtgcaacaagtcttacagcaaggagcgtccccgaatgcagcaacaacttccgggtacaccccccttcacctttcggccagagaggggcatgaggatgtagctgccttccttctggaccatggagcattcttatccataacaacaaagaagggattcacgcctctgcatgtggctgcaaagtatgggaagcttgaagtggcaagtctcctgctgcagaagagtgcgtctcctgatgccgctgggaagagcgggctaactccactgcatgtagcagcacattacgataatcagaaagtggcccttctgcttttggaccagggagcctcaccccacgcagctgcaaagaacggttatacgccactgcacatcgccgccaagaagaaccagatggacatagccacgtccctgctggagtacggtgctgatgcaaacgccgttacccggcaagggattgcgtccgtccaccttgcagcgcaggaagggcacgtggacatggtgtcgctgctcctcagtagaaatgcgaacgtcaacttgagcaataagaggggcctcaacccactccacctggggggtcaagaagaccgagtgaacgtggctgaggtccttgtcaaccaaggggcccacgtggatgcacagacaaagatgggctacacgccgctccatgtgggctgtcactatggaaacatcaaaatagtcaattttctgctgcagcattctgcgaaagttaatgccaagacaaagaatggatacacgccactgcaccaggcagcccagcaggggcacacacacatcatcaacgtcctgctccagaacaacgcttcccccaatgaactcactgtgaatgggaacacagccctggccatcgcccgacgccttggctacatctcggtggttgacaccctaaaggtcgtgacagaggaaattatgaccaccactaccatcacggagaagcacaaaatgaatgtcccagaaacaatgaatgaagtcctcgacatgtcagacgatgaagttggtaaaggcagcgcccccgaaaagctcagtcatggggaatatatctcagatggtgaagaaggtgaagatgccatcacaggggacactgacaaatctctcggcccacaggacctcaaggagctgggcgatgactccctgcctgccgagggctatgtgggcttcagtctcggagcccgttctggcagtcttcgctccttcagttcggataggtcctacaccctgaacagaagctcctatgcgcgggacagcatgatgatcgaggagcttctggtgccatccaaagagcagcacctcccattcacgagggagtttgactccgactccctcagacactacagttggccagcagacacactggacaatgtgaacctggtctccagccctgtgcattctgggtttctggttagctttatggtggacgcgagagggggctccatgcgaggaagccgccaccacgggatgcggatcatcatccctccccgcaagtgtacggcccccacccgcatcacttgccgcctggtaaagagacataaactggccaacccacccccccatggtggaaggagagggattagcagtaggctggtagaaatgggtcctgcgggggcacaatttttaggcccggtcatagtggaaatccctcattttgggtccatgagaggaaaggagagggaactcattgtcctccggagcgagaacggagagacctggaaggaacaccagtttgacagcaaaaacgaagacctctcggagctcctcaatggcatggacgaagaacttgacagcccagaagagttgggcacaaagcgcatctgcagaatcatcacgaaggatttcccccagtatttcgctgtggtttcccggattaagcaggaaagcaaccagattggtcccgaaggtgggattctgagcagcaccacggtccccctcgtccaggcgtctttcccagagggtgccttaaccaaaaggatccgtgtgggtctgcaggctcagcccgtaccagaggagactgtgaaaaagatccttggaaacaaagcaacgtttagcccaattgtcacggtggagccgaggaggaggaaacataagccgatcaccatgaccatcccgatcaccatgaccatcccggtgcccccaccctcgggagaaggggtgtccaatgggtacaaagggggaaacacgcccagcctgcgattcctctgcaggattacaggagggacttccccggctcagtgggaagacatcacaggcacaacccctctgaccttcataaaggactgtgtgtctttcacaaccaatgtttcagmcaggttctggctgkcggactgycatcaggtgttagaaaccgtaggsytagcctcgcagctgtacagagagktgatatgtgtcccytacatggccaagtttgttgtttttgccaaaacaaacgacccmgwggaakcckccctaaggtgcttctgtatgacagacgacagagtggacaaaaccctggarcagcaggagaatttcgaggaggttgccagaagcaaagacatcgaggktctggaaggaaagcccatctatgttgattgctatggaaacctggctcctctgaccaaaggagggcagcagcttgtttttaacttctattctttcaaagaaaacagactgccattttccatcaaggktagagacaccagccaagagccctgcgccgtstgtcttttcctgaaggagccgaaaacaacaaaaggattaccccaaacggctgtttgcaacttaaatattactctaccggcgcataaaaargctgagaaggcagacagacgccagagcttyacatccctagmcttacgtaagcgctacagmtacttgactgagccyagcmtkamgtccrcagagtccttgtgagcggacggatatcakgatggcaatagtagscgatcacytsggacttarwtggacagagctkgcaagggaactkratttttcaktggatgaaatcaaccaaatacgagtggaaaatcccaattctttaatttctcagagcttcatgttattaaaaaagtgggtgacgagagacgggaagaatgccacaactgatgccttaacttcggtcttaacaaaaattaaccgaatagacatagtaactctgctggaaggaccaatatttgattatgggaatatttcaggcaccagaagctttgcagatgaaaacaatgttttccatgacccagttgatggttggcagaacgagacgccaagtggaagcctagagtccccggcgcaagcgcgaagaatmaccggtgggttactggaccgtctggacgacaggtctgaccaggttcgggatcccattacctcatacctcacaggagaagctgggaagttcgaagcaaacggaaaccacgcagaagtcattccagaagcaaaggccaaggcctactttcctgaatcccaaaacgatatagggaaacagagcatcaaggagaacttgaaaccaaaaacacacggatgtggtcgcgctgaggaaccagtgtcacccctcacaggctaccagaaatctctggaagaaaccagcaagcttgtcatagaagacgcacctaaaccctgtgtgcctgtcggcatgaaaaagatgaccaggactccggctgacggcaaagccaggctcaacctccaggaagaggaggggtccgccaggtcagagcctaagcagggagaaggctataaggtgaaaacaaagaaggaaatccggaatgtggagaagaaagcccactagtgacggtgacgtcagtccaggaccacgcgttcgtactgccagtattgagaaactcaccagagatcagcagggaggagaatctctagcaagagcggagtgtggatctgccaccccacacatcagtgacatgtttggggttttgggtttttttggtttttttttttaatgcagaaggatamasrarrtywycttttttttatttagcatgagccaatttacagagcatggagactcactttcattcccggcgctgacacgcgtgcactaagcaagtgcaatgtaagatacaagaagccatgttgttcagactcagcctcaagtaatttggtgtcactttcggagaaggacagacaamcaacgacacctgtgccaccggaaggagggrggccagcaccaagtggagcgrtcmcaatccaggaagacacmcttgaaattactaaawcccacmacaagctcgccttatttttcttggacccaaactaactgtcagggtataaacactgtttgyttyttttttttttttwaaagwwwaaataataataararaaatcaatagttttgctgtaaataataacactgtaaattctaacagaagaamctacaataaagaattataaggcaccygcctcacggaacacaaagataccacaaacgcgtccawtgacaggcgtaccaagtggcctcaccctggacaaggacgkgaatctggcgcgtgcgsgacgctctctcactgactcctgtatattagcaattatgatgtttgtacacgcmaaactgctsgcttggttttaaaaagaaaatgcaaatctttwaaaaaaaaaaaararaarwvwrctgcaaaatttaaataattcccccagcgaggaggaattctgtagttctgtgaagagaagaatttttttcsttcagaatatactaatattttgatgcatgcatatctccttattttgattaaacctttkccaattttgcaaacamtacagtctcctgcaacacgggagattttacctgtaaacacaaagcccttcatgtaatatttattgctattgccaattktttcaatgaaatgvccaraaawrrraraaaaaaaaaaammwvstrtacagtagtttgcttgggggtggggggaggggcgctgttagtgcttacagggsggaaaatgcttgccactgtagaggtggatggtgcttacaagaggccccagtcatgggtatttaaaaaaaatggactgaccggaaacccgtatctagcaggatcgaagtgcactgtaaaaaaaaaaaaaaaaaaaagggaaaaaaaaaaaaaaaaaacctttgcggccctcgtg

SEQ ID NO: 412 - DNA, 388 bp, Rattus norvegicus
tttttttttttttttttctttccgaattactttatttcccgcccccactcccggctccgccccccccgctccccgccccccaaagacatcggaaataagcggcccctccccgataaccatgaaagcagtaaagcagaactccctcccccctccccagttcaaagcaggagatgcaatctgggctccacctaatggkcttcacatccttagggttgccaggacccctccagagccactacgacccacaatgacctcacacaggctgtgacctgccaactattgggtcctcaaaagtgcaggaacagtaccgccacaagcaccagtaggctggagaccaccacggagccgcctgagttcacctgcactgtggragaaatttccctttggg

SEQ ID NO: 413 - DNA, 519 bp, Rattus norvegicus
gcggccgcccctgaaaggcgccccggcggcggcccagcctcttctttcctcgcacagccagacggcccctgctcgaggcccgcgtcgccatggccgcggttcccgagttactggagcagcaggaggaggatcgcagcaagttgaggtctgtgtctgtggacctgaatgttgacccatcgcttcagattgacatacctgatgcactcagtgagagagataaggtcaagtttacagttcacaccaagaccacactgcccacatttcagagcccagagttttctgttacaaggcaacatgaagactttgtgtggctgcatgacactcttactgaaacaacagattatgccgggcttatcatccctcctgctcctacaaagccagactttgatggccctcgagagaagatgcagaaactgggagaargtgaaggatctatgacaaaagaagaatttgccaagatgaagcaagaactggaagctgagtatctcgctgtctttaagaagactgtgtcctcacatg

SEQ ID NO: 414 - DNA, 1294 bp, Rattus norvegicus
tttttttttttttttttattttttacctttttatattttktatatttttwywwywwywwwwtthkkdwaacaaaawggataaatttattttaaaaattccaggtkatgtcccaatgtcwgtgagtgttccgtawcttgtaccttccawgactacattcagttacagttgttgagtaaaacacaaggsatgtgaatgccccaaatgtcaaaagcactaacttasctytggsatgcaatactggttaaggaatggwtactacatccagtctttactcawcttcagttaagcagaatcacacgttccatggatatttcagctaactkagggttagacccataggatcatggtactcaacagactgaaaacagttccctttcttcaataagttcttcaataagtccctgccctcttgaaaatacaaaatattacttttgatgaaaacttttatatcctatttagaaaaattcttaagttgacacttaaaagaattttcaataatttcccacaaccmtctsrtaractgataacgcctyrwgcykmaykakrmaaggkttttttttktgtaagataatcatttccaagggggaaaatgtcatcttacttgtattttaaaaatctgctttatataaaawtgtagaaatgtcacactgccaaatatccttttgatccaactcttactatagatatatcagtcacatcaaagacgtcacaaatgtcaagcaggacagcasgagtgactggctgcatagctttatgattcagagtagctgttaggaatctcggtcttctgcccccttctggctgtctgagagcactgcagtgctgaagtggttatctgtgggcatctgtcatatctcagttacccgcccatsacaggctgtggaatggkagttataaagacyccatctcakaccccctttaggtctgtgtatagcacattgtgaatttatacaaactccacttccagcttttamacagtaccgtggraygsrcttctatacsgttacaaaataccttccctgtaaatgcactgaamctttccttgggtgttttcaaggcttacttttagcattattccaaaagctaatgaccagatatttaaaaatcccaagtataaagtcagttttcttaatttcctgaaattagttatctgagttaaaaggattctgtaggaatactcacccatttcatctaactttcaaaacagttgaaacaaaagtttaaamaarmraamaaacacccacatctgctatwtatgtcaagaatctctcgattcccaaactactgaaagat

SEQ ID NO: 415 - DNA, 665 bp, Rattus norvegicus
tttttttttttttttttgcatattwagcagcaaatgacagatgcttgtttatgcaacagttgttttaaaggaaacctctggtataagaacaccttagtgacattcttgattcagtgcccmccttaaaagttstgaatgacctgaccaatttggaaaccgtggcctgtcaataccaccgtcstgaaaagacccgaaaaggtcttgttcttggtgatgaattcccagggcagttccagtcctaggaaacgatccttggagaattattttggaactmttcggagttcattcatgagccaaggagcctgaytggtgtgtgtggcarccascggagttggcacatacataagcagagtgstgatgcccaaggccacctgtgsatatgccaaagctagcagagtcrccgctgccatcttggttsttcgaggaagggggattctccgggacaggaamtaragcattgtwatggcagtgrcaracgtgactcccagaagccggtgrtcaaactgaaccatagtaggattctcaaaaacattyttcaggatgggagaraaggtcaggaggtccacaggctgccacagtagaraatcagtgstgaccccaggtgggctgcgaggcggtactgactgacccgagggatgtcataggactctggtttttccctcgtg

SEQ ID NO: 416 - DNA, 577 bp, Rattus norvegicus
  misc_feature (97)..(97): n is a, c, g, or t
ttttttttttttttttthywkttcaggcacagagtttattgaggtgaccccagtgtgtctctactcctctttctcatccccgtgggtgatkawgtancaravakacttgtmvtcgatgttgcctgtcakgtccatgggtgtcaggkygawhagctgmtccahctyrdsaggwgavarcwtrtmtgbswksrycmtgaraarctgcttkaactcctccttgttcacaactccctggccgctcgggtcaaasattcggraagcactcakgatggsctcctcarggtcggtcccattkagtttctccccsaaragcgtkaggaaracggtgaagttgatgsggsccttccyctcttgcagcatggbatcyagctyctcctctgggamacttaccctcccgmgctgkkmmdaagtctccttcargtctgacttgcagatgatyccgtctctgttctggtcaatgcagctgaaggcttccttgaattcctgaatctgggcttgctcgaayattgagaagacattggaagagccacgttgagcctgcttggtggctgcagccttgccccgggtcccagccttc

SEQ ID NO: 417 - DNA, 539 bp, Rattus norvegicus
cggccgccaaacttttttttttttttttttttttttttkwgccttaaataaaagtttaatttcttacagatcargtgttagggagagcagctttagattgtctcggcctttctttcatggtgccaaagtagcttccccagatccagccatcacacccacgttcacagtakgaaggcagggtcttgggctgggagtgtactccagaaacccctctattgactttgctcagttctgctgggccatatggcmgctcctsacagcaaaagaggctgggacactgaaccaaaggcccattgcgattggcacctgagcctgctggggttcygaagtctabgtccattggccagctgtgcagaaccaggakcggctgaggccagccccatagctgcagatcacagacctggktttatcccaatgactctagtccctaaagaatgactgaggccagagccagakgccagactccakgcakggcacatgtcaccctcasgagggtgaggaccccwwscccctcctacacaccaattcaagtgttcctg

SEQ ID NO: 418 - DNA, 650 bp, Rattus norvegicus
ttttttttttwywkkktccagtctagctctctgagcctttattactggacaaagagctgccatttggagtattaccatggtcgtcctgtaaagtaagtgctcaggctttggggacatgcctggtgacagtgtctccactccaacaaggtgaaggactcttggtccccagtgcatcttgggttctgggtcctttctccgtgagatcagatggagctggggtagacctcccagctggggctgcttagatcactcacayggctgtcttcaggggcacactgtctgccggctgatccaggtccttcctcgccagggccaggtgtgtgaagacaagaatgaggatgaaacctwkcgctgccakkgwscccmasakkrcascsacmshtgacagcttsgtkggmrttsccwtcatkygrscmwcmttgygsatgcattgaccctycacattgyarcgacacacgatcacttggacttggagttgccacatttgggcmtcrtgsyggacaaccacaggtdcygtgtwttcaccaggctytacccagtgcaatgccaaggtgaggtaggcgtgggwrtcaywgagagkstggmkgsgccmrkmccgctgcacagtgggttttggtccaagagcaaagctgtagggaccattcctgttg

SEQ ID NO: 419 - DNA, 1010 bp, Rattus norvegicus
tttttttttttttttttadaacayatatctttaattaagttgatactggtaaattaaaaaaaacatkcagtgagaagatgacagytaagamaataatgtattctatgactattttgayamaatgtttaaaatataaaggttttaaaagkccattgtctttttctaattgaagggagaagaccaagcaaatattgkcttcttatacaaatgagcctacaggagaatrattcttacatgggaagcaccaggataataagaattgttaatttggcattttttctcaaaaccatcaggagtrtgcaaaaacaatatataaaacaggagattgctccattggatatgataagttgataagtttwacatgaaccactaaawttcygatcaaagttacttaaaggatgtgttttctttaagtcagataagaatttatgggctaaaatcccaattaatttgattccagtaataacttgatggtaagataaattctctcccatgaatatcttgctgtctatagagtaagatttcatagatttttttcagaagaggggcttatcccggatcacatctaaatgactcaacattttgagctaagaggttgtttacagaatatacacattttttttttacttacagagcaaaataagattaacactcgtctattaaaaacctgggggtacattaggattagtagcamcatgaaaaagaatacttcctcaaactgcagtcagtatttttgattcttctcttcattgaatttttaatgtgccattttagtaactaggcraattatatgaacttcgtcttataatccagaaatttattctggacccccagaagtatagtcactccccaacttctttcataagaaagaatggaggccttgctctggcacatcgctgaggtacttgtgaaycttcatggttactagtcagcatgttcctttcttcatagaggatattagcaccattggtggtagcagtggtaaagttggggagagtgagtgcctcgtg

SEQ ID NO: 420 - DNA, 1282 bp, Rattus norvegicus
ttttttttttttttttttgagttawaaaatttattgtgtaagcattcagacactttgaggtgggaaagatgatacgcaggttgtactacargattcartggaagatgtcagacaggacatctggtacagacgcagyagcwyaacccaacacaggttagatgagagcgcttcatccggaagaaacttaaagaataatttaaagctctgtgagacaagatatgttccaattgaaaacactaagaracagtwccattgwtggaaaaaggaaaacttctatgtgtaccaaaaggggcgcarggtgaacgagagggaaatttgcgtctgttgaggtacaaatgggmstsktscacgarkksggggataattattaktaatgacagaccctgtaaatacaaaataaaatccaaatcactggtcacgaacttcaaatttacacgtaataaaggcaaggcaataagactcgagttctggcctgtcaaatatttactccacagacattatctacagaagcacttggccaacgtgtacacagtgatcyktatgcacgccaaaagggtttcggtaaaawtgacgctatatacaatctgtacaccgatccaccagagcgactctccgtctcccgggggargagctatcaatacaaagagatacctgaggttgcgtcttcaacwkcmkwakrryaayccwmrtrtwywyttywkkkytktttgtgtttaaagatactttctttgaatatgtgcactatgattaaaattaaaaacgataaaaaaataaaataattgcttgaaggagaagaccctcccccaccctatcagaagactccatctggctgtggcacgacgaggctgtccctggataggtgctggcgctaggggagggtgggcccctccgtgacacctcttcgcagagtcggcaaaggctctcgttgacttttaaaaagaaggaagatgaagaagaaaggaaaamccaaccaggacgccatgggctttcagtgcgctgaggctcctccaccgctcagagaatatctctgcagccgttgtacaagctgtgccaccatggtgtcggagatcccagggcaggcctcttccgccaagtagatggctccccgawgctmktcywyygascysragttccctcswsackccyggctcbksyckwhcasctcykswamcwgwsgagaaatgattgtggacaagcactgagagaagggcctctttgggaagtctttcatcttatttctttccaaatctgagggctgaagagttccgttctccagattctc

SEQ ID NO: 421 - DNA, 657 bp, Rattus norvegicus
tttttttttttttttttcgttaagagagagattttttttttattattatttcccatagggaagggggacatgagaggatcactaagaactacagcaggacctggaaaataaattaaaagagacatgtctcagaacaaagacagagacacggagagcagctgggggggccgcagggatgggcggtccacccaagcagcaggctctccaccagaaggctgagcagtcccaggcctcagccagcccattttcttgtccctctgacggtgatggccccaggctccaagccctgtggggccgtgactcgacayctccctgcagcctggctaaggagtggccagagtccagcgtgggcccctggagccccggccrgcagcaagcaatgctctgcccttgtgggctctcgactgttcccctagtcattagaggtgacatcaatgtcctccccgttggcctgcttcgtggcgatgcgccaccggttgatatggtgggaacccttcttcttctgctcagactccggcccttcctcctccagcttctgccgtttgtattttgtcctccgattctggaaccacaccttcacctgcgtctcggagaggctgaggctgcctgccagctgcttccgctcggcacccaccacgtaatgattcttctcaaagg

SEQ ID NO: 422 - DNA, 983 bp, Rattus norvegicus
  misc_feature (464)..(464): n is a, c, g, or t
  misc_feature (602)..(602): n is a, c, g, or t
  misc_feature (639)..(639): n is a, c, g, or t
ctctttcccgtcttgcaagatggcgggtgaaaaggcggagaagcctgataaaaaggagcagaaacctgcagccaagaaggctggcggtgatgctactgcgccccgcgccggggcctggtgcgtcaaaaagagtagttctaaggctaaaaagctgaggaagagtaagccccattgcagccggaaccctgtcctggtgagaggaatcggcaggtattcmcgatctgcyatgtattccagaaaggccttgtacarmagsaaatactcwkmkgssaagasrwagsttgabmvkmabrasragaaagarraggtyywtrswwscktyrcaaaaacagytggtggggmcaagaacggtggcacccgggtggtgaagcttcgaaaaatgcctaggtatyacsvkrctgaakacgtgcctcgraagctgytgagccacggcaagaagcccttcagscassasgtgagghggntgcgctcmakcatcaytcccgggactktcmtgwtmatcctmamtgggcgccacakgggcaararagkkgttttcctcarscagytgggcagtggcttgmwrmytgtgactggacctydtgccmtcaacaragwtcytntgsgtaggacacaccavaagtttgtcatcscyacctntacraaagwtgatatcrgcaaggttaaaattcccaaacacvtgactsatgctkacktcaagargaagccacttbgcaagcycaggcatcagraggstgagatbttmgacmcagrgaaggrgaawtaygaaattacagmgcagcgaaaggctgaycagaaagctgtggaytcgcagmttttdccaaagatcaargyygwssyccagckcsaggsmtachtrcggthtcagttytccctgacgaacggcatgtaccctcacaaactggtgttbtaaytgttaacamccyawtwaaamtgmttchtmddrdwhmawaaamaaaaaaaaaaaaamraacgccctcgtg

SEQ ID NO: 423 - DNA, 2101 bp, Rattus norvegicus
  misc_feature (1717)..(1717): n is a, c, g, or t
  misc_feature (1890)..(1890): n is a, c, g, or t
cgaaagtggagcaaggccggagctttgaccataaagcccaaggcggcggcgttggcgacggtgtttggggctggcagctccgaggagcctgctggagccggagtcgaacctctctgtcgcggcctgcgttgtgtctcctcctctgttgaccctgcgcttcaaggatgacctctaggaagaaagtgttgctgaaggtcatcatcctgggagactctggtgttggaaagacatcgctcatgaaccagwrkgtgaataagaagttcagtaaccagtacaaagccacaataggagcagactttctgaccaaggaggtgatggtggatgacagacttgttaccatgcagatctgggacacagctggtcaagaacggttccagtctcttggtgtggccttctacagaggtgcagattgctgcgttctggtgtttgatgtgactgcccccaacacattcaaaacccttgacagctggagagacgagtttctcatccaggccagcccccgggatcctgagaacttcccttttgttgtgttgggaaacaagattgacctggaaaacagacaagtggccacaaagagggcacaggcttggtgctacagcaaaaacaacattccttacttcgagaccagtgccaaggaggccatcaatgtggaacaggccttccagacaattgctcggaatgcccttaaacaggaaacggaagtggagctgtacaatgaattccctgaaccsatcaaactggacrwgaacgagcgggccaaggcctccgcagagagctgcagctgttgaagaggcagbgrgcmcrgrgcacaragtccttcacagaccaagaacacacacgtaggccttcaacacgcgtccctcctcctctaaacagaccagaasgtgagytytcacatccagctgccaaaagaaaswscmcmsmshcacwtacmcacatgcmcmcmcmcmcagacatacacmchcagcaagcaawcwccgcytgtgcctgtcagggctcctggggmmrctgtccmccktgagccctgtgtwtggcawatgscgragmccctgggtgcthtggggtscaktggsykysgraagcytmctctttttgyccactggaaaktgaragaactgttcmcagttcatcygkgtswaatwhtykkwtttttktttttwamggtcttgkggtcttttmcccyymcccyccttgaaggycctktgggaaggctggygcccargctccgttctgagcasgctgttttgtatgtatctgttaatgcttgttacttttaayyaatcagatctttttacaskakscatttattatgtaatgcttcttasaaaagaatcttatagtacatgttaatatatgcaaccaattaaaatktwtaaattagygtaarraawwmmwrrrwwrwrwrtttaagtcctctaacgcaggcgtgcaaggtggagggttgaaccctgtctggattacasagtgttakagactcaaatttggaagtccagctagcggcagtattctgtacagtagacacaagaattatgyacghcttttatcacaracttaagagccaaaaagcttttcatctstccagagggaaaactgaatgagacagttcccttctgtgtctaaattttccaaaaggttgattkgcayaakrcarkagtgwatacaatggataaattgctgytamttcaraaattaaaattatcattttctcccwwwmwrndwwwmwwmwrttcaacacttyccaatgcccttagatcaytgtymtactyaaagaggaaaggagamccccrccagwcctgtcccagtcagtgactcwacctttgtkbyasraggcgctcctttcrgrskwgkgstmcctgtagsttagcakatcccctcctttcccacccaccntagtgtggcccagcactaacccacagtctcttgggwtgagccctggcagttytgtcccctcctgaggtcstgccctgcatcatggcttgcttcccggrgcacttcccctccagaagtytacatthtasggtgtaggctgagttcttytgtmaagrrmtgrgcgtgatkccawtaaaayttaacaagadcaavcaamaaaaaaaaaaaaaaa

SEQ ID NO: 424 - DNA, 4951 bp, Rattus norvegicus
ccaaagttgagctttggaacaggccggcttcccctgtttttgtggatttgtaggatagccaatttccccccatctcgactttcaactgctttggacattagcttcataggaagaattcattctttagagtaaaatggagcgccgctttttgccaggggccccagcccctctgtttttaccctgtcagaagttagaatgtcactaaraagtgaggcccgggtgaacacttctacactgcagaagatcgccgcagatatgagcaacctgatagaaaatctcgacacccgggaacttcattttgagggagaggaggtggagtatgatgcatctccaggagaccccacggctcaggaagcktgcatcccattctcttctatttacaacactcaaggatttaaggagcccaacatccagatctacctctctggctgtcctgtaaaagcacaagtactggaagtggagcgcttcacgtcgacctcgaggatgccaagtgtcaacctgtacaccatcgagttaacacacggggaattcacatggcaagttaagaggaaattcaagcacttccaagagtttcatagagagctcctcaagtacaaagccttcatccggatccccattcccaccaaaagacatacgtttagaagacaaaatgtcaaagaagagcccagagaaatgcccagtctgccccgttcatcagaaaatgcaatccaggaggagcagttctttggcaggaggaagcaactggaagattacttgacaaaaatactaaaaatgcccatgtacagaaactatcatgccacgacagagttccttgatgtaagccaactgtcttttatccatgatttgggaccaaagggcctggaaggaatgatcatgaaaagatctgggggacacaggataccaggtgtgaattgctgtggccatggaagagcctgctaccggtggtcaaagaggtggttgatagtgaaagactctttcctgctgtatatgaaaccagacagcggggcgatcgccttcgtccttcttgtagacaaagaattcarratyaargtgggaaagaaggagacagaaacraaatatggacttcgaattgataatctttcaaggacactgattttaaaatgtaacagctacagacatgcccggtggtggggaggcgccatcgaggagttcatccagaagcacggcactgacttcctcaaagaccatcgcttcggctcctacgctgcggtccacgagaacattttagctaaatggtacgtgaacgccaaaggttactttgaagatatcgcaaacgcaatggaaggggcaacggaagagatttttatcacagattggtggttaagtccagaaatcttcctgaagcgcccagtggtggaaggcaaccgctggaggctggactgcatcctcaaacggaaagcacaacaaggtgtgcggattttcataatgctttacaaagaggtggagctagccctcgggatcaacagcgagtacaccaagcggactttgatgcggctgcaccccaacataaaggtgatgagacacccagaccatgtgtcctccagtgtgtatctgtgggctcatcacgagaagctcgtcattatcgaccaatcggtggcgtttgtgggtgggattgacctggcctatggamggtgggaygacaatgagcacagactcacagatgtgggcagtgtcaagcgggtcacctcaggacagtctctgggctctctcacggcagcatcagtagagtctatggaatccttaagcctcaaggacaaacatcaatctcataaaaacgagcccgtcttaaagagtgtcgacgataccgacatgaaactgaaaggcatagggaagtccaggaaattctccaaatttagcctctatcgccaacttcaccgccgtaatctgcacaactcggacagcatcagcagcgtcgacagcgcctccagttattttaaccactatagaagtcatcagaatttaatccatggrwtwaagccccacttgaaactctttcgcccttccagtgagtctgagcagggcctcactaggcacagtgctgacaccggctccatccgaagtgtgcagacaggagtgggagagctccatggggagactaggttttggcatgggaaggattactgcaactttgtcttcaaggactgggttcaactggacaaaccttttgctgatttcatygacaggtactccacmccccggatgccttggcatgacattggttctgtggttcacggaaaggcagctcgtgacgtggctcgacacttcatccagcgctggaacttcacaaagattatgaagscraaatatcgttccctttcttatcctttcctgctcccaaagtctcaagccacagcgcatgagctgaggtatcaggtgscaggtggccgtccassccaaagcgcagttgctccgatctgctgctgactggtctgctggtataaagcaccacgaggaatctatccatgctgcctacacccatgtcatagagaacassaagcrctacatctatattgaaaaccaatttttcataasstgcgctgatgataaagtcgtgttcaacaaggtgggcaactgctatcgcccagagaatcctgaaagccmmcagggaaggccagagatatcgagtgtacatcgtgataccactgctgccgggattcgaaggaracatttccacaggcgggggaaatgccctacaggcaataatgcacttcaactacagaaccatgtgcagaggggagagctccatccttgaacagttaaagccagagcttggtaacaagtggataaattacatatcattttgcggtctgagaacacatgcagagctggaaggaaaccttgtcactgagctcatctatgtccacagcaagttgttaattgctgatgataacacggttatcataggttctgccaacatcaatgaccggagcatgctgggraagcgagacagcgaaatggctgtcatagtgcaggacacagagacagtcccgtcagtgatggatggaaaagaatatcaagctggccgcttcgctttcaacggtycttcggctggagtgcttcaggcttgtcctgggttatctttctgacccaagtgaggacattcaggatcctgtaagtgacaaattcttcaaggagatttgggtttcaacggcagctcgaaatgctaccatatatgataaggtcttccggtgccttcccaatgacgaagtgcacaatttaatccagttgcgggactttataaacaagcctatattggcaaaagaggaccgccttcgtgccgaggaagaactgaggaagatccgtggcttcttggtgcagttccccttctacttcttatcagaagaaaacctgctgccttccgttggaaccaaggaagccattgtgcccatggaggtttggacttaagataaaccwwtygkakyysagggtcttccaacctgaagactacagtatatgctgacttctaaggacttcacagccatagccaggcctgatgtcctcctgtgaactggtgtaaggatgctggacataaacagggcttcatcactcctccgacttgtccttgagaaaagtggctacatcctgttgatagcatatgctcaaataataccaaacatggagacaaattccgtgatatatttcaaaacccattccctttgctaacaagaatctgtctgtaactttgatccgggttgccaaacgttgcctgagcactgctgttcttcgctgatgtccgtttacacgytggggcccaccttgtcatccatacagcactgtttacaagattgcttatcaatgaaagacattggagaagctgccttgagggtcctcaaggatccaggtgatgcctrtammmaammwrrwmmwratgtgagcttatttaccacgccaaaacttttctctctgttctttttcagtcactgtagggacagaacaggctttgcctacctacccacactaggcacttcttaacaacaggcaggcattaagtcctaatactgaagaagattccagttcccagagatgctgcccagctgtgtccttgtcatctgataacatttgtaaacatgtgcagcgcatgtcaatacatagcaaccagataagcacagatggagcctccaaggtgtcagtgggaacccagttcagataaaggacaatattcctgacagtctgtctttcttagccactggattgatagaaaaaaagttgattctctccactgtaagtccagtggatgttaatttgtctwccaactgaatcaaaggctttataatgcccttttcctaagaaacatgagtctaacctgatttacccytcarktttccabtaggccttcytcaggggaaaaagcawtgattatacaagatctctccttygcttgtactgtcaacwacatagtaacattccaacrtagcttccaaagaagcgataattcacattgttcmaatggratatccacattcccttymagatggtattgtgtcctttgtagaccaaatttcagagttccccttgtatcatgggagtgtctgtgggtgcctggaagcctggagcttatgcacgtgagataactatgtgactgtaascaaaaggggttcactggagtaaaatctcttcaaagcwgctcccgacccatgttttyatgaataaatatgctggtttaaaagatgacacaggaccacaaagccagtgatgtggattagtaacagagcagcagtcacatccaaaggaggatgtcacccctgaggaacactgtamaaatgaggtgggatttgtaatcaacaatggaaattaacatgtttttatgaataaataacttatttcttawawrrmmaarrawrawaaaattatttcattctatagttatggtgaataaaacactttatgcagataaarawmwrawwamawttaaaatagtcaatgtatatgg

SEQ ID NO: 425 - DNA, 648 bp, Rattus norvegicus
ttttttttttttttttttgcagtttgaattgkggtttatttaraagcattcaagagttagactgtaaataaacatattatgaataattaaaatcgccatttattawraawmccaactaagttaaatratactatttcacctatctttcccctttgagctggagtccarattccttcycycaaattcttaccaggagtaaaatctytagkgytgtgacctctgtacccmtcygkaccsmaagtscscwyttayrmmctaaatgagacctakaactctgaaaggaagcttcttcccacttactgtagkggdaaactgacctttctgtgggttagcccccaagcactacttcttgctcttggctggacacctcaraaggggattacacacattcgagacgtcaccarcatgtgtgtcccctccttcgcaccgtaaccttactgatgtgaatatttacacacacctgtcctccttwmcatcygctgtgacagaaaaaaagatgatgttaacgttccctttctccaamaggtgggtttccccctctttataggactagcaaaatatttcacactacccaggatttttccttaaaaaatgtatgcagagttactttgacagacgctgtccagtacgtgctgtgggttaaccagc

SEQ ID NO: 426 - DNA, 868 bp, Rattus norvegicus
ttttttttttwttttttgcaaraacatcctttaataactgttasctctttcwcagtgctcccttctcaagtgactttgtcttgagagtggcaacaagggctactcattgctagttatctaaaagtagattgggttggggagaccctgagaakactgkggaaaggcttccatccctcaaagtcasatggcaccaargcttctcaggacacgttcttaggctggattgaccacttggctcatcatcasgctgctccatgtgaacttgtcaaagagcasgaggatgaasggcttgttgaacttgatgtcaagtggttcararcgcargtgtasgggagmcccgttggtagaattaggcaacacattcccttcatccagttgtagcatggccttgtggaccatcgttaatgtcaagggaacatctttggtgttgcctgagaaatctgattggttggtgagcaagtccttaatgttcargtcttccagcaygtctttaaggtcataggtatcagayatggagaatttcgggatgtataggttcacctgccttggggtcataagcttgccccacctatcaattgtgtcccgactaagtgcagcgatgacagtgtccatctggccctggtcyggaagaatgaagaaggcagttccatttcccacatagtccatctgtatcagctggcaggggaagactgagtcacgaaagtaaccaatgctgcctgactggaccatcatgggcaccttcacggtgcttgtctcattcacatagaagtcctcctctctagtattttctgggctgaagggaagttcccatatgcctctgaggaagatgtagttgaccaggatgtttttgcaaaaaaaaaaaaaaaaa

SEQ ID NO: 427 - DNA, 640 bp, Rattus norvegicus
tttttttttttttttttycckggagaccaccatttatttttggttaatgccaaccaggaacactactcccgtagtacagtctgacacaggatcctcaggatgacaacaatggaaagcaagagcrtggcaggtttcctgtttcagacctgaggtttgggagcttggggtctggccatgaakagcccactgctcataatcctcccaacacryagagaaatcaagtctcaagtacttcccttcatctgctgcctctctcaagggagttttgggtttccctagamtagatgacaaagtaatgtgctgggtatgscggctcctccaggcacacaggccaaggctggwggagcatcttctactgtgcccarcytgggctaaatakgcagatwctatcwcaaagaaatawmagsyccamgtgctctaataatggacagatattcacaactcgaagcytcagtttccccttctgtraaatgaaggagctgggtaggtcaggatcagtattttggctaagggtatgtggctaagggataaattctataatcaacctcagcataggtggactggagaggtgaatctagtggggtagggctggtaagacatgagtagggagaatgggactttgagtgaacagaggtaagcc

SEQ ID NO: 428 - DNA, 460 bp, Rattus norvegicus
ttttttttttttttttkgatgttgaaggcaaactctttattaggaaaaagaaaaaagggatgcacctggtctgctaraaagggaggaccccatggttcgaacccatggagttctgagcaraggtaactggctgcaaagaaaaaacaggtacttggccttatcaccagcccccaccctcaccctgctgtcattcttcctcttcctcttcctccaraggtggtcgattccgcttgaagaagccagccttccacatggccaaaactagtagggtcagcagcagcagaccgcccagcacgcctaccagcacccaccagacagggatgtccctctcctccaaggcccgaagcagatgtgtctgcaccagaccttgcccgctgggcaagctgaccaccggcaccgagtacggtagggaggagacgttgaaccaggcgtgcgactgcagcacaaactgctcctgggg

SEQ ID NO: 429 - DNA, 842 bp, Rattus norvegicus
ttttttttttttttttttkttawycagattcctttattgagtacttgttaacaataaaaaaaggtatgaagtcctattccaaagtctaaactcacttttaacttaaaccttgagttttctgaattascaagtctkwwktwwttytytttwtacctgaaraatgtttttattgaaatgtttgrgagaaacatttktwytkywwwwagcatatsacaatcatctygaggatataaatcaaktgtaamaacaacaaaatttakcavgraacccacattgcacragaaatatgtaacaccacygtttgtaatttggtggcttggcttgcttgttgtataactgaacaccgcttttgatagcttagcctcccatggaaaggtaactgtgtgctttgggtttttccagcctyttcttgaccatgwtcactgagcaaagacttagctgtgtggatccagtcacaatgatggtctttggtggattcctaatataatcagaacttctctcattgagataaaatccctgcatsgtcctatatttccttcagttcctaccccacaggagactatcattttcctatstttctcattcagaaacaaattaactctgcgttcagatttgcttgacaattagcttctgtttgttgccatttcagattccgaagtcaatggggctcttawaatttcccttaaaaatcagattgttgatttaggattatataamctctgttgtctggcctttgaattttcactgagaacggccttctcttgatcgccttctagacctttgaacccttttgttgggttgtatcttctttgcaggtgtgtctttttgcaagaatcctcgtg

SEQ ID NO: 430 - DNA, 1754 bp, Rattus norvegicus
cggccgctccaacatcggaatggaacagcctgagtcctaaactttttagaggtcaagtgacctctgttctttggttaatgaagtacttttgccttcttgtctccagtttggtactacttgaacagaaaaaggtggcaaaatggaagtctgcttcctttgttcttttcaygtaggtgattcgttttgtcttgtaatcttaagattgttctttcccctcaactgtgcagcatccagcactagctgtatagtacctcacagtgtcccctgaaaactgtaaattgaaagtgagcataaagaatgtgtttagttaaacatagtggcacaaacytktwwtywtkkywtttggcagktksatgtasawsaggctascctgggctacatatctcattctcctggycccttcccctatggacacacacacattcacacacacatataywtkgtttctgtcgakgagtggtggcatacacctataatcccagcattcargaggcaaaggyaggaargttgctacawkttcarggctakcctgatctacatgaaatgctgcctcrdrarwrkamawrwwagaraaggaagaaaagaaagaaaaaagraaskargaaaaaaaataacttcttttcaaataaataaaymaakaawymrrcamrmrrataactttgaagccaatakagtakagaggaaaaaaagcaggaatgagttggggtcaaaytgtctctcagagcaaaccytaggaaggcagcattttggagagtgggcccttgcagttggagccttgtcactgtggctctatccttgcagagaagcagtgagaaaaacactgagtctgccgtgcctgtttccatcacctctksccactgggcctcagtccatgcagaccagtggcaaagccccacatacaatgtggagataagcagtcattttttywkkwkwytttkwwwwtagagctgtataatacatatttttwywwkywwkwwdhwddwdwmaaratttttttckgttttacatatcaragttcawaattttacaatacaaaggagttaascatcaaaagaaaaataaatgcaaatttcccccctaaaaaaaaaaaaaaaraacaccagttactagggtaaataacaactaggttgaggtttttttgccctgsaaagagatgggaaaaagccagtttttcccaacgkgggtaraatttgtaaagcaraatgtggcgttttcahggwagtgatcctggaagcttatttacactgkarttctgarctggaagcaracagtcyccatcttcccarcagyctgyksgtgysgggtatyccttgtcagccagarcagcaccagtgcaagggcawtkwwdwkkwyyywkytkwwwwwytgcacgcaggattcttattttaytggtttawggcttgtgggcggctggctggggccagcaactccaraggccctgctagtgtctccccaccagctattccatgcttggmaggtcccctacctgaaagcagtgtaragcatactaggataggatgcagtgstcrtsccaggaaaactcggctcttcctgctaacactggcttcatgtctgttgtattagaactgacagggaagaggagtgtggcccccactacctggcccaagaaccagcctgggtacatgtactattgggaggggcagcagagagcaggacagaaagactgctctattgggaaaggagaaggaagtaaggaagccccaaggctgccatcctttctccaggcagccttg

SEQ ID NO: 431 - DNA, 884 bp, Rattus norvegicus
tttttgtttttwywwwtccacagaaaggacttttaataaaagcagctgacaraagaactatcaagaacatggtaaaacagacgtatctgttcaggctactctgtkkywkkwktytkwywtaaaaccataggaaaatgcctttatkgwyacatycttgarctttgtaawarwaasaaasarasawrcasgaaaackacttatagtctaattgyttcaattcttactaawmtaaacawwwgaaccgaawtkwkwtwtwwkywttttaaaaagtcaaagttcattttaataaagccatgaacttgaaaacttactttaagctacaaagctgggtaaggaatagtttgttcttcaaaagcatctcatctgttctcarttaacgacttaactaaaccctaaatctaggccctcagaaagcacagcggmactgcaaactgctccagtctgtcagaccgcagtgccctgcttccatggcarctgaggagaggtgcttggaaagaagcagggctgaagggaaccaagaacagttactgcacagataggtaaggccacagtgagctccgccctgcaccactgacacakcctggaggtgtgaggtggggaggcagcgggctgcagctgatctcaagagaaatggctgtccagcgcagccccagcttggggtgagtaagaaggctgtcaccaccacattttacaggtggccttccccttgacaaacaaggaggaggcagtttaaaggtgttcggagtggcatttacagtgacacagtctagtgatgccaccatccttgagtaagaactacctctagattgtggtaagcgtttactgtcccttaaacagcggccattagaagttagtctgcgtttgtaaggtaatagtgcgtcgtg

SEQ ID NO: 432 - DNA, 490 bp, Rattus norvegicus
  misc_feature (469)..(469): n is a, c, g, or t
aattcggcacgasdmytckgccsmsrdggckcctgtgaaaaagcttgksrcgarggggggsaaaaaaadgargcaggttttgaagttcaccsttgamtgcactcascctgtagawkatggaatcatggatgctsccaattttgmgcagwtcctmcaggaragrwtcaaggtgaacgggaaagctggtaaccttggcggagggkttgtgaccatygagcggagcaagagcaagatcactgtcacttycgaggwgcctttykccaaaaggtatttgaaatatctcaccaaaaaatatttgaagargaacaacctccgagactggctgcgcgtmgttgccaacagcaaggagagctacgagctgcgctacttccagatcaaccaggacgaggaggaggaggaggaygaggattaakacmcattggtctgccatgttttgwattaattcatrawtmaaatttrggvvcamranmmdwrvwwwawmhwsacatgc

SEQ ID NO: 433 - DNA, 468 bp, Rattus norvegicus
tttttttttttttttttccacagagtgaagtttattcccaacaaagtttccctcccccctccccagcccaggacaggracagacaggctggggcaaagatgaggctctggtgagtggctaagggacctctgagaaccaggaggggccctggcccccaggccctgccagtctggctgcccccagccaggctgagtcctctgcacctcctgcccagcctcgggagggggagrggcgctggctcctggtagttccaaagtggagtgtgaaaatagatatatatttctgtgcagtgggcagtccggcgtggcactcacacctctgtctggaagtcgccgtctggcggttctgtgggctcccaggctgctgtccggtgcaaagccagccgttctcgaggtttggggggcagtgagcccagtgtcatagatttgaaagtgctccwgckttgmygcctcctgtgctgggacaagc

SEQ ID NO: 434 - DNA, 3939 bp, Rattus norvegicus
gggctgtagaggcctctgcacctcctcctctggcctgaggggggcatacccgcgtctacagacgcggggcgcaacctgccgaaaggggtcacaccgctgggcgagagctaggggaggagtcaccttgagaggaggggtcacaatgattagccgagtcactctgaaaggtctcttttagtgaaaggaacacaaagaggagggggtgcagcactaaggggctctggatacacactgatgtgccagtgtcatcccaaggaaaggtccccctgaaggagagcgggctccgaggggcagcggcctttgagggggcgggatcctgtcgaggggtgggctgtgacggagggcggggctttcttgcaggtgcaggcttcccctaagagggttattaggacaaagaagtaggagggtggtcaccgggcggagcgcaggaatctcaactttactcaggggaatggagatggagtgaggaggggtcgggccaggtcagggatgcggaggccagaggctccctacagccctgggtaccacgaccggagaaaacaggtgttagcgagccccgagatttagggtgtcggggtcagaagccccttgaaatgggcagtcggagtggggcgcagactgggcaggcagcgggcttgatccgtggagcccagggcgcaggagaattcgcgcctgcagtcaacccttaagtcgtcctgttattcacgccccggcctacgcgccgggacgcacctgagggggcgtggccgggccacagctcgggctccaaggagttaaccgcagacccggccggccacgccccgggcaggccgcgcagcctgagcccggcggcgaagcggagcagcagccgcccgcggggagcccgccgccggcgcccgggagcgccgccgccgcccggcccaggcccaggcccaggccccgcgcagagcggagagccgcggcgttccaccaggcccaactcgccggcgcggcgggggcgggcccaggaccttcggcaggtcctcccggagtccgccgggcgggagtcccggcacccgggatcaggttgggccggcgcccatggcgagcgcggcctgcccgggtcccggggatccggccatgtgaagcaggccggggctgggggcccggccatggccggggaacggccaccgctgcggggccccgggcccggagagactccggtggaggggccggggggcgcaggcggaggcccgggccggggccggccctcctcctaccgggccctccgcagcgccgtgtccagcctggcgcgcgtggacgatttcgactgcgcagagaagatcggggctggtttcttctctgaggtctataaggttcggcaccgacagtcgggacaagtcatggtgctgaagatgaacaagctccccagtaaccggagcaacactctaagggaggtgcagctgatgaaccggctccggcatcctaacatcctcaggttcatgggggtctgtgtgcaccaagggcagctgcacgcgcttacagagtatatgaatgggggtaccctggaacagctgctgagctccccagaacccctctcctggccagtcaggctccacctagcactggacattgcacaaggcctacggtacctacacgccaaaggtgtgtttcaccgagacctcacatccaagaactgtctggtccgacgggaagacggaggcttcacagctgttgtgggtgacttcggactggctgaaaagatccctgtgtatagggaaggggcaaggaaggagccattggctgtggtgggctccccatactggatggccccagaggtgttgcggggagagctgtatgatgagaaggccgacgtcttcgcctttgggattgtcctctgtgagctcatcgcccgagtacctgcagaccctgactacctaccccgtactgaggactttggtctggatgtgcctgcttttcgaactctggtgggaaatgactgtccgctacctttcctgcttctggccatccactgctgcagcatggaacccagcgcccgtgccccttttactgaaattacccagcacctggaacaaatcctggagcagctgcctgagcccacgcccctcgccaagatgccccttgccaaggctcccttgacatacaatcaggggtctgttccaagaggaggtccctctgccacgcttcccaggtcagacccccggctctcccgaagccggtcagacctcttcctgccaccttcaccagaatcaccccccagttggggggacaatctaacacgagtcaaccccttctcactgcgggaagacctcaggggtggcaagatcaaacttctggacacaccctgcaagccggccactccactgcccctggtgccaccatcaccactgacctctacccagctgcccttggtggcctctccagagtccctggtccagcctgagactcccgtccgccgctgtcgttcactcccttcatcccctgagctcccccgacggatggaaactgcactgccaggtcctggcccgtcccccgtgggcccctcgactgaggaaaggatggactgtgagggcagcagccctgagccagagcccccagggccggctccccagctgcctctggctgtggccactgacaacttcatcagyacgwgktcctcagcctctcagccctggtctgctagaccaggaccttccctcaataataacccccctgctgtggtggtgaattccccacaaggatgggygagggagccctggaaccgggcacagcatagccttccccgggcagcagccctggagcggacagaaccctcaccacccccatcagctccccgggagcaggaggaggggctkccctgccctggctgctgcctcagccccttcagctttggcttcctatccatgtgcccccgccctaccccagctgttgcccgctaccgcaacttgaactgtgaggcgggcagtcttctctgccaccgagggcatcatgccaagccacccacacccagcctgcagctgcctggggcacgctcttagcastgaggcctgtgatctcaggcttccaaccttggccttcgggataccctgtaaggacagagtgcacttgctggacaatgccagccccagatgggctgactggctcytctccccgtataggggagcctcagcatggtctcaatggacagagcacttcctgtccaacccctgggatcactggactagacacagcattgctgacaywywwkwytawywykykyhwawwatttaaaaatatttcaataaaactgcctggctggctccgggccatscatccactcarmrrarmrmmmwmmmmwgacccatctmtagttcgggaagttcttaaggaaggtcaaagtcttttctggaggcttctttactcttcccaagaatagtttstggagcagctttcaagcaagcagcaggtcgccagaccagaatcagccmttagctgggcgtgcccaagagtgagggagtgctggaggaatagcastcttgagaattgrcaggccatasgytaaggatgtavgtcacaaggkcttgttsaagtgtcyggawwaatmaagywccagtgagmtccmmwmadraaammwrarmrcctccagctcacaaatgcaggggaaaaggtctgtacacgtgtatgagctttcataccaccatgaatggtaacattttatcaggtaacatgagcwtwragaatgagaatcggacctyctccccytyrtgyycttcatgttttgtggataatatacagtatggctcatctgctcaatccaatatgactttgaacgatctagcaacttctctaagccatcaggcagagaatcttgtagggaatacctaggaggttcgttgagcacagccaggcagttttattgaaatatttttaaataatttgcacgtgctaaaaaaaaaaaaaaaaaaacctttgcgcctcgtg

SEQ ID NO: 435 - DNA, 1152 bp, Rattus norvegicus
cggccgcgtcgtcgggtgccctgggcgccctcggttctctggtcaagtccgagccgagcggcagtccgccggctccggctcactcgcgggcgccgtgccccggggacctgcgcgagatgatcagcatgtacctgccggccggcgagggtggcgacccggcggcggctgcggctgccgcggcccaaagccggctgcactcgctgccacagcactaccagggcgcgggcgcgggcgtcaacggcacggtgcccctgacgcacatctagcgccgcggggacgccggggacactgcggctcaaggccggcgccccggcgacgaagagcgtgaggcctgttccccagcctccagagccccagtykgyacagrtgtctccgcgctctagtgaaaaagaccgctctggagagccgagcgccaggtgacatctgcccccctcacctttcccgggactctgaggcgctgacaccagactggcctcttagactgaacttccgtgttttcacgagaccttttgtacagtatttatcgtccgcagaggaggcacacagcgttttctcggctcgggaggacaaaagacaaaaacccagcgaggcgatgccaacttttgtatgaccgccggctctgtaacwykwkscggggtttgcttcccgccggctcttctgcctsaggmtgaggracggacctcsagcccttctcacytgttatwaatctagtaaggcarawmmwmmmamhwamragttttttgtagctattacggctcytttgggttggttggttaatttataccgcaatgccctctcagacggtggggttatawtctgggttttgtaaaactctgtatccgagcatttgcaayttttttgttttkttttgtawtatttcttgtaaaggagttgtgacatttttattttaggcgttgcsmtrtgggacgggagaggagtcggatgtacatagcctacaagtctttcatctaaaaacgaaaaacaaagagagatcccccccccaaaatgcatcaaatttgaatcaatacattgaagagagaatagccggtttccctacgaaatcgaaacgtgctaattttatatgcatgtttgtttttttttttagttcaaaatacaattagaaatctgttggaggagaaattatcaggatgg

SEQ ID NO: 436 - DNA, 803 bp, Rattus norvegicus
tcttcacgcacacacctgggaggcagcgcccctgtgaggacagccaaagctgagcgacgtcatcaggagcggctgcgtatgcagagccctgagctgcccgccccagagcgggccctgtctcctgcagagcgaagggctctagaggccgagaagcgagcactgtggagagcagccagaatgaagtctctggagcaggatgccctccgtgcacagatggtcctcagcaagtcccaggaaggccgtggcaagagaggacccttggagcggctggctgaggccccttcacctgcacccacaccatcacctacaccattagaagactttggcctccagaccagtacctcccctggacgcttgtcaccagatttcgtggaggagctgaggactttggacccatctcccagtcctggcccacaggaagaagatggagaggtggctctggtgctccttggcaggccctcacctggcactgtgggccctgaagacatgacgctatgcagtagtcgtcgggccatgcggccaggacgccggggcctgggccctgtgccctcctagggccaggtgcttccccagacttagggtggggagcctgccagcttcatcacctcccctaccccaggtcttttagccttggtgttagcattttaaagagacccctcaggagttatggcttctgattaactgcccccatagccgggatctcgtggcgagactgtaactagtgatgtttgtacatctcaaagactctattttgtgggttcagaagaataaagttaactacgttttaaaaaaaaaaaaaaaaa

SEQ ID NO: 437 - DNA, 1032 bp, Rattus norvegicus
cggycgcascagtggcakcggyaggcggacctccagtcctcactgctcagacmaaccccttcctcakcctgcccggggcggatgccagtgggaatggctccaaaggagggacygctgacaaaggarcctcarssagcyrgsaaamaggctaactcgaccctgcccctcctgacccctacatggctcgagggtccwtgcctggagtgggcagctgggtccagactctggagagccgggcccagagcctgtgtggatcyccagggagttgtgcctgsagttccaggtgctgaggagagagacgaccggagaggagcccttccaccaggcccaccccctcactgcactggctgctcakagaggatcaggggaggacaggttcctagcctgcctadgagagcctccatcctccacagatgcctadgggcccccaaagagcaaagtargtctggtataagacgtgkagggatggttgracctaccacataaacgaatcagcacttgaatggggaaagtgaarggtgggcccctgggcccatccctgtgtgrraattccttatggaaaaagggctggtcccacctgacctccagtttcttcccasyasaarggatgtatcmctttgactgtttcttatcatccctccsagytgasggtctcaagctgagcttggaaaagcctacakatgtggtggggctgaggaagggcaggagagcacctcttggggccccatgatggggccaggcggggaagtcctttgctgtcctgcccctttttgcaytattggcttaaggagtgccgagggtggggagagggagctgcctgactccacagatcgtgagtgtgtgtgagtgtgtgagtgtgtgagagagatggtcagtctgtttaacctgtctgtcaattcttcctctggacctggggcagccaagggcaagagtgggagcaacggccagtaytggagcaggagctcctagytyttgtaccctctaccccctcactaactctggcctyktscagggcatgagtggttaacttat

SEQ ID NO: 438 - DNA, 455 bp, Rattus norvegicus
tttttttttttttttttgggagttgatccacatcctttaatttttaaaaacgagcagacagacaatcttgtgctctttgggttgccaataaaaagtttgttaagcaaaacagcccaacccttttcatttttaataatactgtaaatatctcagaaaggatatattgcatcatttctaatgaatatcaaaaaagttgtcataatgacatgtccccttgctcccacttaccctcccctcctccctacagttacccaaaaactagtatgaaattacaaaaaaaaaagaaaaagaaaagaaacaamaaaaaaaaaccaacccccaaaccacaagcctccctctacccagccccatgagtagtgttaagagtgtcaagtgttaagggccacatgtwcaacacgtgtgtctatggtgacagacatcagggatctgtctgtccatctgtccacctcgtgccg

SEQ ID NO: 439 - DNA, 783 bp, Rattus norvegicus
agttggaagctaaaaaaatcatcacgttggcaataaattctacacacaaaacctgaagccaaagacatccactgtagatgaatggtgcaaattgatgctgctgtgttggcaaattatatactcaggttaaaaaaaatatacatttctacacataaatatacaatatggtgtagaaagaatacacaaaaggtgctgtagaactkktwwwwwwywwtytkttawttttaaatatttttattgatacgctcaatattaaaatacaagtgttaataaatacattggtacaggataagtttatacccaacaacagtaaaagaatgattcaagttgcagtaacacactggtcagtaagtattataacattaraaaaaaaaaraaacacgcttcctttactcaaagacagactgaaccatcaggtatgggtctgagatcaggtaacacagggaacaagagagcttttcccacacaggaaaatgaaggcagttttccaaatactgtgaatmywcrwrcmkgggggaagcaatacattcggtgtactgtatacttctctgggagtcagtccacacattttctaagtgttcagtgttatctagtgaaggcattgcgtataaattctaagatcgggtgrskcgcttatgtatgtgtctgttggttttctgccaaccccctatttcaccactcyttggctagtcaacagaaaactcagctcgaggggcctaattctctgctccaacattaatccctgttttctgggttcagaaccagcaggaacaaagcaccgtt

SEQ ID NO: 440 - DNA, 669 bp, Rattus norvegicus
  misc_feature (666)..(666): n is a, c, g, or t
ccttgctgcaggggtgggaagggttgctgacaggaggttaawkywktttttttttttttwaaatgtcttctgcatgtttaaatgatgcaaaaaaawaatttcactccataagcttgaaaacatctcacagacaattcattcctatatctttagacaccatggttgtggmagtgcctccctctgcgaggtacacagcagtgctagatttagaatggactgccctgtcactgccattgttgttgacctcacagtccagtggstcggtggagatgacccaggtggatgggcgccaccgcttaagagagtatggagttttcacacgtctcttgatcttttcgcctgatcctgatttgccatcctgcgttgactcacctatctgcatgctgctgccatccargatatttgtggctgaaagatccagagaattgggcctctgtgctcttctgggmtttgctggcccadggtctgcagctgtgcttgtaacaccttgtgtagggacatcttgttctgaacatggattgctgttgttgttattggaattakttcggccaccttctaatggccgttccctcctgtctaccaaacgawccagaaccccttcatcatggccagcctgctgctctcgtctcagtaaaggttcatgttcatcaggactggaattgatantca

SEQ ID NO: 441 - DNA, 874 bp, Rattus norvegicus
tttttttttttttttttkkwwaaaadgcvcatgcgcgttttattaataaaaactaacagkgsttasttaaacaggtcaaacawttaaagtchytttataytccawadrataytacagaaaagtttatttgkgtttcaataaaaagaccaycatttaraacaggcagctwagggcarctgtgcakttaacggttcttgkgaataaattttaagagactattgcctgtccttaaattcmtttwycyttttataaaaaaagaactatkwwwdwtkwttkwhwwdywwtgakttwwwaaactgttaaaacattskckatgtttaakktcaattttatartagattacaggaagatgcttatgaamcaaatacaacatttgtttcagtacacgtytttaaatgawagacttrkaagtatgtaaactatrtartmaaaagttwccaaacgtarcctgtmagaaatcarksaaatttaccrtaagcaaactttstagacaatttccatagctgcgccagcgtggcagtaaacttstkccaaacaaawcaaaacaaacaracaagaaacactacttctcgctwtgctgctgcttgagaaaaggwtgattgatggaactggacagtcagtmtaatttaaggaaaaacagtcatgagacgtatggcgcgcagcgttaacagtggagctttgctatcgccttgttctctggactmtgcatgatttgacaaatgggaaaatccatcctaacgcctggctgtccaccacytgggckccgcacacccgaggcgggcagcgcyytmsyrctgtcaccggtgggggcgcagcacagcctcctcagcaaaccagcaacaactgttgaggggcaaaacaagcttcaaactta

SEQ ID NO: 442 - DNA, 843 bp, Rattus norvegicus
ttttttttyttttttttbwmahcytccaacastttawtaraaaraatgtaracatttawaaaaatccccactgkcatgmasrkaamwtgaggttktsyagyswgkgyrtvrgskgrrwtyrraacaggaartaarmaatccaatwskgtwttaacattttccacycatttgccatactgacarkgcaagtacaaawctggyctaaaatgtacatwktckcavgcaacaatgkacagctytytttgycctccmtgctmadaratgtaaaarcttaaggsccaamcartaccaaakgtwtasgcttyaaaaascatcyaarttagggcatycacyabycttakctaaaatacacctkaacactgacamgtsatcacawacaawgatgtraartwcatttttttgaaaaatmmwckttagysgaatwmytstgaaargtatyctgdaaraawggsvgdgymtcagcttaagatattwrccaatttgkytccacctycttcaaryccatkrtmtaggatctaaaacctttatctttcccyaagctgagaactttcttaatggagaagttaagtgtwttatgmcraargaagacttakatgagatgcagttattcatcagagctgctgtagcagtwgcctargayctcaactgcttcatgraatyctrggaaatgttcatgcatayggatattgscttascwgasttawwttkycccwyamaatsstasrtrrtsammcctyagtgaagccttaaaaaaaaaaagttgaaaaatgggttaaaggagccaagtacagcatatctgcctttagagctatcaactcagggattttctcaattatgaaatct

SEQ ID NO: 443 - DNA, 638 bp, Rattus norvegicus
tttttttttttttttttwwwtgcaatatacaaactttatttaacaaaacaggtaaagtaaaacaggcatttatattaagaaaaaaactacaagaaaatttatctttaacaacttaaaataaccctacttgcagttgcatttaaccgagctytgttgctgtgaagaatacagctcatgcacaggtatggrtgaaagatkkgtacatttttcaagtattcactgaatactaccttatatacacatatacattaaatttgaaaaagattattagatgatcccagctgtacttcatttttgttgttcttttggaagaggccgyctaaagagaaraatatgcggttctggctcatggatcatgkaatgaacccatcctagactctgttgaacaccaagtctsctccactcctcttcggacatcaratgagttttgggtactygtttaraaagttctctgggtaacatgacatgccggtactcgtartgctcgtcgaagtacttgtctgagtagtagatctgcttgtgggccatcctgctggcgtgcgaaggaaaaaaccgggacaaggaaacgsskcryrmsgarytcywsgtcckcstarggccrrggcmwcrtsagaatggtacctcgtgccgaattcctg

SEQ ID NO: 444 - DNA, 767 bp, Rattus norvegicus
  misc_feature (677)..(677): n is a, c, g, or t
aaggtcctgaggagcctgccctgcccagcctggaaggtgtcagcgaaaaacagtacaccatctacatagctcctgggggcggagcattcacgacgctgaatggctccctgaccttggagcttgtgaacgagaagttctggaaggtctccaggccgttagagctatgctatgccccgacgaaggacccaaaatgacgtcacagggacagccagaagatggggaccatggggtgtctctgtgtcccagctcagcctgmcagcttcatctcccaaagccccccagccagacagcaagaggacagacaagggcagayggcttttatacaaagtatctatattgaaytagtmtatattgtacagcacgggacccgsgcccamtamtgccttttytatgggcccccastgcccaccgagccggtgacccggcggtbgaacaaggccccctccccgccytcytcccaacaacaawtttgcttatttcttctttgaaamwwrmarawmwmwrwgtgtgtctctcagggggagggggctggcaagatggctcagcggttaagagtgctggcctctcctgcagaggcccggagtttgatctctagctcaccaccatctgtagctccagtgcccggggcattggatgcccctctctgacctctgccgtgaccaggaacacgtgccggncactgactggtgcaggcgaaacaaccaaacacgtagaattaaaaatagtagggctgggatttagctaagtggtaaacgcttactaggaag

SEQ ID NO: 445 - DNA, 601 bp, Rattus norvegicus
acttaaggaaggggtccgacatgggtgagggattacagcttcagcgatggaacagccagcccagaatggattttttttttttttttattgtaaatttgagacttatgtaagcgtgatttcaaaccgtaattcatgttgtaaagtctcagcagaggcggtgaagaaggaggcagagctggacaagtacctggagaacagagtagaagaaatcataaagaagcagggggaaggcgtccctgacttagtccatgtgatgcgcacgttagccagtgagaacatccccagcctcccaccagggggtgaactggcaagcaagcggaatgtaattgaagccgtttacaatagactgaasmstkwcamarmygacsacwctgattctgcatctaycagttttgggctaacatgccttgattctctgcacctctttatgagttcttacatttaattactaattggcaagcagcagcttcccactcagtgggagactgccacatttcgttcctatcatgattggctgggcctgctgctgtccctagtaagatattccgaattccattttatcaataaagcttggtttaacaaacaagaaaaaaaaaaaaaa

SEQ ID NO: 446 - DNA, 799 bp, Rattus norvegicus
ttttttttttttttttttkkkkycagcttctcatttttaatatttggttaaacaaaatacatctttgtaaacaaacccagcacaaggccaacaaagaaagggaataaagcaagaaaaacaaagcctagggttgcccttgctgggcatcagggtcaggatgccccttaataggaatggggctttttgcccttggscatcrwsmygggtccctgttcctaagcaccagaattggatatgaacagaaccagccctgaaatgcttaggcatctttrtacatcccaccagctcatgggctccacgtgcgtgggactgtttgcagtgccwtttgcaaaggcccaagcagatctgtagggaggagtctcctcttcccaagaaatggcttactctcaccgacagtgccaatggaccaargtcctgcttgtgacaatcarcaaggtcggctgtaacttctggctggtagtgattggaatgtcattgtgcaggssymgwgytmgykccscgtggtgccaagcagatctggtgtagaaaatggtgcagatgaccatggctgagcgcaatgcagtagccacttgaggcctctgctacttgaataaaaaacggccttgttggattgaagatacatgtgcagaaaaagtgctggkgtaaacatgcactccagtcacartggggagacagcccctgcttcaccccaacaagcttgctcaggattaacatgcaagccccaggtagctctgctgccagggagaagcaggccagtggggcagctctcagacctacagagaccatggattgataaggg

SEQ ID NO: 447 - DNA, 570 bp, Rattus norvegicus
aaagggaataagcttgcggccgcgagatttttttttttttttttttttttbwkkktwagcawcagtctttaatgctgtcacactgcataatgacaagtcacacactttggtcttgtgtyggtagtggcaacttacaatgagtcgaatggtcasagcaccaggctagctcsaaagaacagatccattccctycccakgtstgactcatcacagccctggacaggcagtakttgacagggactgctttcatscaagtgvasamsabcwtkkcawkgaaktatrmmracwtatkkacatacgttccacggkgctcctttcatcakaagcaaaggcccttttatcaaaagggattatatctagggctgtgcaaaattcaaaaggactgtatccttttgagaaagttgagtccattacacacacacatayacacacasawmaaagtcacctgcacctctgakaagtgccargtgtggycaasggctacctctggaccagcamgtactgwgactktaargmwrccatctgawttcaagagagccasaggtccaggggawctcctggcttgtccagg

SEQ ID NO: 448 - DNA, 641 bp, Rattus norvegicus
gcggccgctccwtgttwtgccctctgggcctgccaccagtaccagttcctcgggtcacaggcttggccttggccttccttttcttgctccagtaataaacgaccatcagcaagcccagagtgatgcagatgtcaacaatgatgattatggatactgctgtcaggtccacctccatgcagttctcgcacactctggctttcaggtacaggtacgtgtttttccttgagctttctgtgtagcagacatagtaaccactgtccttgacttccgagaaatcctctagcaccaggtgtttctcattcttatcaggcaggactttgtcatttttctcccactttaagttgtcctcattctctagagggcacgtcagctctacactggktcctgagatggagacttcatactgtttctgtgctccatcatctgtaacagtgtcctcgatatcttcctggcaagtgccaactgctaggaggctgaggcccaggatgctccagaaagcgttccmctgcrtsctcttagaatkctctctcaactaagatggcggacacggctggcycattacttcwkwwmwgraracagatgacaytttcaasawrcwgrcwgsrwkksargwstctgraccmccstcktgccataataag

SEQ ID NO: 449 - DNA, 647 bp, Rattus norvegicus
cccactgggttgcgggtggccggggtaggcggcggagaccgactccgagcctgagccggagcccagggtcgcgccgggagacctgccccccctcgtggtgcaacgggatgcagtggaggcgtggggcaccgaggagacccctgtcctagcgcctgcgcgctctctgctgcagctcaggttggctgagagccagacgcgcctggaccacgacgtagcggctgcggtgagcggcgtgtaccgccgtgcgggtcgcgatgtggccgccctggccgggaggctggcagctgcccatgccatcgggctggcggccgcttccattttttttttttttttttttwwkttwtttttttttttttygacttgaaaacagtttatttaatttatacaaataactactaaatacaaaaagtagattaaaacaaaatarttattttttttttctggcagagtttaaatgcmygtaatggatagttccgaakaagatgsatttcccccccacagcgtttgggactaaaattctactgaaatctttgcttctaaatcagtwatatattgggtggtgttgcmyksgtrmyggctaaatacgttctgtatactaactgaaaagaaagttacagtctacacacataaaaaaaaagcctcgtgcc

SEQ ID NO: 450 - DNA, 502 bp, Rattus norvegicus
tttttttttttttttttagtakakaaattaaccactttawtgaatatcaataaactgtwcatatcaactatacaaaatgctgcttacaatataaatacctttaaaatgtwaacatctttcwccccsgggamacctgttkggccccaaaatarttctgggagacacgttggccargctgaagcaccccacttggsccctaacaagtgacggccattattcatggtcccttctgagacagttaaactgctgtgagacaggtgtccccargacaaatggggcgggggctgaaacarctgctcargcccargggcacctggacatgtgtccagtaaccaccctgccgaggcatggacgcakgagggatgggactattgcatagtctgttgtacctcgaggaaggtggcctgaaagggtccttgggggabgtasggaagtgsggtcccctgagtggggttcaagcttcccmkcswgysggttggctttagttctatggctcgaagca

SEQ ID NO: 451 - DNA, 706 bp, Rattus norvegicus
gkywykwkkttttttttttwwyttttaaagaaaatactttattacatcatgaaaaaggtatccaacaactarattcatacttgcttgaatctataaaaamaaacaaacaaacaaaaaactgaaagtttattcattakactgtatgtggggtcatgttccacatgggaacagagaggcacaagggcttctaagtattgcacagtcttgaaaaaaaaaaaaaggagttgggaggagaagatcacatgatactgggaacgtctcacattatgagaaactaccargaaacattckawaagaaaaccctctgtttctacagtagctttagtctgcagttcttggaatgactattccwytgaagacatcttagtaacaggaagcttcgtttgagcaatcccatgtgcaaatattaataggaaaatatataaaataawrmatctyttgcsrycrcccccggcaattcargaccgtattttggagaactgttttgtttgacactcggttaagctgtgagtttggcctgaagctccatctctgctgcctgcttgagcgcaacgtccaccaggagctgaaatccactaaaatcctggttgaggtctggcggagtcgggggaggagtgttgaaaagaccactctgaggatttggactgggtccagatttgcaagtgtcctctgggtacctgagagaggcgtctgtaaagttgctggg

SEQ ID NO: 452 - DNA, 535 bp, Rattus norvegicus
cggccgcaaaggttttttttgttttgttttattttgtttgttttttttcttacttcaaggcaagtagcccattggtttgagaagtccgtctgggtctgtgttttagcgaagaaaggtaggtgcacggatccaggtttctggagggagtagggatgacaagtgagaacattctactgagcctcagtgatgcatgcttatctgggaaaccctcattcacaagtatwccagacwccaccatgcttcacgcatgsccatgagcaagactggcaaataacagcttttgccktgcagccctaaccctagtgcktgtagtttccaacatggtcccagcagatgttgatgaataacaccatggcttcatcagaggatgtggggctgtaggtcctctgggtgtgaagctgttstagtaaatccgtttttaaaaaraaaramwwrwwtttacttttttctaaatgtctctgactactgactgttctatagattatttttccttttttgaaatacatatataaatatagatatatatatatatatt

SEQ ID NO: 453 - DNA, 935 bp, Rattus norvegicus
ggccccgtcagcagccggccgcggctgttctgaggaactgcggccgcgctcccgtgagcgggtctggggtccagcgggcagcccgaaggtgcggcgccatgaagctgtacagcctyagygtcytytacaaaggcgarmmraaagcggtkctkctcaargccgcgtacgaygtgtcttccttyagtttcttccagaggtccagtgttcaggaattcatgacctttacaagtcaactgattgtggaacgatcggcgaaaggcagcagagcttctgttaaagaacaagagtacctttgccatgtctacgtccggagtgacagtctgrcaggtgtggtcattgctgacagcgamtacccttccaragtggcctttaccttgctggagaaggtactagatsaattctccaagcaggtcgatasaatagactggccagtaggatcccytgctacaatccattacacagccctagatggccaccttagtagataccagaacccccsggaggctgatcccatgagtaaagtgcaggccgaactggatgagaccaaaatcattctgcacaacaccatggagtcyttgttagagcgaggsgagaagcttgatgmctyggyatccaaatcagaagtcctgggaacacagtcgaaagccttctataaaactgcccggaaacaaaactcatgctgtgcaatcatgtgacatagcccacagaggcaggcgctggatcgtcacgycwcktsaacccctggagacaagcaacatcctagaagaggatctggagccaggcagactgtctacttttatttgacgttcccaagaggaatggaggaacgatttaggggggacatcgacgttcatgtgtgtggttgtgactatgggaaaaaatttgagctcaaagatgtaatgttgggaaaatgaaaccataaacttttaagtggc

SEQ ID NO: 454 - DNA, 517 bp, Rattus norvegicus
tttttttttttttttttcatagaaatacaaacattactgtattagggaccaagtcaaacaacaaaaggagcaaaagtccaatattgtttgagttctatacatattttttcaacgaaatacatcatctcttaaaaagaaacaaaagatcacacacgtcaattattgattggtttcttaatggtgaattaaggcttatttggtcaccttatttgattagaggctatcacataacttatttttttttctacatctgtttccctttattgattttgcaaaatctcgacaattgcacgtttcaaaagttcaggttgatttagaataaatatacatgtgtggttttaccaaagacagatccacaaagttccataaaccctttgaggggagtaggtttcctcactgtgttaaaacagtgtgcgggcaaacgcacaagtcccgttcaatctttagagttgcttttgtttttaaatcctaaagttaggccagatttcctggaaaaggggcctcgtgccgaattctt

SEQ ID NO: 455 - DNA, 711 bp, Rattus norvegicus
tttttttttttttttttktwtaagaagagttccctgtmtaggaggaattgatttaattccagaagacagaactagtaatttctgtagcgctgagtttcttcagatgctaacaaacaatgccaaagaaaccgaacctggccagtgtagaactttccttatggcwwwtyywwtwywwtwyttagaaacagatctacttttaatataaaaatcctaacagaaaactggtattccttgtaggacaaccggacagcccattgtcacatgtccgtcagtgccgtcgggctgcttggcttgggaccgtgggcctccgtcatgcgaggcagttgaaggaaggcrtcttccggcttggcttgccgctccatgtccgcactcacagtgaggcscaragccgytccagctgctcagggttgcmstyrykcmggaacttyagctccttcctcccttcctmtgttgaagctywstcatkytkmaccattkttctyargtwrtrswsaarggmrmkttcmwmykgggcaatcaaggttctatcttctcttttcagcgtggtccttccccagagtgcgttgactccatccacagccaccaggaggtgaaagagtcctaaggagctctgcgtcttcagctccttcagcacaaccccaacagcgtcagtggcgtttctcactcgcgttaggccctgttcgacaacttctcccaaaagactgcctttct

SEQ ID NO: 456 - DNA, 6218 bp, Rattus norvegicus
  misc_feature (6190)..(6191): n is a, c, g, or t
cgggccggcgggagtagaagagccactgagccatgggcgcaggcagttccaccgagcagcggagccccgagcagccggcggggagcgacacgccgagcgagctggtgctcagtggccatgggcccgcagctgaagcctcgggagcagctggagaccccgccgacgcggaccccgccaccaagctcccacagaagaatggccagctgtcttctgtcaacggcgtagctgaacaaggagatgtccatgtccaagaggaaaaccaggaggggcaggaggaagaagtcgttgatgaggatgttggacagcgagagtcagaagatgtgagagaaaaagaccgagttgaagaaatggcggccaactccacagctgttgaagatatcacaaaggatgggcaggaggagacatcagaaataattgaacagatccctgcttcagaaaacaatgtggaagaaatggtacagcctgctgagtcccaggctaatgatgttggcttcaagaaagtatttwwwtttkttggttttaaattcacggtgaagaaggataaaaatgaaaagtcagatactgtccaactactcactgtcaagaaggatgaaggcgaaggggcagaagcctctgtcggagctggagaccaccaggagcccagtgtggagactrccgtcggagagtcagcawccaaagaaagtgagctgaagcaatccacagagaagcaagaaggcaccctgaagcaagaacagagcagcacagaaatcccccttcaagccgaatctgatcaagcggctgaggaagaagccaaagatgaaggagaagaaaaamaararaaararmccmycrwgycsccagaatccccgagcagcccagtcaacagtgagacaacatcttccttcaagaagttcttcactcacggttgggccggctggcgcaagaagaccagcttcaagaaatcaaaagaggatgatctggaaactgccgagaagagaaaggagcaagaggcagaaaaagtagacgaggaagaaaaggaaaagacagagccagcctcggaggagcaggagccggcagaagacacagaccaggccaggttgtcagcagactacgagaaggtggagctgcctttggaagaccaggttggtgacctggaggcatcgtcagaggagaagtgtgctcctttggcaacggaagtgtttgatgagaagatggaagcccaccaagaagttgttgcagaggtccacgtgagcaccgtggagaagacagaggaggagcagggaggaggaggagaggctgaagggggcgtggtggtagaaggaacaggagaatccttgccccctgagaaactggctgagccccaggaggtcccccaggaagctgagcctgctgaggagctgatgaagagcagagagatgtgtgtctctggaggagaccacactcaactgacagacctaagtcctgaagagaagacgctgcccaaacacccagaaggcattgtcagtgaggtggagatgctgtcctctcaggaaagaatcaaggtacagggaagtcccttgaagaaactcttcagtagctcaggcttaaagaagctgtctgggaagaagcagaaggggaaacgaggaggtgggggagacgaagagcctggagaataccaacacattcacaccgaatccccagagagtgctgatgagcagaagggagagagctctgcgtcgtcccccgaggagcctgaggagaccacgtgtctggagaaagggccgctggaagcaccccaggatggggaagctgaggaaggaactacttccgatggagagaagaagagagaagggatcactccctgggcatccttcaaaaagatggtgacacccaagaaacgggtccgaagaccttctgagagtgacaaggaggaagagctggagaaggtcaagagcgccaccttgtcctccactgatagcacagtgtcagaaatgcaagatgaagtcaaaactgttggtgaggaacaaaagccagaggaaccaaagcgtagggtggatacttcagtgtcttgggaagcactgatttgtgtcggatcatccaagaagagagcaaggaaggcatcctcttcagatgatgaaggagggccaaggacactgggaggggacagtcacagagcagaggaggccagcaaagacaaagaagccggaacagacgctgttcctgccagcacccaggagcaggaccaagcgcaaggaagttcctcacccgagccagcgggaagcccttccgaaggggaaggtgtctccacttgggagtcatttaaaagattagtcactccaagaaaaaaatccaagtcaaaactggaagagaaagccgaagactctagtgtagagcagttgtccactgagatcgaaccgagtagagaagaatcttgggtttccattaagaaattcatccccggacggcggaagaaaagggcagacgggaagcaagaacaagccactgtggaagactcagggccagtggagataaatgaggacgaccctaatgtcccagccgtcgtgcctctgtctgagtataatgcagtggagagggagaagatggaagcccaggggaatacggagctgccccagctgctgggggctgtgtacgtgtccgaggagctcagtaagactctggtccacactgtgagtgtcgcagtcattgatgggaccagggcagtcaccagtgtcgaagagcggtctccttcgtggatatccgcttccgtaacagaacctcttgaacacacagcgggagaagccatgccacctgttgaagaggtcactgaaaaagacatcattgcagaagaaactcctgtgctcacccagacgttaccagagggtaaagatgcccatgacgacatggtcaccagtgaagtggatttcacctcagaagctgtgacagccacagagacctcagaggctctccgtactgaagaagttaccgaagcatcgggggccgaagagaccacagacatggtgtccgcagtttcccagctgactgactccccagacaccacagaggaagccaccccagttcaggaggtagagagtggtgtgctagatacagaagaagaggagcgccagacgcaggccatcctccaagccgttgcagacaaggtgaaagaggagtcccaggtgcctgcaacccagactgtgcagagaacggggtcaaaagcactggagaaggttgaggaggtagaggaggactccgaagtgctggcttcggagaaagagaaggacgttatgccgaaaggacccgtgcaggaagctggagctgagcatcttgcacagggctctgagactggacaggctactccagagagccttgaagttcctgaagtcacggcagatgtagaccatgtcgccacgtgccaggttatcaagctccagcagctgatggaacaggccgtggcccctgagtcatccgaaaccttgacagacagtgagacaaatggaagcactcccttagcagattcagacactgcagatgggacacagcaagatgaaaccattgacagccaggacagtaaagccactgcagctgtcaggcagtcacaggtcacagaagaagaggcggctactgctcagaaagaggagccttcgacactacctaataatgttccagcccaggaagaacatggggaagaaccaggaagagatgttcttgaacctacacagcaagagcttactgctgcagccgtgcccgttctggcaaagactgaggtgggtcaagagggtgaggttgactggttggatggagaaaaagtcaaagaagaacaggaggtgtttgtacactctggacccaacagtcaaaaggctgctgatgtgacatatgacagtgaagtgatgggagtggccgggtgtcaggaaaaggagagtactgaagtgcagagtcttagcctggaggagggagagatggaaactgacgttgaaaaggagaaaagggagacaaagccagagcaagtgagtgaagaaggtgagcaggaaacagccgctcctgagcatgaaggaacctacgggaagccagtcctgacacttgacatgcccagctcagagagggggaaggcactgggaagccttggaggaagcccttctctcccagaccaagacaaagcaggttgcatagaggttcaagttcaaagcctggacacaacagtcactcaaacagcagaagctgtggaaaaggtcatagaaacggttgtgatttcagagacaggtgaaagtccagagtgtgtaggtgcacacttattaccagctgagaagtcctctgcaacgggtggccactggactcttcagcatgcagaggacacggtacccctggggcctgagtctcaggcagaatccatcccaatcatagtaactcctgctcctgaaagcaccctacatcctgacctacaaggagaaataagcgcatcccagagagagcgatcagaggaagaggacaagccagatgctggtcctgatgctgacggcaaggagagtacagcaatcgaaaaagtcctcaaggctgaacctgagatcctggaacttgagagtaagagcaacaagattgtgctgaacgtcattcagacagccgttgaccagttcgcacgtacagaaacagcccccgaaactcatgcttatgattcacagacccaggttcctgcatgcaggcttgacagcagggagcccaacagatgctggacaaaaatgaaagatgccaagatgaaacacccagtgccgcagcccagagaggacttgcaagtcctgaccgttctggaggcatgggctcagcctcggaaatgcttgccgcgcttgcagttgaaagcgccggtgtcaaagtaagcattgagaagctgcctcctcaacccaaagatccaaaaggagcatgctgctgatggccctcagctccaaagcttagcccaggcagaggccagtgcctctggaaacctaaccaaagaatccccagacaccaacggaccaaagctaaccgaggagggcgatcccccaaaagttgaggtccaggaagaagaaatgtctaccaagtcagtcaaagagaacaaggcccaggcagaagaggacctgcaggagccaaagggagacctggcagaatcctaagatgttagttgctcattgtacatctgtaagaccagaatgtgaaaacaagtcacagaacaagatgctgctgttgggaccttgagaccaagatttcagagcccatgagatccagagagcagggccgtccaatgatttccacccagtagagcaccccgacaattctgaggcttcatcgggagctagagccagctaacatttcctcgtttcaagactgcctttgatttgccccttgatgccgtccgtgtatttctaacatttcctcgtttcaagactgcctttgatttgccccttgatgccgtccgtgtatttcggatttaaggtcctgcgttctcaacctggaaccaattctgccatacctagttccacttctcaaactggagcatcctcctttatgtatttatatgtatgttttatgtagtcctcctcctgtacctattgtatatttttttctaacgtttaagcacatgctttttgtattatgcaatatataacgggtgtgcagccawagcgacgctttgaaaagctccaagcytcaactgtaacctgcagcaaacarataacattcctggcaagaaragacaagtcttttttaaagtttacwgayrskwasayckgyrrgcwkctagtccyckgraagkggkygktytsstakgcwywgmsakctcagaaataaraaccccattttgaaacatccaggatgtcccaatattaccatgattttttcccccctttttgctaatccagtccaggttggaaagaagtctcctctgtgtcagattaagccctgtctcttaatgatatggacaaatgagtgtgcctaaggccatgagatgtttcctaatgcagaaggaatctgttgtacgtttttttgattgtactcttctakgctggaccgaattcatatgcagatcgaagtsastcctgttctttacagatggtattttgatagatactggagtttgtctgtgttatatctgtgccccttctttaagaacaatgttgcattaygttcctttggataaattgtgatttgacaactgatttaaataaacatatttgmctamwwaaaaaaaaaaaaaaaaaaaaaaaaaaannaaaaaaaaaaaaaaaaaaaaaaaaaaa

SEQ ID NO: 457 - DNA, 484 bp, Rattus norvegicus
tttttttttttttttttcaaagattaattttgattttattaatttctcataattattttagagaactgtcctttgaatatcagtgcaacttactaaattgtattagaatttaggcactcaaaaccccttaaatatggagagcacataatagatacagtggtgtttcccagttaaaataattacaagttacgcaaactgtagaaacatggctcacatgcattcttcaaaaggggagggtcgagttagatctgaacatgctgagccctgcggatgctccttctaatgcgtgtttccacaagggttgtcagagacctggcagcccatgttgtggcttgttacttgtactttgaagagtgtgccgtctgcacacatgcagagcttgtaccgcacccagtcaccactgcctgamyggtctccgccggaggagctgggcagacgcgttgggctgaccatcacagtgccattgaggatgatgctgttttca

SEQ ID NO: 458 - DNA, 661 bp, Rattus norvegicus
tttttttttttttttywcgagggttttcaaagtamaatctattaaaaaatggtaatatacatgtgtgagaaatacaagaagtggtcactgtggttagtcacagrcrcragrgatctaaggatccgaggcttgtgaacacagtawttaagagtaaagtaatatgcgagtyccaattgtgtgcacaactttgagaagccggtcaagtactactagaaaacatagtatagttggtaactctaaaatttatattattccttttyytttwwtwtttttaggtacataccaatgagaaaagcaayttatctgtatgtaagatcaacagaatttttgtgttctagactataaaaagttaatatttaataaaatgcaacatcaacttataaaaaaraasamcwwwgcrrcvsawkmtatawtymytttatggtctcccagctgatctgagaccacagaaggcatttaagaaagactgtcaggtaaacaacaaagaccaacccatgggatgtatactgtttacgaatttcacttgcagggaaacgagtagcctggcttaattttaaagctaattacaaaattggtttttcttaatggtccagataccttgccaattcttccaaactcaacagaactgcaaagacaaaagaaatattttgtaagattttaa

SEQ ID NO: 459 - DNA, 485 bp, Rattus norvegicus
  misc_feature (301)..(301): n is a, c, g, or t
cggcsgctggavagcgtcdagtcmaktgacggytacacgttcgtggaggtcaaaccasgccgggtgctgcgggtaaagcatgcgtgccccgcgcccatcccctcascgccaccccctcctcctgaagataatccargggtcaagacgggccttgtgcgctgccarcgccgaatcacagtgtaccgaaatgggaggctggtggtggagaacctgggccgagcgcctcgtgccgacctgcaaggscgcagtggctccggggacccgcctggctcacttgaggtagagttggstgagcccgcangakgcgacacccgggccamcccgggcarcgggsgacgccgycgtccacggsgtccgaagargaccatccacatcgactgcgagcagcgcatcascagctgcaagggcgcgcaggctgatgtggtgctgttcttcatccacggagtgggtggctcactcgccatctggaaggagcagctggactt

SEQ ID NO: 460 - DNA, 5170 bp, Rattus norvegicus
ggaacaggccggcttcccctgtttttgtggatttgtaggatagccaatttccccccatctcgactttcaactgctttggacattagcttcataggaagaattcattctttagagtaaaatggagcgccgctttttgccaggggccccagcccctctgtttttaccctgtcagaagttagaatgtcactaagaagtgaggcccgggtgaacacttctacactgcagaagatcgccgcagatatgagmaacctgatagaaaatctcgacacccgggaacttcattttgagggagaggaggtggagtatgatgcatctccaggagaccccacggctcaggaagcktgcatcccattctcttctatttacaacactcaaggatttaaggagcccaacatccagatctacctctctggctgtcctgtaaaagcacaagtactggaagtggagcgcttcacgtcgacctcgaggatgccaagtgtcaacctgtacaccatcgagttaacacacggggaattcacatggcaagttaagaggaaattcaagcacttccaagagtttcatagagagctcctcaagtacaaagccttcatccggatccccattcccaccaaaagacatacgtttagaagacaaaatgtcaaagaagagcccagagaaatgcccagtctgccccgttcatcagaaaatgcaatccaggaggagcagttctttggcaggaggaagcaactggaagattacttgacaaaaatactaaaaatgcccatgtacagaaactatcatgccacgacagagttccttgatgtaagccaactgtcttttatccatgatttgggaccaaagggcctggaaggaatgatcatgaaaagatctgggggacacaggataccaggtgtgaattgctgtggccatggaagagcctgctaccggtggtcaaagaggtggttgatagtgaaagactctttcctgctgtatatgaaaccagacagcggggcgatcgccttcgtccttcttgtagacaaagaattcarratyaargtgggaaagaaggagacagaaacraaatatggacttcgaattgataatctttcaaggacactgattttaaaatgtaacagctacagacatgcccggtggtggggaggcgccatcgaggagttcatccagaagcacggcactgacttcctcaaagaccatcgcttcggctcctacgctgcggtccacgagaacattttagctaaatggtacgtgaacgccaaaggttactttgaagatatcgcaaacgcaatggaaggggcaacggaagagatttttatcacagattggtggttaagtccagaaatcttcctgaagcgcccagtggtggaaggcaaccgctggaggctggactgcatcctcaaacggaaagcacaacaaggtgtgcggattttcataatgctttacaaagaggtggagctagccctcgggatcaacagcgagtacaccaagcggactttgatgcggctgcaccccaacataaaggtgatgagacacccagaccatgtgtcctccagtgtgtatctgtgggctcatcacgagaagctcgtcattatcgaccaatcggtggcgtttgtgggtgggattgacctggcctatggamggtgggaygacaatgagcacagactcacagatgtgggcagtgtcaagcgggtcacctcaggacagtctctgggctctctcacrgcagcatcagtagagtctatggaatccttaagcctcaaggacaaacatcaatctcataaaaacgagcccgtcttaaagagtgtcracgataccgacatgaaactgaaaggcatagggaagtccaggaaattctccaaatttagcctctatcgccaacttcaccgccgtaatctgcacaactcggacagcatyagcagcgtcgacagcgcctccaacaccggctccatccgaagtgtgcagacaggagtgggagagctccatggggagactaggttttggcatgggaaggattactgcaactttgtcttcaaggactgggttcaactggacaaaccttttgctgatttcatygacaggtactccacmccccggatgccttggcatgacattggttctgtggttcacggaaaggcagctcgtgacgtggctcgacacttcatccagcgctggaacttcacaaagattatgaagscraaatatcgttccctttcttatcctttcctgctcccaaagtctcaagccacagcgcatgagctgaggtatcaggtgscaggggccgtccassccaaagcgcagttgctccgatctgctgctgactggtctgctggtataaagcaccacgaggaatctatccatgctgcctacacccatgtcatagagaacassaagcrctacatctatattgaaaaccaatttttcataasstgcgctgatgataaagtcgtgttcaacaaggtgggcaatgctatcgcccagagaatcctgaaagccmmcagggaaggccagagatatcgagtgtacatcgtgataccactgctgccgggattcgaaggaracatttccacaggcgggggaaatgccctacaggcaataatgcacttcaactacagaaccatgtgcagaggggagagctccatccttgaacagttaaagccagagcttggtaacaagtggataaattacatatcattttgcggtctgagaacacatgcagagctggaaggaaaccttgtcactgagctcatctatgtccacagcaagttgttaattgctgatgataacacggttatcataggttctgccaacatcaatgaccggagcatgctgggraagcgagacagcgaaatggctgtcatagtgcaggacasasagacagtcccgtcagtgatggatggaaaagaatatcaagctggccgcttcgctcaaggycttcggctggagtgcttcaggcttgtcctgggttatctttctgacccaagtgaggacattcaggatcctgtaagtgacaaattcttcaaggagatttgggtttcaacggcagctcgaaatgctaccatatatgataaggtcttccggtgccttcccaatgacgaagtgcacaatttaatccagttgcgggactttataaacaagcctatattggcaaaagaggaccgccttcgtgccgaggaagaactsasgargatccgtggcttcttggtgcagttccccttctacttcktatyasaagaaaacctgctgccttccgttggaaccaaggaagccattgtgcccatggaggtttggacttaagataaaccwwtygkadyysagggtcttccaacctsaagactacagtatatgctgacttctaaggacttcacagccatagccaggcctgatgtcctcctgtgaactggtgtaaggatgctggacataaacagggcttcatcactcctccgacttgtccttgagaaaagtggctacatcctgttgatagcatatgctcaaataataccaaacatggagacaaattccgtgatatatttcaaaacccattccctttgctaacaagaatctgtctgtaactttgatccgggttgccaaacgttgcctgagcactgctgttcttcgctgatgtccgtttacacgctggggcccaccttgtcatccatacagcactgtttacaagattgcttatcaatgaaagacattggagaaagctgccttgagggtcctcaaggatccaggtgatgcctatacccaacctggtcctgatgtgagcttatttaccacgccaaaacttttctctctgttctttttcagtcactgtagggacagaacaggctttgcctacctacccacactaggcacttcttaacaacaggcaggcattaagtcctaatactgaaraagattccagttcccagagatgctgcccagctgtgtccttgtcatctgataacatttgtaaacatgtgcagcgcatgtcaatacatagcaaccagataagcacagatggagcctccaaggtgtcagtgggaacccagttcagataaaggacaatattcctgacagtctgtcyttcttagccactggattgatagaaaaaaagttgattctytccactgtaagtccagtggatgttaatttgtcttccaactgaatcaaaggctttataatgcccttttcctaagaaacatgagtctaacctgatttacccttcagttttccactaggccttcttcaggggaaaaagcaatgattatacaagatctctcctttgcttgtactgtcaactacatagtaacattccaacatagcttccaaagaagcgataattcacattgttccaatgggatatccacattccctttcgagatggtattgtgtcctttgtagaccaaatttcagagttccccttgtatcatgggagtgtctgtgggtgcctggaagcctggagcttatgcacgtgagataactatgtgactgtaaccaaaaggggtcactggagtaaaatctcttcaaagcagctcccgacccatgttttcatgaataaatatgctggtttaaaagatgacacaggaccacaaagccagtgatgtggattagtaacagagcagcagtcacatccaaaggaggatgtcacccctgaggaacactgtacaaatgaggtgggatttgtaatcaacaatggaaattaacatgtttttatgaataaataacttatttcttatatggccaaggatgataaaattatttcattctataggtatggtgaataaaacactttatgcagataaagatctgattacatttaaaatagtcaatgtatatggaaggcttgttgtgttttatttaaaaaaatttttttaaaaacttaaagcagtcaaagaaatggttcttgatttttgtagacaatgttctcataaggccataaagggctggcacagttccctagtaaatcatttaactgaccttccccattgtgcagctgaggtttcattggagatgtaggcctgcccagtgcagcccagagtagcctaggggctgatggtgtggcatattcttgaaatgaaaatatctgcttttaaagtgcttttggaagatgattgtgtctgtaggtggtcaaattatggagagttaatttacataagagcttgggcaaattaatatatcataattttacacg

SEQ ID NO: 461 - DNA, 1795 bp, Rattus norvegicus
cccgacgtcgccgacgagtgggtgcgcaagggcggcttcattcacaagcccgcgcacggctggctgcaccccgatgcgagggtcctggggcccggggtctcttacatcgttcggtacatgggctgcattgaggtgctccgatctatgcgctccctggatttcaacacccggacacaggtgacgagggaagccatcaatcggctccacgaggctgtgccaggtgtccgaggctcctggaagaagaaggcccccaacaaggcgctggcctccatcttggggaaaagcaacctgcgcttcgccggcatgagcatctcagtcaacatctctgtggacggccttaacttgtcagttcccgctacccgtcagatcatcgccaaccatcacatgcagtctatttccttcgcctccggtggcgacacggacatgaccgattacgtggcctatgtggccaaggaccccatcaaccagagagcctgccacatcttggaatgctgtgagggtctcgcccagagtgtcatcagcaccgtggggcaagcctttgagctgcgcttcaagcaatacctgcacagtccgcccaaggctgtcgtgccccctgaaaggctgaccgggctggaggaatcggcctggggtgatggtgaggttactgcagaccacgattactacaacagcattccaggaaaggagccacccctgggcgggctggtggactccagactggctgtcacacagccctgtgcgctgacaacacttgggggccttggacagggattgtcacctgcctggagagatgtccgtggcttgccttgggacatgggcccctctggagcagtcccacctggggatggctacgtgcaggcagatgcccgagggccacatgactacgaggaacacctgtatgtcaacacccagggcctggacgctttggagcttgaggacacctccgagacacctctgcagcctgaggacagccccaagaaggacctgtttgacatgcgaccctttgaagatgccctgaagttgcacgagtgctccgtggcagcaggcattactgcagcctcactccctctggaggatcagtggcccagcccccctacccgcagggcccccattgcacccacagaggagcaactgaggcaggagccctggtaccatggacgaatgagccgtcgggctgcagagaagctgcttcgtgccgatggggacttccttgtgagagacagcatcaccaacccggggcagtatgtcctcacaggcatgcacgcggggcagcccaagcacctgctgctggtggaccccgagggtgtggtacggacaaaagatgtgctgtttgagagcatcagccacctcatagactatcacctgaagaacgggttgcccatcgtggctgccgagagtgaactgcatctgcggggagtggtctctcgggagccatgagccaggtgacagtcgtcagcccttgctgtggccccgaaggctcagcctttctctcagaccctgaagccacgagaaccagaatggttaccacctctccttccgcatgagcctcaggaagccgcctatttccagctgcacttgctcagctggctgggccagtgagacagagtcagggttcaagcccctcgtcccacctgagccccaaccctgaacttgggtgaggccatataaaccaaagacagaccgagtcgcctttaacaaagacatccaaatgcaggtcccatgcctctggtgcccggcgcgggtagagacatcgggctgtgtccacagagttgacgtggacggctctgtgtgggcagga

SEQ ID NO: 462 - DNA, 2195 bp, Rattus norvegicus
  misc_feature (2163)..(2163): n is a, c, g, or t
  misc_feature (2166)..(2166): n is a, c, g, or t
ccagggcccgcgctgcgtggctgctgctctgctgccttgtaacggtgaaagggctcgatcgtcggcctcggctgtccctctccgaaaaggctgtcctgggacccgggctcctagtcccgctcggggcaccgcggctcgtgtgctatgcgcggcagtccgcgccggggccggcagcagcagcgcccgggtggatgcggcgagcccacggaggggcatgcttccacgcaccaagtacaaccgcttcaggaatgactcggtgacatcggtcgatgaccttctccacagcctgtcggtgagcggcagcggcggcaaggtctcggcggagcccgcggcgagcccctacctggtgtcgggcgaggcgctgcgcaaggcgccggacgatgggcccggcagcctgggccacctgctccacaaggtgtcccacttgaaactctccagctccggcctgcgtggcctgtcgtcggccgcccgggagcgggcaggagcgcggctctcgggcagctgcagcgcgcccagcctggcggccccggacggtggcagcgcgacccccgggtcccgtgccccggccgccagcatgagcgccaccaggaagagccgggccagcgacgagccgttgcccaggcccccgcggggcgcgccgcacgccagcgaccaggtgctggggtcgggagtcacctatgtggtcaagtacttgggatgcatcgaagttctgcgctcaatgaggtctcttgacttcagtacaagaactcaggttaccagggaagccatcagccgtgtctgcgaagctgtgccaggcgccaaaggagccttcaagaagagaaagcctccgagtaaaatgctgtccagcatcctggggaagagcaacctccagttcgcagggatgagcatctccctgaccatctccaccgccagcctgaacctgcgcactcctgactccaaacagatcatatcgaaccatcacatgcggtccatctccttcgcctcagggggagacccggacacaacagactatgttgcctacgtcgctaaggaccctgtgaatcgcagagcttgccacattctggaatgctgtgacgggctagcccaagatgtcatcggctccatcggacaagcctttgaactccggttcaagcagtatttgcagtgtccttccaagattcctgctctccaggaccgaatgcagagtctggacgagccgtggactgaagaagagggagatggccccgatcacccgtactacaacagcgttcccaacaagatgcctcctccaggagggtttctcgatgctcgattgaaagccagaccccacgcacctgatgcagcccagttttcaggaaaagagcaaacttattaccagggaagacacttaggagatgcattcggtgaagactggcagagagcacccaccaggcaaggctccttggacatctatagcacaccagaagggaaagctcacatggttcctgtaggagaaacaccaacctatgtcaacacccagccagtcccaccacaggtttggccagcagcaaccagcagcactgagagcagcccacggaaggacctctttgacatgaagccttttgaagatgccctcagaaaccaacccctgggccctgtgttgagcaaagctgcgtctgtggagtgtatcagccccgttacacccagagccccggacgccaagatgctggaggagcttaatgctgagccctggtaccaaggcgagatgagcaggaaggaggcagaggctctactacaggaagatggagacttcctagtcaggaagagtaccaccaaccccggctcctttgtcctcacaggcatgcacaatggccaggccaagcacctgctgctggtggacccggaaggcacggtccggacgaaggacagggtctttgacagcatcagtcacctcattacttaccacctggagagcagcctgcccattgtctctgccgggagtgagctttgtctccggcaaccagtggagaggaaaccctgagcttgccctgcgcccaggtcaggaggacctgggctccgctgctctcagcctatggaatctggggcaactgtctgtgggcccatcaccttcttcaaaagccccgtgagagaggtttccttcaagttcaaatttcataaatatgttcacacgactcagatgcatantanaaatgttatacccacacatcctgtacaaa

SEQ ID NO: 463 - DNA, 1350 bp, Rattus norvegicus
atgtggaacgcgacccccagcgaggagccggagcctaacgtcacgttggacctggattgggacgcttcccccggcaacgactcactgcctgacgaactgctgccgctgttccccgctccgctgctggcaggcgtcaccgccacctgcgtggcgctcttcgtggtgggcatctcaggcaacctgctcactatgctggtggtgtcccgcttccgcgagctgcgcaccaccaccaacctctacctgtccagcatggccttctcggatctgctcatcttcctgtgcatgccgctggacctcgtccgcctctggcagtaccggccctggaacttcggcgacctgctctgcaaactcttccagtttgtcagcgagagctgcacctacgccacggtcctcaccatcaccgcgctgagcgtcgagcgctacttcgccatctgcttccctctgcgggccaaggtggtggtcactaagggccgcgtgaagctggtcatccttgtcatctgggccgtggctttctgcagcgcggggcccatcttcgtgctggtgggcgtggagcacgaaaacggcacagatccccgggacaccaacgaatgccgcgccaccgagttcgctgtgcgctctgggctgctcaccgtcatggtgtgggtgtccagcgtcttcttctttctaccggtcttctgcctcactgtgctctacagtctcatcgggaggaagctatggcggagacgcggagatgcagcggtgggcgcctcgctccgggaccagaaccacaagcagacagtgaagatgcttgctgtggtggtgtttgctttcatcctctgctggctgcccttccacgtgggaagatacctcttttccaagtccttcgagcctggctctctggagatcgctcagatcagccagtactgcaacctggtgtcctttgtcctcttctacctcagcgctgccatcaaccccattctgtacaacatcatgtccaagaagtaccgggtggcagtgttcaaactgctaggatttgaatccttctcccagagaaagctttccactctgaaggatgagagttcccgggcctggacaaagtcgagcatcaacacatgacagcacatcccatctctccgccatcgctcattgctctacacccgaagccgtagccaagcgggacttgggaggaggcagaacctcagtttggggattagagacaaatgggtctggaaacaattgggggtggggagtagagccagatgggcagggtccacgcagattgatctgcttgtgcgcccaccagagcactcatgtgcaacccctgcacacccgtgattttattattggggctactggcagctttgcagctca

SEQ ID NO: 464 - DNA, 2452 bp, Rattus norvegicus
gagcagackscwcrarcacaaacatgacccaggcagtcaagctcgcctccagagtcttcsatcgagtccaactgccttctcagctgggcagtgactcggttctccggagtttatctgatatccctgggccctctacacctagcttcctggctgaactcttctgcaaaggggggctgtccaggctasatgaactgcaggtgcatggcgctgcgcggtacgggccaatatggtccggcagcttcgggacacttcgcacagtttatgtggccgaccctgcacttgtagagcagctcctgcgacaagaaagtcattgtccagagcgctgtagtttctcatcttggtcagagcaccgtcgccgccaccagcgggcttgcgggtkgctaacggcggatggtgaagaatggcagaggctccgaagtctcctggccccgcwwctcctccgacctcaagcagccgccggctatgctggaactctggacagcgtggtcagtgacctcgtgcgacgactaaggcgccagcggggacgtggctctgggctaccggacctagttctggacgtggcgggagagttttacaaatttggcctagaaggcataggcgcggtgctgctgggatcgcgcctgsgctgcctggaggctgaagttcctcccgacacagaaaccttcattgaggccgtgggctcggtgtttgtgtctacactcttgaccatggcaatgcccagttggctgcaccgccttatacccggaccctgggcccgcctctgcagagactggratcagatgtttgcctttgcccagaagcacgtggagcagcgcgaaggcgaagctgccgtgaggaaccagggaaagcctgaggaggatttgccaacggggcatcacttaaccsacttcctttttcgggaaaaggtgtctgtccagtccatagtgggaaatgtgasagagctactactggctggagtggacacggtatccaatacgctctcctgggcactctatgagctctcccggcacccggaagtccagtctgcactccactctgagatcacaggcgctgtgaaccctggctcctatgcccacctccaagccactgctctgtcccagctacccctgctaaaggctgtgatcaaagaagtgttgakrttgkaccctgtggtacctgggaactcccgtgtcccagacagagacatctgtgtaggaaactatgttattccccaagatacactggtttccctctgtcactatgccacttcaagggaccccgcccagtttcgggaacccaactcttttaatccagctcgatggcttggagagggtccagccccccacccatttgcatctcttccttttggctttggcaaacgaagttgcatagggagacgcttggcagagctcgagctacaaatggcgttggcccagatcttgacccattttgaggtgctgcctgagccaggtgctcttccagtcaaacccatgacccggactgtcctggtacctgagaggagcatccatctccagtttgtagacagatagtcctgtggaaggcagctgtcatcatctctctccagactggatttttcttactatgcacaagaggcacactctccctcgaggcctgtctgtctgagcaaacttcaggaagcaggcccgggcctatctgtgcttgacctgactcagcaggtaccacagaaccaggatcctttctcctgctcagtacctctcctgatcattcctcaagatccaaagccttcagattttaacacatccttaaagggccaactcgggggttaactaacagccccaggcagcctgggcagggatcccccactgatccttccatgcttacagtgttcactgacagctgtctaagcatccattgcagcacaaactaagtgactgtgcacctggtctgcacctggtctgcacctggttgcgtctctgcctgaccatgtgagctctttgagaagagtgatgactactgggcttttagctcttttcctttttgggacacagtcttgctattgtactccatgctgtccttgaacccacaagccctcacctcaccttcccaagtgttgggttacggacattagctatgsctkccagctttattagtctttctatctcctgccatggtctatccccggctatttgatactatatattctcagattgaatctggaccatgtggtagaagggatgaccactsmccaggctytacccaccactttatcttaatcttttctctaggaaagtgaatctctccttgccttacagcattttaaagctccccttggctgttctgctctttagccactctaaagtggatccactctacttctcaccacccatctttctgcaccccagcctgtctttttatattwaaaaaattgtatttattatgttttcaaataaaatgtttactccttkaaaaaaaaaaaaaaaaaaaaaaaaaa

SEQ ID NO: 465 - DNA, 1968 bp, Rattus norvegicus
atggcggcaggagttgcagcctggctgccttttgcccgggctgcggccattgggtggatgccagtggccaactgccccatgcccctagctccagccgacaagaacaagcggcaagatgagctaatcgtcctcaacgtgagtggccgtcggttccagacctggaggaccactctggagcgctatcccgacaccctgctgggtagcacagagaaggagttcttcttcaacgaggacaccaaggagtacttctttgaccgtgacccggaagtgttccgttgtgtgctcaacttctaccgcactgggaagctgcactacccacgctatgaatgcatctctgcctacgacgatgagctggccttctatggmatcctccctgagatcattggcgactgctgctatgaggagtacaaagaccgcaagcgggagaacgctgagcggctcatggatgacaatgagtctgagaacaaccaggagtccatgccctccctcagcttccgccagaccatgtggcgggccttcgagaacccacacaccagcaccctggcactggtcttctactacgtgacaggcttcttcattgcggtctcggtgatcaccaacgtggtggagacggtgccatgcggcacggtgcctgggagcaaggaactgccgtgtggagagcgctactccgtggctttcttctgcctggacactgcgtgtgtcatgatcttcacggtggagtacctcctccgactcttcgcggcacccagcaggtaccgcttcatccgcagtgtgatgagcatcatcgacgtggtggccatcatgccctattacattggcctggtcatgaccaacaacgaggacgtgtccggggcatttgtcacactccgggtcttccgcgtcttcaggatcttcaagttctcccgacattcccagggcctacggatcctaggctacaccctgaagagctgtgcctcagaactaggctttcttctcttctccctcaccatggccatcatcatctttgccactgtgatgttttatgctgagaagggctcctccgccagcaagttcacaagcatccctgcgtctttctggtacaccatagtcaccatgacaacactggggtatggagacatggtgcctaagacaattgctgggaagatatttggctccatctgctccctaagcggcgtcctggtcattgctctgccagtccccgtcatagtcwccaactttagcaggatctaccatcagaaccagagagcagataaacgcagggcacagaagaaggcccgccttgccagaatccgtgtggccaaaacagggagctccaatgcctacctgcacagcaagcgcaatggactcctcaatgaagctctggagctgaccggcaccccagaagaggagcacatgggcaagaccacgtcactcatcgagagccagcaccaccacctgctacactgcttagaaaagaccactgggttatcctatcttgtggatgatcccctgttgtctgtacgaacctccaccatcaagaaccacgagtttattgatgagcagatgtttgagcagaactgcatggagagctcaatgcagaactacccatccaccagaagccyttytctgtccagccactcgggcctcaccaccacytgytgctcccgccgtagcaagaagaccacgcacytgcccaactccaacctgccggccacccgcytgcgcagcatgcaagagctcagcaccatccacatccagggcagtgagcagccctccctcaccaytagtcgctccagccttaatttgaaagcagacgacggactgagaccaaactgcaaaacatcccagattacaacagccatcatcagcatccctactcccccagctctaaccccagagggagaaagtcggccaccccctgccagcccaggtcccaacacgaacattccttccataaccarmaawrwwrwmaarrwctctgycttgtaa

SEQ ID NO: 466 - DNA, 3870 bp, Rattus norvegicus
cgtttagcttaattcaccagacccagctctttcagagcaaggcaaccacagaggagacgagctgaccttagagatgaccctcagtgggagagagggagtaagaaacactgggctgcccttagaagattcaggaacacctccctcccagggtttctatcaaacacccaaagctgtgttgcccaggcaggaccacctttcaagtcctagcagaccagctgatgaagctgccttccctagggtccccggagaaatggtgcctccctcccctgggtctcaatttgcatggcaggaaggggcctaatggggaagaggtggagaggagaaaagttgcagcccgggctgacacacagttacatgttttgccccagaccctccttgggctcagagacagagcagtgaccatggccacactggtgctgtctcctgtgccctgccactggctgatgttcctgctgctgctcctctcaggtatggcttatgtgacagtcgataggcctgctggcggctcagttctgagtcctagttcagtctcttgtttgcttggcctcttcctgtcttttgctttctgcttcttgtttgtctccccctgactgtcctgtgcccagtttgtgggttttaatggtaggctcagggcctgaggtcccagctctttccagcctgaagagtatcaggttaagcttggtacaaggggctaactaatcttgtgggcagctatgaagaggtggtggccaggaggaaggggagtcagtgtggcttttggcgaagccctgagggtactgcatggatgaggctccccctatattctggaagatagtatattccaggaatagtcctctctttgcctgaaagaccgggagagtcttcctgactgtggcttccttctccattccacagaagctacaggccagcctcatgataaaggcaggaggggcctgggtatgggattcccagtacccctgccttacttctgcctctccagtacagggagagggagagctaaaggggcttgaagctgtagtcccggaaggaagaagtagccctgggaatgtggaaggggtaagggtggggcaatcaattgagggtagagaggcctgacctagccctgcccacttcctctcaccctccaggtgagccagtaccagcgatgacaaagagtgaccagccaccgattttccaaggttagttacctcagccaccacttctgggacaaatgtatcggttcaacacagccctgtctagagtgcccataccgacaccagctcaaggtctcattaaggctccatttctgaacagttgttgctctcataagactactgtgctccagccctggccactgagggccaaaactaagctgaggctggggaatcagagcaggacagctatggggaatcccacaaggccacaggcctgggtctgtgctcctggaaacccaataacctctcaggccagaaccctgagaggagtgggtccctgagaagggtaggggaggtgggcctcgggtgaaaggctaaggatccaacctttatcatcctggggaacttggagtgggtgtaggaaagagttaaagtacccaaccaggccaaaaggctgtcctgcagatgaggcctggatctagccattccggtgggcataaaagcaatgggaaggttccagaatcctcttcaaggtgagacaagtggacagaggttagatcaggaagaggtgcacaccagggacttggtatgcagcctcacacagtttactttctcatacctctgcctcctaaccctgatgttccagacacgtgagctagactaacccagggcaatgccttccacggtggactaggttggcacacaggaagaggctaagcctgattttgagccttgcactgatgtccacaggaagcccttgttccaagatctggcagcacccgaggtttgcagccaaaaagcggagctccatggtgaagtttcactgccacacagactactcaggtgtcatgacctggttccggcagaaagggaaccagaggcctcaggaactgttcccagaagatggacacatttcgcagacccggaatggctctgtctacaccctcactctccaaaacatccagtatgaggataacggcatctacttctgccagcagaagtgcaacagcaccgaacctgatgttaccgatggctgtggcacggaacttctagtcttaggtgtgtgcaaggtagaccatttagccatacacgcccacttcccagcagagcctccccgtgaggggaggtggctatgaccctagagcccccaggagagctgctgggcagtagatccctagggtatccaaagacccaccatgtttaaccttgaactccagtgttataccctgccctactatccccaggattcagcacgttggaccaactgaagcggcggaacacgctgaaagatggcattatcatgatccagaccctcctcatcatcctcttcatcatcgtccccatcttcttactattagacaaggtgcccactggaactggggagtgggaggagctctggaaggctgggaggttggcacagggcagacaggacccgggcggggtccccatattctcagactctgtggctgctcatccagctccaagcctgtccattggctcactgttcgttcattcatttggtcttggagactccttccctcttcctctcccccaccctgacccacatccctggcccatcagggggcagagatggaggaccctaaccctctgaactgcattctctccccaccctacccccactctcctgcaggatgacagcaaggccgggatggaagaggaccacacctatgaggtaagggtcagggttgcttagcaactgagctgcagcgtccaccctttgttgtgatgcttagaacgtggcccagatctgacctcccatttgtgttcctagggcttgaacattgaccagacagccacctatgaagacatagtgactcttcggacaggggaggtaaagtggtctgtgggagagcacccaggccaggagtgagggccacctccatcctgctcaactcttgggcctcactgtttccaaactgcctggctcacagtctgttccctgcttcctggataccctggccagcatctgaagttggaccatcaatgtcacctctctttctagcctctggtccccagctcttgctgaagggcccggggtagaaggacaatagggtggtggcatggagtaaggagttctctgggggatagacttgacccaaggcttctggaaatgctatgcagtttctgtccccatgtttgggacaggaaagcagagacttgttggaatctgcaaatggactcagcacattggcttcctgaggagtccgggaaggaccacggttcacagtggcacctagaagggaatgccagaatgccacttctccctctcatcccagggatcccctaaagcctatagcccatcctcctgtggaataaacagcgtatctgacaccagaramawwwrwrawawmcatctctcagagctgggtgggtgggtatggttctgtaagctacagtgacatttgaatatggacctgtgggcttatgaaactgtgggagggagtgtctgccctagtcaccctacctttcccccctggaggcccagttggggcctgcagctacatccccagaaaccccgccctggaacagttgctggagaaagaggattcaacccatctttcagatgaacagcaataccctcatcctgctcttcattaaaccattaagagagagagattcctgctgggtatggtggtacatatctttaatcccagcacttgggaggcagaggtacttggatccctgagttcaaggccagcctggtctacagagtgag

SEQ ID NO: 467 - DNA, 4328 bp, Rattus norvegicus
ggcacgaggtctccccagcgcccggcggtccagcagcccgcgccccgccgcctcgctcctccccggctccgctgcccggagtactgggccgtccgcgaggctccgcggcccgggagccatgttgagcggggggctcggccacgcgtgaggcggccggcggccctcgcggagcggaaggcgcgagagggggaggcctgagcctgaggcgcctcggcgcgtccgccgccaccggacctgcatccgctcgttctgcgcgcccgcccgcccgtccgcccggagcccgcgatctccgcacttgctgaatttttcaagccatatccagctgataggatgaaaaagtttaagaggagactgtccctcacgctcaggggaagccagactattgatgagtccctgtcggagctggctgaacagatgaccatagaggagagcagtagcaaagacaacgagcccattgtgaagaatggcaggccgccaacgtctcacagcatgcattccttcctccatcagtacacagggtccttcaagaagcccccactgcgaagaccccacagcgttattggaggaagccttggttcctttatggcaatgcccagaaatggaagcagattagatattgttcatgaaaatctgaaaatgggatcagatggtgagagtgaccaagcttctgggacatcatctgatgaagtccagtcccctacaggtgtttgcctcagaaatcgtatacatagacggatctcgatggaggacttgaataagcggctgtcgctgcctgcagacatcaggatacccgatggctacctggagaagctgcagatcagcagcccgcccttcgaccagcccatgagccgcaggtcccgcagagcctccttatcagaaattgggtttgggaaaatggaaacctacatcaaattggaaaagcttggagagggcacatatgcaacggtatataaagggagaagtaagttgacagagaacttggtggcattaaaagagatccgcttggaacacgaagaaggtgcaccctgtacagctataagagaagtttcactgttaaaggacttaaaacatgcaaatatagtaacgttgcatgacatcgttcacacggacaagtctttgactctggtctttgagtacctggacaaagacctgaagcagtacatggacgactgtgggagcatcatgagcatgcacaacgtcaagctgttcctgtaccagattctccgtggtttggcatattgccatagaagaaaagtgttgcaccgggacctgaaaccacagaacctcctcattaatgaaagaggagaactaaagctggctgactttggactagccagagccaagtcagtccccaccaagacctactcaaatgaagttgtcacgctgtggtatcggccccctgacgtgcttcttggttcctcggagtactcaactcagatcgacatgtggggagttggctgcattttctttgaaatggcttctggaagaccactgtttccagggtcaactgtggaagatgaactgcacttaatatttcgactactaggaactccatctcaggaaacttggccaggtgtttcttcaaatgatgaattcaagaactacaacttcccaaaatataagccacaacctctaattaatcatgcacccaggttagattctgaaggaattgagttgataacaaagtttcttcagtatgaatctaagaaaagggctccagcagaagaggccatgaaacatgtgtacttccgaagtctagggccgagaatacatgctttaccagaaagcgtatcaatattcagtttgaaagagattcagttgcaaaaggacccgggttttcgaaattcttcctatccagagacaggtgtgtttgtcataaaccatttcacatgtcgatcatgaattttttttcgtggagccaagctttgggtttataaatcgatcagtaaaattattgatgtaaaaaaaaaaaaccaacaatgtacagtgcatcccaaaactctgtatttttagaattgcatatacttgctgttctgtacaatgtgggcagcgcagtaaatcttcagagagaaatgtgattcagtcaagtcagggatcctgcgagctgcagatggcacagagacctttcacaagtgacctggcttgaccactgcacacgccatccctggtacccgaggcagaagacacggcttgtgcttacctagccatccgcttcgtcactcggaagcctagaagctgtagactgaccccgtcaacacaaaggccctttaagacagtgccgaccactcttaccgtggaatagtagcgtttgctggtgggaatgttagcctcctagagtcaccaaatactgtatgtgggataatcactgagccttgaactgcctcatgaaatgactttatattttaggacatgggaagaacagaagacagagcatgctcttttaagtctggtagcttggtctcaagcccagccccagcctttcttaccagccatggactcagagctgaaggcagtcatttcttgtgctggacttgggatctccgtgtgtctgcactgtcctcttcccagtggagtctttttatttcagacctacagattgtttttatatttcttgtcacagtgtgacaatttttttttttttgtacagttggttttaaggtcttctctgcctgtagagccaggaggttacagctctcaatgtaactgtggctgcagatttgtgcaggactgagaaacacagtgcattatttattgtggaatcattgctgctaaataactactgtctgtttatttaacacaacagttgaatgcctgaagaagttgcagtggctttattagatgtgaacgcatctgtttctcctcacaaattgtttgactgctgcatttcgttgttgttttgttttgtttgtttgtttgtttttaaaaaaaaattaaactgcagtgtttcctggaatgtatatttagctttgcttagcagtaaaataagtgagccatcgtgaacactcgaagttcgtgctacttataatttcttaggagcattggccaatagagtagctgagagagggacagcaccgtgtgtttgggaagcgtgtaatgtgaggggctgagccaagcaaatgaatagcagccattttgggttcccacatcagacaccaatcaactaagaacaccaagttatccatttttacctattcctcacctgagagatgtctactgcctcttcgtatgcctacacttgattaacttttacactgtgctttcagttaacatttaaccgtagaggtcattcaaacaggaaaagccttgctgctgtttgtctgaagcacgtttcttttcytagatactacttcattttgaggaacagtttctttcacttgggggctgtgtatgtttcaaataacgttcayttggaataaccagctgaaactgactctgtctttaaatggagccatgatgaattagaaatgagaaataagagcccagaggactgccttagcattgtgggtattatctgctcatcagagacactaacagtgtaacttgaattatgcatgtccttgaccatcacagacactcggtgttggtaaccgtgtcttaggcattcgtgttcatcgttaaggactattggttagtgcatcttacaactagaaatcttaattggtatactttgaaatggtcatgtaagtttttgccttatatcatgaaaatagttataacttaatttttgtcctgccattcactgtaaaacattcagggtcctctcatttctgttcaggaaatcctgtagtttattktttkttawwwaamaswawwaaarwrarwttttgtawawwwwmawwwwaamwwtatttgtgaatagtgattgtggcatgtttggggatgttattttaatatttcacaatackgmarwkktaatttttttttttaaaaaaagaaagttctggaagaaacagattcatgtgtaacagtgaatattggaccactgctgcttttcacgattgtcagctggttttatgttaagccccgtagcctaactgctgttatttctaactgacagacatgtattaatattgtactttgaaggttataaatattatgtgaaaattccttccttcgttttgaaatttataataactaaatctctgtgttatataaaatgtgatctttgtggaaaaaaaaaaaaaaaaaaaaaaaaattggcggccgcaagcttattccctttagtgagggttaattttagcttggcactggccgtcgttttacaacgtcgtgactgggaaaaccctggcgttacccaacttaatcgccttgcagcacatccccctttc

SEQ ID NO: 468 - DNA, 2262 bp, Rattus norvegicus
ggcacgagcgggagggaccggcggctccgcccgagcgcggccgcccakccccgggccgcccakccgcccagcccccgccctcccgccggcccgcgcctggcggyggccccgacaccgacagagcagccgcgctgccggcggaatggagcggcgccggggctgagccgggcgcactcgggccgccgcatgtgccgcgcggggagcagctgccgagcgggcggakagcgaacgccakgggccccgtckgagcggycayaggagcakcgccggagatgggagagcakcccatcttcaccacgcgagcgcacgtcttccakattgaccccagcaccaagaagaactgggtgccggcaagcaagcaggccgtcactgtttcctacttctacgatgtcaccaggaacagctatcggatcatcagtgtggatggagccaaggtaatcataaacagcaccatcaccccgaacatgacgttcaccaaaacttcacagaagttcgggcagtgggctgacagcagggccaacaccgtgttcggtctgggattctcctcagagcagcagctcacaaagtttgcagagaaattccaggaggtaagagaagctgccaggttagccagagacaagtcccaggagaaaatcgagacgtcaagtaatcattcccaagcatccagcgtcaatgggacagatgacgagaaagcctcccatgcgagtccggccgacacacacctcaagtctgagaatgacaagctgaagatcgctttgacacagagtgctgccaatgtgaagaagtgggagatcgagctgcagaccctgcgggagagcaatgcccggctgaccaccgcgctgcaggagtcggcggccagtgtagaacagtggaagcggcaattctccatctgcagagatgagaatgacaggctccgcagcaagattgaggagctggaagaacagtgcggtgagatcaacagggagaaggaaaagaacacccagctgaagaggaggattgaggagctggagtcagaggtccgagaaaaggaaatggagttgaaggatctccgcaaacaaagtgaaatcatacctcagctcatgtccgagtgtgaatatgtctctgagaagttagaggctgcagaaagagacaatcaaaacttggaagacaaagtgcggtctctaaagacagacatcgaggagagtaaayacmggcmkcgysmcctgaagggggagctcaagagcttccttgaggtgctggacggaaagatcgatgacctccacgacttccgccgagggctctccaagctaggcacggataactagggtggggcggagcctakatggagagtggaaagcgtgtgtgagagatgaagtggrcatagggcattctccgtttgcttctgtaatgcgggtgcgttctgtctgtstccaggccagtcgtgccgtccactcgctcctccagaatagaaaatctcttgcttctctggctttgtgaggtcgtggacacctggaagcttctgactcaggaatccagaacggtctaccttagccgtttacgcagtcagggcagggacattcaratyttcccttaagggctgttgcaaccctatgaactggggatgggggaagtattttctaatccaagtatcattaacctttacaacaggcmykwgggcgccttccgctgcgtggcactcagtgtgtragactctagattccagaccgggarcacgtggagggaacatcttttcccaggatgcattctgttcctttagcagaggtagctaacctttcgaagttatgacagatttcacactcaaaaactgcacaattgatctacccaaaaagaaataattattwaaaaaaaaaaammwaacatattttaagtaaatacactgttttgggttggagcgcattcatagttaccctcagctgcatgtggcctttggactgtagkccacacaaacstcktgmmgrawycatttartggagacttgtccagtgggaagacaaaccagaagttttggcgtgcgcttactgacaaggaattacttgtacmtactmtgacccatcstcccstgatttgtcacggttgsaacaatgtttttttgtktgttagwwtgtkttgtwtytgwtttgtdtgctttcctttktaaatttcagaacagatgcwtgagctgttggaacagaatgcagggagggtgtctagcacagtytgggcacataataggtgmttaataaacattcgttcasttaaachtwwaaaaaaaaaaaaaaaaaa

SEQ ID NO: 469 - DNA, 793 bp, Rattus norvegicus
ttcccttctgtccagtccaacgctgcagcttacctgcaacacctctgcttcggagacaataagatcaaggcagagataaggagacaaggtgggatacagctcctggtggacctgctggatcaccggatgacagaagtccaccgtagtgcctgtggggctctgaggaacctggtatatggaaaggccaatgatgataacaaaatcgccctgaaaaactgtggtggtatcccagcacttgtgagactccttcgcaagaccacagacctggagatccgggaactggtcacaggagtcctttggaacctctcatcatgcgatgccctcaagatgccaatcatccaggacgccctggcagtgctgaccaatgcagtgatcatccctcactcgggctgggagaattcacctcttcaggacgaccggaaaatacagctgcattcatcacaggtgctgcgcaacgccactgggtgcctaaggaatgtaagttcagctggagaggaggcccgccgcagaatgcgggagtgtgatgggctcacggatgccttgctgtacgtgattcagtctgcactggggagcagtgagatcgatagcaagaccgttgaaaactgtgtgtgcatcttgaggaacctctcataccggctagcagcagaaacgtctcagggacagcacatgggcacagacgagctggacgggctgctctgcggggaggccaatggcaaggacgcagagagttctgggtgctggggcaagaagaagaagaaaaagaaatcccaggatcagtgggatggagtaggac

SEQ ID NO: 470 - DNA, 877 bp, Rattus norvegicus
tgcttcctgagtcacmcgcarrcgagagcaggaccctcttggctctccgtctgctcggcgcagcgatgtccggggcgtccgccaggagcctggggaagggaagcgcgccccctggcccggtcccggaggccagatccgagtctacagcatgaggttctgtccctttgctcagaggacgctgatggtcctgaaggccaagggaatccggcatgaaatcatcaacatcaacctgragaataagcccgagtggttctttgagaagaatccctttgggctggtgccggttctggagaacactcarggtcacttgatcactgaatctgtcatcacttgcgagtacctggatgaagcatacccggagaagaagttattyccagatgacccgtaygagaaagcttgccagaagatgacctttgagttattctcaaaggyrcmgkctctggttacsagttttattagggcgaagagaaaggaagmccatccgggcataaaggaagamctsragaaaragttcagcaagctwraagaggctatggstwawaaraggmcagscttyttcggtgggaattcgctytcaakgrtcgattatyttatttgsccskggtttcagmgactggaagcactggagctcaatgagtgtatagaccacmccccaaaactyaagytytggatggcaaccatkcmgraagacccykkkgcatcatcccamttcawtgrtkccaagacctaccgtgattacttaagtytytacctacaggacagccccraggcctgtgattatgggctytraggggcaaragccctcagcgaatratgttttccttcatcgattgaawagcatgcttttattttammmhwwwaaaaaaaaaaaaaaaaa

SEQ ID NO: 471 - DNA, 1824 bp, Rattus norvegicus
  misc_feature (1804)..(1804): n is a, c, g, or t
atgcaggcagcctggctcttgggggccctactggtccctcaccttttgagttttggccatggagcccgaggtcatgggaaggaatgggaaggagtctggggaggtgccctggaggaggagcgagatcgggagtcactgatgttgaagaatctccaggaggccctagggctgcccactggggtgggaaataaggataatcttgctgaaaactctgaaggcaaagaggtctgggaggccacggagactcaaggggaagaagaggaagaggaaaccaccacaacaccttcttctagccccactcctttccccagcccttctcctacatcagaggacacagtcacttacatcctgggccgcttggccagcctcgatgcaggcctacaccaattgcacatccgtctgcatgttttggacacccgtgtggttgagctgacccaggggctgcggcggctgcgggatgccgcgagtgacacccgcgactcagtgcaagctctgaaggaggtacaggtccgttctgagcaggagcacggccgcttggagggctgcctgaagggcctgcgcctaggccacaaatgcttcctgctctcgcgagacttcgagacacaggcggcggcgcaagcgcggtgtaaggcgcgaggtgggagtttagcgcagcctgcggaccgccagcaaatggatgctctaagccggtacttacgagctgctcttgccccctacaactggccagtgtggctgggagtgcacgaccggcgctcggaggggctctaccttttcgagaacggccagcgcgtgtcattcttcgcstggcaccgcgcactcagcccggagtccggcgcccagcytagtgcggcatcccatccacttagcccggatcagcccaatggcggcatcctggagaactgcgtggcccaggcctcagacgacggctcctggtgggaccatgactgtgagcggcgcctmtacttcgtctgcgagttccctttstagagagcaggtctctgccgcggagctctagcgcacattctgcaccgtacaccgcgcaccatactgttaggggtctggggtcgctcagagattaagcaasacsakggatacattttaataagaagaggcttttaattttagatactggcacccagactgattggggccaaggtctacacctgagatcgcttccaagatgcaagccctagctattatcagcccagagcttataaaggcaaatcccacaagawwrmawrwarmmwgatgacatggaggcaggggcttaaattttaacatatatgtcttgtagttgtcctagtcatcctttgagcagaggaagcaagattgattacaaaagcagagatagcagttagtcgtacaactaaatttgctagaacagcaaattttacaagaccaatcaatttcaaaatagtcttcaatatctgggagaaaggggaagtggactgctagtgtacagcctgcacaagctaggagctttcgtcttagagccatatttgctttggtctctcaagcgtagtgagtctaaacttctaaatgtaatgttgaatacctacggtgtacattctgcaccctgtaccctacactgcgccctacatcccactctgtacacctttcattctacaacctacatagtgcaacctgcaccttgaaccctccttgggccagaagtgccaccaatcctggctggtcccccacccccaccctgagagatagcctgtacaacttctccatgtccccccacctgtctttgaaacttcaaggtcccaactaggcccggtgccaataaatccttttaaantataaaaaaaaaaaaaaaaa

SEQ ID NO: 472 - DNA, 4032 bp, Rattus norvegicus
ccgatcgacgcaccctcgttgacatcgtgcggcgcggcgcggcgcgggcggcccggggaccgacgggcaggcgcaccggggcatgggcgcgccggaggtctcggtgtgcaggcagggctgggtgcgccggccggggctcggggacagcggcgggctcaggtcttccctggcgaccgctgctgagcccccgcggggcccgtgacgccgcggccgatgtggcccagcgcgttgcgggcctgcaccgccgctgcacaaagacgccgccgcagccgccgcccgcaccccggccgcagccgccgcgccagccctagccccaggcggagtcccggccgcagggcagcaggcgtccgcgcgcggccggccacggcatggagaagcgcgcggccgcggggccggagggggcgccgggcgccagggcgccgctcgcagtcgtctgcctggtgaacctctttctcactgggagactcagcagtgcagttcctgccttagctgcctgcagtgggaagttggaacagcacactgaacggcgaggggttatctacagcccagcctggcccctcaactaccctccaggcaccaactgcagctggtacattcaaggtgaccgtggtgacatgatcaccatcagtttccgaaactttgatgtagaggagtctcaccagtgttccctggactggctcctgctgggcccagcagctccccctcgccaggaggccttccgcctctgtggttcagccatcccaccagccttcatctctgcccgtgaccacgtctggatcttcttccactcagacgcctccagttccggccaggcccagggttttcgcctctcctatatccgagggaagctgggtcaggcatcctgccagacagatgagttccgctgtgacaacggtaaatgcttgcctggtccttggcagtgcaacatggtggatgagtgtggagatggctcggatgagggtaactgttcggcacctgcctcagagccaccaggcagcctgtgccccgggggcaccttcccgtgcagcggagctcgctccacacgctgcctgccggtagagcggcgctgcgacggcacccaggactgcggtgatggctctgatgaggctggctgccccgacctagcatgtggccggcggctaggcagtttctacggttccttcgcctccccagacctgtttggtgccgcccgtgggccttcggaccttcactgcacatggctggtggacacgcaggacccgaggcgtgtgctgctgcagctggagctacgactgggttatgatgactatgtccaggtgtatgaaggcctgggcgagcgtggggaccgtctgctgcaaacgctttcctaccgcagcaaccaccggcctgtgagcctggaagcagcgcagggccgcctcactgtggcctaccatgctcgcgcccgcagtgctggtcacggcttcaacgccacataccaggtgaagggctactgcctcccatgggagcagccgtgtgggagcrgcmgcragggagatgacggcagcacaggggaacagggctgcttctcagagccacagcgctgtgatggctggtggcattgtgcgagcggccgggatgagcagggctgtccagcatgccctccggaccagtatccctgtgagggtggtagcggcctgtgctatgcacctgccgatcgyygcwmswrccrgaaaagctgccccgatggcgccgatgaaaagaactgcttttcctgccagccgggcaccttccactgtggtacgaacctgtgcatctttgagacatggcgctgtgacggtcaggaggactgccaagatggcagcgatgagcacggctgcctggctgccgtgccccgcaaggtcatcaccgccgccctcattggtagcctagtatgcggactgctgcttgttattgccctaggctgtgccttcaaactctactccctgcgcacgcaggagtacagggcctttgagacccaaatgacacgtttagaggctgagtttgtgcggcgcgaggcgcccccatcctacggtcagctcatcgcacagggcctcataccacccgttgaggattttcctgtctacagtgcatcccaggcttcagtgctacagaaccttcgcacagccatgcgacgacagatgcgtcggcatgcctcccgcagggggccatctcgtcgcagactgggccgcctctggaacaggctcttccaccggccacgggcacctcgaggccagatcccactgctgactgccgcccgtacctcacagaccgtgctgggtgatgggctcctccaggcagcaccagggcctgtaccagaccccccagtgcccaatacagacacaggcagccccagggaggctggagatgggcctcctagtggctctggccatgcaccagaagtggggccttcagtgccgcccccgcccttgaaccttcgagacccagagtacaggccagaggacaaggagagaaaggcctgtgtggaccctctggaagacagtccagcccctgtggacacacctccagagccstgcttggcccaagacccccacccccagactcccactgccagtggcatccaagatccccactcagcagagccactgggggtctgcaggagccctccacsarsctgctccccaatattggaggctagtgatgatgaggccctgctggtctgctgacccattggacacactggtgactgccacagccccgctttggaaccagggaatacacagtcatttctammmwrmmwmwrmawwmtttcttacagagacccacctagcagctccggtgaagggcctgggcactcagtcagtgggctacctgtgcagtcctattgctctgaagggcattactgtcaggggcttcgggggtggacctgggaaagagggaccgaccacctttgagatcagcatgagcatagccccttggagtctcacagcaaattgctccctgctacactaatctcgggactcatttccagaaaagcaggagagccagaaccaggctttccggaatgttttctgtggcttctcagtttatccaccctgcagtggcaccagctgctcatcctcagacctgtgccaggagctgtagttgaggcctaaaaaggccatgagaggggtagggtggacctcattcatggtgagtactatattcatccttccccacagggtccctaggaaagatgggctagtggcttctgccccagtctcatgcctatggtggcagcataggcctggctaggctgggtcagtccccaagtatcatgggtaaggctaaaagtatgagataggatgaccacaagagaggccattctatgccttcaaaggagacagaagccaaggtactggctgacaatggaaataaccattctktcttgcctcagagtctcagtttccccacctgaagagagggctgtgctatcataagtaatagcattcactctggtgatttatgggaaggacagtagttcagctggggaatttctgggttcttctggatggcmaagttmaaggtggcgtggagggttatggatggagcctmattgtcttctatgggccccatggagccagcctcaggttcaaccagcaaaacccactagggctgaaaacctcctccatagcaccttcccagctagcaacccatataccgygctgaggcaygtctyywtkwwytyyyhykwbdcacagaacaaccagccctgtttatttacagacttttctggagaagctagcagggcattgctaaggcaggaagcccgaccccagtggccagtcccttacaataggcctytaagggtcgggtctctttttttgtgcagaaaaaaaaatttttgaaaacaaaacagaacasaaaccccttctcaataaacaacatgtdaacagaawmarmwrhwmmarhmtctactaggtctcattgtgtcttcaagggcttgtccgtgatgggcaatggggagggctggcccatggggccattttcctcctcctccagggagccctgggggtaaaccacgaaacacagctcctg

SEQ ID NO: 473 - DNA, 5990 bp, Rattus norvegicus
gaggaagcaaagaccgggcaaaacacatgaaggaaaatttggaacttcttttataatatcaacaagacatttggggccaaataaatcctctccgttacacaaaaccaaaaatggcatacaattggcaaacagagccaaaccgtgctgaaccacaggaaggtggacatgatcaccagcagtgtcaccatgcagaccagcacctttcttccaggcaagtcaggttgggttttgatcagcttgtggaagagctcagtaacaaaactccactgcctgaggatgaaaaagaaggcacgtgttttgtaccagatacaccaaacttggattcaaaatggcaatccatatatggaccccacccaaggcacttcaatgaattcacttctcagagtccccacttctcccagcttccttttggaaaagcatcagccattggttttaatcctgctgtattacctgcacatcagttcattcatgagggagcctcctggagaaatcccacaagaaaatatcatggtggtgaggatcccaggttcagtgctctaactccgtcatccactggcttggataaatgtcatcaacaaggacaatcagggaccgaacattgtaactattatgtggaacctgaaaacaatgttccccatcattattcaccctactcaatggactccatacccgatagtgaggaaaaaggaagtggagatgcggatcttgtagaaccttctctggtgttctctaaagactcctttctacccagggcatcggagaacatgtcagtggaaagcacagagcccattggttgcccccttgaaatagttgaagcaccccaagggagtaacaagagcctcgcctccttttgcaacaatgtaacaaaaataagaggactatatcatgcaagtgacactaattccaattccggaaagatctgggccatcaccacagcctatccatctcggctcttcgctgacacccagttcagagttaaaatttccactgataactcggcacaacttcttcttcttaagccacccgctaattatcttgtcaaagacctaattgccgaaattctacttttatgtgcaaatgagcagctttcccccaaagagtatcttctaagtatatgcggttctgaggaatttttacagacggatcactgtctagggagccacaaaatatttcagaaaagtaaatctgtcattcaactccatctccagagaagcagggacactccaggaaaattatcccggaagagggatgatgaccgcagtcgggtccatctgaaccaacttctagaatttacacatatttggaaaatatccagacaatgcctctccacagtaatgaaaagctacaacctccatgtcgagcacctgttgaaaacccaggaagatgtggaggagaaacctctgtcatccatgttttcctgtggccgacaccctcctcagccacatgggaatgacattattgaagatgttagaaacatatgcagtgttctggggtgtattgaaaccaaacaagtttcagatgcagtaaaagaactaactctaattctgcagagaccatcacagaattttcatcagaattcagagacttcaaaaaaaggcttcatagagaacgtgacatcggaactgtcgaggtccctccatcagctggttgacgtgtactgcagtagcttttgtacagatttccggcctgcgcgcgcacctggaggcgtctcccgcgaccacgctgggctccactcccacctgagcttcacggtgtgttccctgcacaatgttccagaaacttgggcacacagctacaaagcattttcattttcctgctggctcacatatgctgggaagaagctgtgccaagtgaaaagctgcagatccctgccagtcacaaagtcattctctttttcggtgaactggaatgaaataatcaattttcctcttgagataaagtcacttccaagagaatccatgctcgttataaagctgtttgggattgacagtgccacccacagcgcaaatctgctggcctggacctgccttccactatttccaaaagaaaagtctccgctggggtctaggcttctcagcatgacactacagagtgagcctcctatagaaatgatggctccaggagtatgggatgggagccagcctaccccactgaccctgcagatagattttccagctgccacgtgggagtacgtgaaacctgagactgaagagaacagaactgaccaccaagagcctccaagagagtgtttaaaacacatcgccagactctcccaaaagcagcctcccttgctactttctgtggaaaagaggagatatttgtggttttatcgtttctactgcaacaatgagaactcctctctccctctggtcttgggcagcgcccctggttgggatgaagggacagtttcggaaatgcatgccgtcttgagaaggtggacattttcccatccgttggaagctcttggccttttgacttccaggtttccagaccaagacattcgtgaagttgccgttcaacagttagacaacttcttgaccgatgagctgctggactgcctcccacagctagttcaggctgtcaagtttgagtggagtctcgaaagtcccttggtggaactcctgcttcatcgatccttgcaaagcatccgagtggctcaccgcctgttctggctgctgcgggatgcacaaggtgaagactactttaaaagctggtaccaggagcttttggccgctctccagttctgtgcaggagaagccctgatcgaagagctttccaaagagcagaaacttgtcaaactcctgggtgatattggagaaaaagtgaagtcggctggcgatgctcagagaaaggatgtgctaaagaaggagattggcagtctagaagaattctttaaagatataaagacttgccatcttcctctgaacccggccctgtgcgtaaaaggaattgatcgggatgcatgttcatatttcacatctaatgccttgccattgaagatcactttcatcaatgctaatccaatgggcaaaaatatcagtgttatttttaaggccggcgacgatcttcggcaggatatgcttgttctgcagattattcaagtgatggacaacgtttggcttcaggagggcctcgatatgcaaatgatcatttatggatgtctagccacaggaaaggctcaaggattcatagagatggtgcctgatgctgtaacgcttgccaagatccatctgcactctgggctgataggacccctgaaagaaaacaccatcaagaagtggttcagtcagcacaaccacttaaaggaagattatgaaaaggccttgaggaactttttttactcttgtgctggctggtgtgtggtgacattcatcttgggagtctgtgaccgacataatgacaatatcatgctgacaaagtcaggccacatgtttcatattgactttggaaaattcttgggtcacgcacaaacatttggcggtataaaaagggaccgagcgcctttcatttttacttcagagatggagtactttattacggagggtgggaaaaacacacagcattttcaagacttcgtggaactctgctgcagagcctacaacattgtgaggaagcacagccaactgctcctgagccttctagaaatgatgctgcatgccgggcttcctgagctgagggggattgaagacctgaaatacgtacacgacaatctccggccacaagacacagacctggaagccacaagtcattttaccacgaagataaagcagagtctggagtgcttcccagttaaactgaataacctgatccacacgcttgcacagatgccagccttcagccttgccagacctgcccctcagactcctccccaggagtgctgcgtcctgaataaaaccaggacaattcagagagtcacaattttagggttcagcaagacacacagcaacctgtacctgatcgaggtgacacgcagcgacaacaggaaaaacctggccaaaaagtccttcgagcagttttacagacttcacagccagattcagaagcagttccccttgttgactctcccagagtttcctcactggtggcatctacctttcacagactcgcaccatgagagaatccgagatctgagtcactacgtggaacaggtgctgcacggatcttacgaagtcgcaaacagtgattgtgtactcagtttttttctctctgaacatatacaacagacccttgaagactctccatttgtggacccaggtgaccattctccagacaagagcccccaggtgcagttgctgatgacctatgaggacacaaagctcaccatcctagtgaaacacttgaaaaacatccatctcccagatggctcagcgcccagcgcacatgttgaaatttatcttctgccacatcccagtgaagttcgcaggaagaaaacaaagtgcgttccaaaatgcactgacccaacttacaatgaaattgtggtatatgatgacgtctcaggacttcagggacatgttttaatgctcattgtgaagagcaaaactgtatttgtgggagcggttaacattcagctctgcagtgttcccctcaatgaagaaaagtggtacccattagggaacagtatcatctgaccaatgccatgaatgtakgcattattgattaagtacttgtgtgttttcagcttccatttcccctatagcatacacaaggcatctttcttgcggaagatggcttggagcagtggttctcactcagcgtccctaacactgcgaccctttaatacaattcctggtgattgtagtgacccaaaccacaaaattattttagttgctatttcacaactgtaattttgacacggttatgaattgcaatgtawatatctgatctacaggatacctactattcgacccctgtgataaaagggtcattggacaatcccaaagggtcatgactcatgggttgagaaccacaggcttagagtggtcacagaagaagcagatcaaaatcagtcttttgtagctctttcttctctaccttctccttattttcttatcatattttctccttggaatattcatcatggaaaatcccatatgcaaagtcatgaaagaatgattcatttaatatgcatttttgaatcaaactaagttcatgtcttgccttaattgcttgttgaggtcaaaattatacttttagggtgttttctaaagctaggagaagctcatgtaagggttaagaatatttgcaatatatttcaaaagttaaatatgtgtacaagccacatatctagtcatgattgaatttattgagagaattggtgatctccaaccatgtgctataatttttctatcaaaaaaaaatccctaagatttttctattgcatagattttttttctttaagaatttcatgcatgtatatagtgctttcgttattgtagcttctctcttttttagttgtccccacacccatcaacaactgttcttctctaaaactcctgtattcctgtggggagttttatttttaagatgggcatcaaactatatatcccagctgacctagagcttgctatgttgaccaggtgggccccaaatcacagtggtcctcctgcctctgtttcccgaccgctaaggttccaggtcattggatcttgtctgtaatttttaagttcagttcttagaatttgatattgatcaatccagtgtcattgtgtcttccagcctckgtcatgttcacaccttaaatcttattaatctccaaacccaaaatatccaacttttaagttcaccatttaaaacgcctctttgcgtgttaaatactctcactgcacttgaaccaacaccttgtgytcgcacggaccagatagatgatctcacagtttgtcacctgtgtaacaggcaaacccagaggaygcctccaagataatcaaactggaggtttcaaaaataaaacatctgccataaaaaaaaaaaaaaaaaaaaaaaaaaaaaaaaaa

SEQ ID NO: 474 - DNA, 3126 bp, Rattus norvegicus
cgcaagccggggagcgctcggcccagaattagtggatggatttggaatctccctgcctcctccaagctccgccactgccactttaggcagagacctgagcgtcaacacgcgagccgtacttttaggctgcggacactgagcccagcgcgccagcttcgcatctccgcaccaggctccacagctcggagaggcatgaacgcgatccggaggagactaccctgcgcgcggggatccgtggacattagccgctctcgggaactgacccccagctccttcagccatttatgaatccagaggcttgagatttttttccgcatcccggagcccgacctgagaaatttcaatgaaaaggaaagtcaatggatcgtggtgttggaaaagctgcttagacatgtctgtttcccggctctctgaacccgtggcagagctgtaagtaagcgcttcacagtgcgtgatgaattggatggcttcggacccgaggcaaaaaaaataattgtctcattttcgtgctgatttgcttaactggtgggaccatgccagaaaggctagctgagacgcttttggacctctggactccattaataatattatggattactcttccctcttttgtgtacatggctccgatgaatcaggctcacgttttaactactggatcccctttggaactaagcaggcagagtgaagaaatgcggattttgaaccgctccaaaagaggttgggtttggaatcaaatgtttgttctggaagaattttctggacctgaaccgattctcgttggccggttacacacagatctggatcctgggagcaaaaaaatcaagtatatcctatcgggtgatggagccggcacaatctttcaaataaacgatataactggagacatccatgctatcaaaagacttgaccgagaggaaaaggctgagtatacgttaacagctcaggcagtggactgggagacaaacaaacctctcgagcctccttctgaatttattattaaggttcaagacatcaacgacaatgcccccgagtttctcaatggaccttaccatgctactgttccagagatgtccatcttgggtacatctgtcactaatgtaacggccactgatgctgacgatccagtttatggaaacagtgcaaagttggtttacagtatcttggagggacagccgtatttttccattgagcctgaaacagctattataaaaactgcccttcctaacatggacagagaggccaaggaggaatacctggttgtaattcaagccaaagatatgggtgggcattccggtggtctgtctggaaccacgacactcacagtgacgcttaccgatgtgaatgacaatcctccaaaatttgctcaaagtttgtatcacttctcagtaccagaagatgtggtccttggcactgcaataggaagggttaaagccaatgaccaggatattggtgaaaatgcacaatcttcctatgacatcattgatggagatgggacagcactatttgaaatcacttctgatgcccaggcacaggatggtgttataagactaagaaagcctctggactttgagaccaaaaaatcctatactctgaaggtggaggcagccaatatccacatcgacccacgtttcagtggcaggggaccctttaaagatacagcaacagtcaaaattgttgtagaggatgctgatgagcctccggtcttctcttcaccgacttacctccttgaagttcatgaaaatgctgccttgaactctgtgattggccaagtgacagctcgtgaccctgatatcacttccagcccaataaggttttccattgaccgccacactgacttggagagacagttcaacatcaatgcagatgatgggaagataacactggcgaccccactggacagagaactaagtgtgtggcacaacatctccatcattgctactgagatcaggaaccacagtcagatatcgcgagtgcctgttgctattaaagtgctggatgtcaatgacaacgcccctgaattcgcgtccgaatatgaggcatttttatgtgaaaatggaaaacccggccaagtcattcaaacagtaagcgccatggacaaagacgatcccaaaaatggacattttttcttgtacagtcttcttccagaaatggtcaacaacccaaatttcaccatcaagaaaaacgaagataattccctgagcattctggcaaaacataatggattcaaccgccagaagcaagaagtctaccttctgcctatcgtgatcagtgacagtgggaacccccctctgagtagcaccagtaccctgaccatccgcgtctgtggctgtagcaatgacggcgtggttcagtcgtgcaatgtcgaaccttatgtccttcctattgggctcagtatgggcgcgttaattgctatattagcctgcatcattttgctgctcgtcattgtggttctgttcgttaccctgaggcggcataaaaatgaaccactaataatcaaagatgatgaagacgttcgagaaaacatcattcgctacgacgacgaaggaggcggggaggaggacacagaggcttttgacattgcaactttgcaaaacccagatggaattaatggatttttaccccgtaaggatattaaaccagatttgcagtttatgccaaggcaagggcttgctccagttccaaatggtgttgatgtcgatgaatttataaatgtaaggcttcatgaggcagataatgaccccacggccccaccatatgactccattcagatttatggctatgaaggccgagggtctgtggctggctctctcagctcgttggagtccaccacatcagactcagaccagaattttgactacctcagtgactggggtccccgctttaagagactgggcgaactctactctgttggtgaaagtgacaaagaaacttgacagtggattacataaataatcaatggaactgagcattctgtaatattctagggtcactccccttagatgcaacaaatgtggctatttgttttagaggcaagtttagcaccaatcatctataaactcaaccacattttaatgttgaaccaaaaaaaataataaaaaataaaagtatatgttggaggtgaaaaaa

SEQ ID NO: 475 - DNA, 5189 bp, Rattus norvegicus
ggcttcttctagctggggttgagctgaactgagatcccaagaccagcggtgcaccagagccacatggaccgcttgtgcggctccggggagctgggctccaagttctgggactccaacctgactgtatataccaacactccagacctcacaccctgtttccagaactccttgctggcctgggttccctgcatctatctgtgggctgccttgccctgctacctgttctacctgaggcaccatcggcttggctacatagtcctctcatgcttatccaggctcaagacggccctcggtgttctgctgtggtgyatctcatgggtggacctgttctactccttccatggcctggttcacggctcatcccctgctcctgtcttctttatcacacccttgttggtggggatcaccatgctgctggccacattgctaatccagtatgagcggcttcggggcgtgcggtcttcaggtgtgctcatcatcttctggctcctgtgtgtgatctgtgccatcatccccttccgttccaagatcctcttggctttggcagagggtaaaatcttggatccgttccgattcaccactttctacatctacttcgccctcgtgctgtgtgccttcatcctgtcctgcttccaggagaagccgcctttgttttccccagagaatcttgacacaaatccttgcccagaggccagcgctggcttcttctcccgtctgtctttctggtggttcacaaagcttgccatccttggctaccgacgtcccctggaggacagtgacctctggtctctgtctgaggaggactgctctcacaaggtggtacaacggctactggaagcatggcaaaagcagcagacccaagcatcagggccccagactgcagcccttgagccaaagatcgcaggtgaggatgaggtcctgctgaaggcccgccccaagaccaagaagccttcctttctgagggctttggtgagaaccttcacctccagcttgctcatgggtgcctgcttcaagctgatccaggacctgctctccttcatcaacccacagctgctcagcatcctcatcaggtttatttctgaccccacggcccctacctggtggggcttcttgctggccggactgatgttcgtgagctccaccatgcagacattgatcttacaccaacattaccactgcatctttgtgatggccttgaggatacggactgctatcataggcgtcatctacaggaaggctctgaccatcaccaactcagtcaaacgtgagtacactgtgggagaaatggtcaacctcatgtcggtggacgcccagcgcttcatggatgtctccccattcatcaacctgctgtggtctgcacctttgcaggtcatcctggcgatatacttcctctggcagatcttaggcccatcagccctggctggggtggctgtgatagtcttgctgataccactcaatggagctgtgtccatgaaaatgaagacctaccaggtacagcaaatgaagttcaaagactcccgcatcaaactgatgagtgagatcctgaatggcatcaaagttctgaagctgtacgcttgggagcccaccttcttggagcaggtagaaggaatcaggcagggtgagctccagctactgcggaagggcgcctacctgcaggctatctctaccttcatctgggtctgcaccccgtttatggtgaccctgatcaccctcggggtgtacgtgtgtgtggacaagaacaatgtgctggatgctgagaaggccttcgtgtccctgtccttgttcaatatcttaaagatccccctcaacctgctgcctcagttaatcagtggcatgacccagaccagcgtgtctctgaaacggatccaggatttcctgaaccaagatgaacttgacccccagtgtgtggaaagaaagaccatctccccaggccgtgccatcaccatacacaacggcaccttctcctggtccaaggacctgcctcccacccttcacagcmtaaacattcaaatcccgaagggggcattggtggctgtggtgggacctgtgggctgtgggaagtcttccctggtgtctgccttgctcggagagatggagaagctggaaggtgcagtgtctgtaaagggctctgtggcctacgtgccccagcaggcgtggatccagaaytgcacacttcaggaaaatgtgctatttggccaacccatgaaccccaagcgctaccaacaggctctggagacgtgtgccctgctagctgacctagatgtgcttcctggtggggaccagacagagattggagagaagggcattaacctatctggaggccagcgacaacgggtgagtttggcccgagctgtttatagtgacgccaacatttttttgctggatgacccactgtcggctgtggactctcacgtggctaagcatatcttcgaccaagtgattggaccagaaggtgtgctggcaggcaagactcgggtgctggtaacccatggcatcagcttcctgccccagacggactttatcattgtgcttgctgacggacagattactgagatgggtcactactccgaactcctgcagcacgatggctcctttgccaacttcctccgaaactatgcaccagatgaaaaccaggaggccaatgaaggagtcttgcaacatgcaaatgaggaggtgctcctgcttgaagacacactcagcacccacacagacctgacagacaccgagccagccatatacgaggtccgcaagcagttcatgagagagatgagctccttgtcttctgaaggagagggccagaaccggcctgtgctcaagagatatacgagttcactggagaaggaggtgccggcgacacagactaaagagactggtgcattaatcaaagaggagatcgcagagacaggcaatgtgaagctgagcgtgtactgggattatgccaagtctgtggggctctgcaccacgctgtttatctgcctcctgtatgctggccaaaatgcggttgctatcggagccaatgtgtggctcagtgcctggaccaatgatgtggaggaacatggccagcagaacaacacctccgtaaggctgggagtctacgccaccctaggaatactgcaagggctcctggtcatgctgtcggccttcaccatggtggttggcgctatccaggctgcccgcctgctgcacacagctctgttgcacaaccagatccgtgcgcctcartccttctttgacacgacgccctcaggccgcatcctcaatcgtttctccaaggacatatacgtcatcsatgaggttctggcccccaccatcctcatgctgttcaattcattctacacatccatctccaccattgtggtcatcgtggccagcacgccactcttctgcgtggttgttcttcctctggctgtgttctatggcttcgtgcagcgcttctatgtggccacatcgaggcagctgaagagactggaatccgttagccgctcgcccatcttctcccacttctcggagacagtaactggcaccagtgtcattcgggcctacggccgagtccaagacttcaaggtcctcagtgatgctaaggtggatagcaaccagaagaccacttatccttacatcgcctccaaccggtggctgggtgtccacgtggagtttgtggggaactgcgtggtgctcttctccgcgctgtttgcagtgatcgggagaaacagcttgaatccagggcttgtgggtctttccgtgtcctatgccttacaggtgaccttgagtttgaattggatgatacggacgctatccgacctggagtctaatatcatagccgtggagagagtcaaggagtactctaagacggagactgaggctccctgggtgttggagagcaaccgtgctccagaaggctggcccaggagtggggtggtagagttccggaactattcggtgcggtaccgcccgggcctcgagttggtgctgaagaatttgactctgcatgtgcagggtggggagaaggtaggcatcgtgggccgcactggggctggcaaatcttccatgactctttgcctattccgaatcctggaggccgcagagggtgagatcttcattgacgggctcaatgtggcacacattggcctccatgacctgcgttcacaactcaccatcatccctcaggaccccatcctgttctcgggcacgctgcgcatgaacctcgatccctttggccgttactcggacgaggacatctggaggaccctggagctatcccacctgagtgcatttgtgagcagccagccgacaggcctggattttcagtgctctgagggtggggataatctcagtgttggccagaggcagctcgtgtgcctagcccgagccctgctccgaaagagccgtgtcctggttttagacgaggccaccgctgccattgacctggagactgatgacctcatccagggtaccatccgtacccagtttgaagactgcactgtactgaccatcgcccaccggctcaacacaatcatggactacaaccgggtcctggtcttggacaaaggagtagtagctgaatttgattctccagtaaacctcattgcagctggaggcatcttctatgggatggccaaagatgcaggactcgcctagaatctgcattccaaaggtttcttccytgtctgaatcggacagcaagtagctgcagcatggatttgatggcaacgagtggggacatttgagttggttttggttttttttygttttttgttttttttttttttttaaattctgcaaattgccttacagactagccatacttaacagtggaatgaggaagtgggtccttggaggtcacagccagttcacagccaagttcagaccagtccctgggtctcctagacctagtctaccattattcccgtactgcatttttttttggttctttttttcagagctggggaccgaacccagggccttgcccttcctaggtaagcgctctaccactgagctaaatccccagcccccgtactgcagtttttaagagaccctgctcctgcctctacatattcatagtttccaattttttttttaaatgagcctttctccttctggaccagggacwgcyaggtcagtctgtccggggaacagaatccctggttggtgctgtctgaatccactgacgaaataaagccatgagcagcagc

SEQ ID NO: 476 - DNA, 1974 bp, Rattus norvegicus
ggaaacttggtcattctagcagcayagmcyswcgaactgagarctgrycatgscacggaamcaacyrcatagctggctgaatgctgtgctctttgggctsctgcttmttcttatycatgtgyrgggtcaggactcaccrgagtccagcyccatcaggaccacacacackggccakgtccraggmaagctygaccacgtgarggacactaaagctggtgtccacaccttcctgggaattccctttgccaagsctcctgtaggaccgctgcgctttgcacctcctgagsmmcctgagccatggagtggtgtgagagatgsgacctcacakccggccatgtgtctgcaaaatmttgatatkctggatgaagtaggcctgmyrgatatgaaaatgatactgtcttccattyctatgtctgaggactgcctgtatctcaayrtctatrcaccagcccatgcccrtgakggctctaacctgcctgtgatggtgtgsatycacggaggtgcrctggttrtaggaatggcttccatgtrtgatggatctctattgrcagtcaatgaggacttggtggttgtcrctatycagtatcgtctgggtgtcctgggctttttcagcactggagatgagcaygccagaggcaactggggatacctggaccaagtggctgccctrcgwtgggtccagcagaatatcgcccattttggaggcaaccctaaccgkgtcactatytttggcgwgtctgcaggtggcacaagtgtgtcttcacatgttatatcccccatgtctcaagggctcttccatggtgccatcatggagagtggagtggccctgctgcctgaccttatctctgaaacctctgaracggtctccactacagtggccaagctctctggatgtgaggcyayggactcagagrccctggtgcgctgcctgagagcsaagaktksagcakwgaytctkgtmatymacmaggtcttcaagatgatycccgctgtggtggatggagagttcctacccaggcatcccaaagagctgttggcatctgaggattttcrccctgtccccagcatcattggtgttaacacwgatgagtactgttgcaccattcctatggtsatgggcacwgytcmaatmmtmwmggagcyatscagagagwaymtgmakgctgttctaaaggatacagcagcacaaatgatgcttcctcctgagtgtggtgacctgctmatggaagagtacatggggaayactgatgatycccagaccctacaaatacagtacrcwrakatgmwgrraracttcmkgtwwgwgatmmctrcavtccwmktwgymcmstytcmrsgttcccatgcccctgtctayttctatgagttccaacatgcacccagctatttcaagaatgtcaggccaccccacgtgaaggctgaccatgctgatsaggttccttttgtctttgggtccttcttytsgggcatraaasktgacttcaytbwkkwskagarrcwkvwgakyaggmbbwkgatkawgtwctgkbycwrbttkgcaakmcasrggaaccccaacagcgagggtytaccctactggcctgyrttggaccacgaygagcagtacctgcagttggacacccakcctgctgtggaccgagccctkaaggccagaaggctgcagttytggaccaagactytgccccaraagatysaggagstaaatggagctcaraaaaaccatgcagagctgtagtgtytggtkaaakgaacaragtgtgggagtdagggcaggtgggatcattytgagtttcaaagtctaattttytgttccaacackcagaatcctttccaaycccaatattttccctttyyracatgaatgaraagcccyccrtgtgttactytttattyttyygrgcaaamtttaattggactcaataaaagttcccataatagtgtggwtatatgaammmwaaaaaaaaaaaaaaaaaa

SEQ ID NO: 477 - DNA, 1444 bp, Rattus norvegicus
ccagacaggctagccggttcactacttgagccagtgcctccgagtcctcaccccaccataaggctgtaactcgagccgtccgccgcccacccccttcccactccgcmcsagstckgcgatcsaggtccctacgtcgcgcggccccttgtggccctaactcgactgcaaatctgccatgggctggcgggcctgtctccgtccggaggcgtccggcgctgtacagggccgctggttgggggctgtcctgagcgggttgtgtcttctctccgcgctggcgttcctggaatggctagggtcgccgacagagaccgcctggaatgcagctcagggaaatgtggatgcgccagatgtgggcggctccactccccaggtacccagcctattgtccatgctggtaacccgaagacgccgctacacgctgacaccggccaggctgcgttgggaccacttcaacctcacgtacaggattctctcctttccccggaaccttttaagcccggaagagactcggcggggcctggcggctgcctttcgaatgtggagtgatgtttccccattcagcttccgtgaggtggcccctgaacgtcccagtgacctcaagataggtttctacccagttaaccacaccgactgcttggtctctgccctgcaccactgcttcgatggtcctacaggtgaactggcccacgctttcttcccaccccacggtggcattcattttgatgacagcgagtactgggtcttgggtcccacgcgctacagctggamgmrmkryrkttggmwsamagacytggkgcacgtggcagcccatgagattggccatgcactggractgatgcactcacagcaagaccaggcactcatgcacctcaatgccacattgcgaggctggaaggcactgtcccagratgagctgtggggactacaccgactctatggctgmctggrmckgatywytswswgyamrwccwgggcacgaaagggattttgtgatgtccgccagaggctcatgaagaggctctgccccagaagctgtgatttctgttacgaattcccatttcccacggttgccaccaccacatcacccaccagaacgaaaacgaggttcgtgagagagggtaggaacatgaccttccactgtggacagaagatcctacacaagaaaggcaaagtatactggtacaaggaccaggaacccctggagttctcctaccctggctatctggccctgggtgaggcacggctgagcatcattgccaatgcagtcaacgaaggcacctacacatgtgtggtacgccaccgccagcgtgttctcaccacctactcctggagggtccgagtgaggagctgagccagctccagcctctgtgctggaagccagcagataaagcactttctctctgaaaaaaaaaaaaaaaaaaaaaagaaaaaaaaaaaaaaaaaa

SEQ ID NO: 478 - DNA, 5972 bp, Rattus norvegicus
gctggacgccgtatgtactgggtggacgctaagcaccacgtcatcgagagagccaatctagatgggagtcaccgcaaggctgtcattagccagggcctcccacatccctttgccatcacagtgtttgaagacagcttgtattggacagactggcacaccaagagcatcaatagtgccaacaagttcactgggaagaaccaggagatcattcgcaacaagctccactttcctatggacattcataccttgcacccccagcgccagcctgcagggaaaaaccgctgcggggacaacaacggaggttgcactcacctgtgtctacccagtggccagaactacacttgtgcctgccccaccggcttccgaaaaatcaacagccacgcctgtgcccagagtcttgacaagttcctgctttttgcccgaaggatggacatccgtcggatcagcttcgacacagaggacctgtccgacgatgtcatcccactggctgacgtgcgcagtgctgtggcccttgactgggactcccgggatgaccacgtgtactggacagatgtcagcactgataccatcagcagggccaagtgggatggaacaggacagaaggtggtagttgacaccagtttggagagccctgctggcctggcaattgattgggtcaccaacaaactctactggacagatgcaggtacagaccggattgaagtggccaacacggacggcagcatgaggacagtgctcatctgggagaaccttgatcgtcctcgggacatcgtggtagaacccatgggcgggtacatgtattggactgactggggtgcaagtcccaagattgaacgagctggcatggatgcctccaaccgacaagtcatcatctcttcgaatctgacatggcctaatggattagctattgactatgggtcccagcggctgtactgggctgatgccggcatgaagactattgaatttgctgggctggatggcagcaagaggaaggtactaattggaagtcaactcccccaccctttcgggctgactctatacggacagcgcatctattggactgactggcagaccaaaagtatccaaagtgctgaccggctgactgggctagaccgggagactctgcaggagaacctggagaatcttatggacatccatgtcttccaccgccagaggcctccagtgacgacaccatgtgctgtggagaatggcggctgcagccatttgtgtcttcggtccccaagtccgagcggcttcagctgtacctgccccacaggtatcaacctgctgcttgatggcaagacatgctcaccaggcatgaacagtttcctcatcttcgccaggaggattgatgttcgcatggtctccttggacatcccttattttgctgatgtggtggtacccatcaacatgaccatgaagaacaccattgccattggagtggacccgctggaaggaaaagtgtactggtctgacagcacactgcacaggatcagccgtgccagcctggatggctcacagcacgaggacatcatcactacaggtttgcagaccacagatggacttgcagtggatgccatcggccggaaagtgtattggacagacacgggaacgaatcggattgaagttggcaacctggatgggtctatgcggaaagtgttggtgtggcagaaccttgacagtccccgggccattgtgctataccatgaaatggggttcatgtactggacagactggggggagaatgccaaactagagcgttccgggatggatggctcagaccgtactgtgctcatcaacaacaacctagggtggcctaacggactgactgtggacaagaccagctcccaactgctgtgggctgatgcccatactgagagaattgaggtggctgacctgaacggtgccaatcggcatacattggtgtcaccagtgcagcacccatatggcctcactctgcttgactcttacatctactggactgactggcagacccgtagcatccaccgggccgacaagagtactggcagcaatgttatcctcgtgaggtccaacctgccaggcctcatggacatccaagctgttgaccgggcacagccactgggttttaataagtgtggttcgagaaatggcggctgctcccacctctgtttacctcggccctctggtttttcctgtgcctgccccactggcattcagctgaagggggatgggaagacctgtgacccctctccggagacctacctgctcttctctagccggggctccattcgccgtatctcactggacaccgatgaccacacagacgtgcatgtccctgttcctgggctcaacaatgtcatctccctagactatgacagtgtggatggaaaggtctattacacagacgtgttcctggatgttatcaggcgagcagacctgaatggcagcaacatggagactgttattgggcatgggctgaagaccactgatgggctggcagtggactgggttgccagaaacctgtactggacagatacaggccgaaataccatcgaagcatctcggctagatggttcctgtcgcaaagtgctaatcaacaacagtctggacgagccccgggccattgctgttttccccagaaaggggtacctcttctggacagactggggccacattgccaagattgaacgggcaaacctggatggttctgagaggaaggtcctcatcaatgcagacctaggctggcccaatggccttaccttggactatgatacccgcaggatctactgggtagatgcacatctggatcggattgagagtgctgacctcaatgggaagctgaggcaggtcttggtcagccatgtgtcccacccctttgccctcacacagcaggacaggtggatctactggacagactggcagaccaaatccatccagcgtgtcgacaagtactcaggccgcaacaaggagacagtgctggccaatgtggagggactcatggatatcatcgtggtgtcccctcaacggcagacagggaccaatgcctgtggtgtgaacaatggtggctgtagccacctctgctttgccagagcctctgactttgtgtgcgcctgtcctgatgagccagacagtcatccctgctccctcgtgcctggcctcatgcctcctgctcccagagctaccagcctgaatgaaaagagcccagtgctccccaacacattgcccaccaccttacattcttctaccaccaggacccgcacatctccagagggggcagaaggaagatgctctgaaagggacgcccagctgggcctctgtgcacattccaatgaagctgtacctgctgctccaggtgaaggactgcatgtcagctacgccgttggtggactcctcagcgtcctgctgattttgttggtgactgcagctttgatgctatacagacacagaaaatccaaattcacggatcctggaatgggaaacctgacctacagcaacccctcctaccgaacttccactcaggaagtgaaaattgaagcagctcccaaaccagccatgtataatcagctgtgctataagaaagagggtggacctgaccacagctacaccaaggagaagatcaagattgtagagggaattcacctcctggctgggcatgatgctgaatggggtgacctcaagcaactgcgcagctccagggggggccttctacgggatcacgtatgcatgaagacagacacggtgtccatccaggccagctctggctccctagatgacacggagacagagcagctgctgcaggaagagcagtctgagtgtagcagtgttcacactgcaaccactccagagagacggggctctctgccagacacaggctggaaacatgaacgcaagctctcctcagaaagccaggtctaagtgcccacattctcttccctgcctgcctgttcgttcttctctgtggacttctgatccttgtgctcacaaagcaacgggccctttcccgtgcactcatcttcctcctcccacccaaaagtgttcccacgaccccatagaacctgttactcacctgagtctgaaactacctggggacaagaagtgagggcacatctcaagaatttagacctggattttaccatgaacttcacctcttgcactctatcctgggccccctgaagctgggctcagtgtaataccttgtcagcacagcatcttcctttgccctggcatcctatgtgtctgccccacggcaccgatgcaattggtgatgtaagactttggtcttccccatcacagctgacatgatggcctctctgtgaactggcctaccaggggctgggactggaggtcacaggtaaaaggtaatgaatggatagaggttgagagaaggaagaaccagcccagctggtctgggtgtttgggaaacctccagcctcaagtgttggtaattatgaaaaacctttgggggaaggcacttgagccctgggatctcgtccattgctggcagtggacgttctcacccaggtgaagtgtgggtatggcctaagttcttcttcctcctgctggaatgtctggggccactatctaccttcagtaactggaggcctctgtcatggcaactcactaataggaattccctcctggtgctgctactggccagtacttttcttaagcctttaactatgctgtgagcttgagtgaacattggtcgggccttggagagtaggcctctagaacgtttaagaagctctgcaaagatcaagaacagtatcttacctgagcctcactactctgcccttttttctcccattctctgggattctaagggaagcaattctatcacagcctttcaaagaatggctagacattttcctaaatggtcaggaagagcaactagagagacacaagacacccaggggctcaggagaagtatcgtgaggttgaacttcttgagttcattctcaggtgctcagggacccaagcctggggcactaaggtcatgtgccaactcttctcggcctctgcccacactaaagtgccaccattagctgcatgcttctttaggccaagggcttctctcaggggagctgagagtctttttgtgctgccctagaatttcatcctagtgtttcacttctgagagaggggaatctagacttgttttctctaaccgatcctgtatcaccttggtctccattgtccagtgatgagtgaggaggttcaatgaagatgcaaagtggtgagcagggagtggagaggtggtgagattaggtccagagcaagtctaggcacttctccatagaaactgaagcacaggagagattgacaggagctgaacatggaggggagggtttttaggggaagttttctgacttaaaacatctttcatggttattgctacacagagatcagcagccaggcatatgcatgaaaaacaggacaagatcaaatcttttctggtcagttattaggagtaggagacagatgtcaaaccattagtctcgttgtcactagctaggcccagacctatgtctacacatagagaaccaaggcaggccaaagsccttywcsagtacaccaactgagaaaagaacagtgccatttttaagaggaaagacagacatttcacacagamtgaggcaacatttgagcctttaaacccgtagctsggsavgaggaagaaaacaggagtgtrrtrtcctcctgagtggaaagggcaaggttcttattgcactcggrctgttcagaatgtagaaaggacgcatttgagggaawatctatttgagcastgatttactytgtaaagagggcaaaatctctmtgtcytaaastaatggaagtgattttcccatgctcatgtgtaatgatttwaacattactcactggagagattggactttctggagttatttaaccactatgtycagtattttagsgctttwtgayaatttaatataaatkkarctttytwwawwraaaaaaaaaaaaaaaaa

SEQ ID NO: 479 - DNA, 2380 bp, Rattus norvegicus
  misc_feature (1591)..(1591): n is a, c, g, or t
  misc_feature (1598)..(1598): n is a, c, g, or t
  misc_feature (1602)..(1602): n is a, c, g, or t
  misc_feature (1694)..(1694): n is a, c, g, or t
cactgmggtcstgckygmatctctctgmagcagcctccggggmtacgttccatcctatcagtctgagaccagcccagaagaaaaaaaccaaaaatccttaattatcttcttttgctcggtacctacattgggaccatcaaaaaaarattattacagtaaaccgtagccatgagggaaatcgtgcacatccaggccggmcagtgtggcaaccagatcggtgctaagttctgggaggtgataagcgatgwmcacggsatcgaccccaccggcacctaccacggmgacagcgacttgcagctggaccgaatctctgtgtactacaatgaagctacaggtggcaagtatgtccctcgagctatcttagtggmtctagaacccgggactatggactccgtycsctcaggtccttttggccagatcttcagaccggacaactttgtttttggtcagtctggggcaggcaacaactgggctaagggtcactacacagagggagctgagctggttgactctgtcttggatgtggtgcggaaggaggcggagagctgtgactgcctgcaaggytttcagctgacccaytcgctgggtggaggcacgggctctggcatgggcaccctgctcatcagcaagattcgagaagaataccccgaccgcatcatgaacaccttyagcgtggtgccctcacccaaagtgtctgacaccgtggttgagccctacaacgccaccctgtccgtccaccagttggtagagaacacagatgagacctactgcattgacaacgaggcyctctacgacatctgcttccgtacccttaagytcaccasgccaacctacggagacctgaaccatctcgtctctgccaccatgagcggtgtcamcacctgcctccgtttcccgggccagctgaacgccgaccttcggaagctggctgtcaacatggtgcccttcccgsgtctccacttcttyatgcctrgcywwkmmyckykcmcsagccgtggaagccagcagwrscgggccctcmctgtgcctkaacyywcccagcaggtyytcgahgccaagaacatgatkgscgsctgygacccrcgccmsggscggtacctcacrgttgcsgcygtcttccgtggmcgratgtccatgmaggaggtrgatgagcaratgctcmacgtgcagaayaagaatagcagctacttcgtggaatggatccccaacaaygtcaagacrgctgtytgtgacatcccaccgcgwggcctcaagatggcagkcacyttcatyggamacagsacrgccatccaggagytbttcaagcgcatctytgagcagtttmcgscwatkttccgycgrarggctttyctycahtggtamacggktgagggcmtgracdaratggagttmaccgmagytgaragcaacatgaaygacctsgtctytgrgtaycagcmgkaccasgaygyyhycgcrraaraggawraggatttsbgaraggaggcmraagarraggchtaaggcrgaagccytgcrkcasctcaggvtgmttagwtccytyagctttytkycmamtsmscyttgwttytttbwgybgccyckgkcbtgnwtktshnhhvnytbsdyyycwymtyrdvvdbbmwmybktscytggywyrtgrhaggcrmtcaataaatatttbtttgtgdawddhhdhmwwwmwmwwwmmvmnvhravrwwmwrmrcgyyaaccctgtgcttcctcctggtacccatttctttattatgactgtccagttaatattcttccaatatattctccaggaaccagcgttcrgctccagacccggggtagaacccagcccagttctaagaactcaagagagtagccaccatcttaaagcaaagtagcrggtggggaaaaggtgggtaraggagatgctacttaggggktgggattttccagtcaggsccattyrgacasgggaatcgytgrggctttcagtsgmwrrggywykhkkttttccctgyttcatctvtcggcctcaggagaggtattaacagtattatcmccatttatatcctagctgtcctgarccaaatctgccattggaggtgtcttcccctgtgttggttcyccaagggacgttgyatggggatttgtgggggcagggcagcaaggccttkttctytaaatgtccagwaacactbtamttrccmttkccambtgggtkcytcacacaytccycagaggggaggtaacatstbtgccccatttmcmtcctgttccttggcttggtcattccctacctttytattttstgktaaacttgscttttttttytttttcatattgaaaagatgacattgccccgrgagccaaaawtaawtgggawttggaaaaaammdvrwrmmaaa

SEQ ID NO: 480 - DNA, 813 bp, Rattus norvegicus
tcacgacagttgtgcctacgactacctggaggtccgagatgggcacagtgagagcagcaacctcattgggcgatattgtgggtatgagaagcctgatsacaksaaaagcacatctagtcggctctggctcaagttcgtctccgatgggtccattaacaaagctggctttgcagtcaactttttcaaagaggtagatgagtgttcaaggcccaaccgcgggggctgtgagcagcggtgcctaaacaccctgkgcagctacaagtgcagctgtgaccccggctatgagctggccccagacaagcgtcggtgtgaagctgcctgcggtggattcctcaccaagctcaatggctccatcaccagccccggttggcccaaagagtaccctcccaacaaaaactgcatctggcagttggtggcccccacccagtaccgtatctccctgcaatttgacttcttcgagactgagggcaatgatgtgtgcaagtatgatttcgtggaggtgcgcagcggactcacagccgactctaaactacatggcaagttctgtggctccgagaaaccagaggtcatcacttcccagtacaacaacatgcgtgtggagttcaagtctgacaatactgtgtccaaaaagggcttcaaggcccacttcttctcaggagggggctgtgtggacttttgggacacccatcgaggagaccctaagacaagaaggagaagcagagcctgaagaccttcagtctgaccccagcacctccggggcatttgggcactgtaggaaaagaggccagctctgcagccccctcggggacgccc

SEQ ID NO: 481 - DNA, 5308 bp, Rattus norvegicus
cccaattggtttccgcgcgcgcaaattacccactccgaagaattcacgcggccgckgaattcrcsgccgrwmrasccggggtctcgttcagagctgtcctgtcgtctgcaacctgcaagatgccagcacgaacagctccagcccgagtgcctgcacttgcctccccggcaggctcgctccccgaccatgtccgcaggcggctcaaagacttggaaagagatggcttaacagaaaaggagtgtgtgaaagagaaattgaacttactgcatgaattcctgcaaacagaaataaaaagccagctatgcgacttggaaaccaaactacataaagaggaattgtctgaggaaggctacctggctaaagtcaagacccttctaaataaggatttgtgcctggagaacggaacactctctctcactcagaaagccaacggttgtcctgccaacgggagtcggccaacctggaaagcagaaatggcagactcaaaccgatccccaagatccaggcccaagcctcggggacccaggaggagcaagtcggacagtgagaccatgattgaagcttcatctagttcggtggctacgaggagaaccaccaggcagaccaccatcacgtctcamttcaagggtcccgctaaacggaaacccaaggaagwctctgaaaagggaaacgcaaatgaatctgytgcagaggagagagaccaggataagaaacgcagagtcgcaggcacagagagtcgtgccagtcgtgccggagagtctgtggagaaacctgaacgagtaaggccaggaacccagctgtgtcaggaagagcaaggtgaacaggaagatgacaggagacctcgacgtcaaaccagagagctagcatcaaggcggaaatcaagggaggacccagacagagaagcaaggccaggaactcacttggatgtggacgatgacgatgaaaaggacaaaagaagttccaggcccagaagccagcccagagatctagccaccaaacggagacccaaggaagaagtagagcagatcactccagagcctcccgagggcaaagatgaggacgaaagggaggagaagagacgaaaaacgacacgtaaaaagccggaaccactcagcattcccgtacagagcagagtggagagaaaagcctctcagggcaaagcaagtgcaatcccaaagctcaacccgccacagtgccctgagtgtggccagtacctagatgaccctgacctgaagtaccagcagcaccctgtggatgctgtggatgaaccccagatgctgaccaatgaggcactgtccgtctttgactccaactcgtcttggtttgagacctatgattcctctcccatgcataagttcactttcttcagtgtgtattgcagtcgcggtcacttgtgtcctgtcgacactggtctcattgagaagaacgttgaactctacttttctggtgttgccaaagcaattcatgaagaaaatccgtctgtggaaggtggtgttaatggcaagaacctggggccaatcaatcagtggtggatcagtggctttgacggtggcgagaaggcgctcattggcttttctaccgcatttgctgaatactttctgatggagcccagcccagagtatgcaccaatatttgggctgatgcaggagaaaatttacatcagcaagattgtggtcgagttcctgcagagcaatcctgacgctgtctatgaagacttgatcaataagatcgagaccactgttcctccttctgccatcaatgtgaaccggttcaccgaggactccctcctacgccatgcccagtttgtggtgagccaggtagaaagttacgacgacgctaaggacgatgatgagacgcccatcttcttgtctccctgtatgaggtccctgatccatttggctggtgtctcgctgggacagaggcgagcaacaaggcgcacggtcatcaattctgccaaagtgaagcgcaaggggcccacaaaagccaccaccaccaagctggtctatcagatcttcgacactttcttctcggagcagatcgagaaggatgacaaggaggacaaagagaacaccatgaagcgccgccggtgtggtgtctgtgaggtctgtcaacagcctgagtgtgggaagtgcaaggcgtgcaaagacatggttaagtttggtggcaccggacggagtaaacaggcttgcctcaagaggaggtgtcctaacttggccgtaaaggaggcagatgaagacgaagaagctgatgatgatataccagagttgccgtcacccaaaaagttgcaccaagggaagaagaagaaacagaataaggatcgcatctcctggctcggggagcctgtgaagatcgaagagaacagaacttactattggaaggtgagcatcgacgaagagactctggaggtgggcgactgcgtctcggtcattccggatgatccctccaaaccactgtatctagccagggtcacagcactgtgggaagacaagaacgggcagatgttccatgcacactggttctgcgcggggacagacacggtcctcggagccacctctgaccctctggagctgttccttgtaggcgagtgtgaaaacatgcaactttcctacatccacagcaaggtcaaggtcatctacagagggccttccccaaactgggccatggagggaggcatggaccctgaggccatgttgccgggggctgaggatgggaagacctacttctaccagttctggtacagccaggactacgcaaggtttgagtccccacccaagacccagccggcggaggacaataagcacaagttctgcctatcttgtatccggctggctgagctgagacaaaaagaaatgcccaaagtcctggaacaacttgaggaggtggacggccgggtctactgcagttctatcaccaagaacggtgttgtctaccgactgggtgacagtgtgtacctgcctcctgaggcctttactttcaacatcaaaatggccagccccatgaaacgctctaagagggaccctgtgaatgagaaccctgtaccccgagacacttaccgcaagtattccgactacatcaaaggaagcaacctggacgcccctgaaccctatcggattggtcggataaaagagatctactgtggcaagaagaaaggtggcaaggtcaatgaggcagacatcaagatcaggctctacaagttctataggcctgagaacacccacaagtccatccaggcaacctaccacgccgacatcaacctgctctactggagcgatgaggaagccgtggtggacttcagcgacgtgcaaggccgctgcaccgtggagtacggagaggacctgcttgagagcatccaggattactcacagggcggccccgaccgcttctactttctcgaggcctacaattcaaagactaaaagctttgaagaccctccgaaccatgcccgcagccctgggaacaaaggcaaaggaaaggggaaagggaaagggaagggaaaacctcaggtatcagagcccaaagagcccgaggcagccatcaaactgcctaagctgcggaccctggatgtgttttctggctgtggaggattaacagaaggattccaccaagcaggcatctcggagacgctgtgggccatcgagatgtgggaaccagcagcccaggcatttcggttgaacaaccctggcaccacggtgttcacagaggactgcaacgtgcttctcaagctggtcatggctggtgaggtgaccaactctctgggccagaggctgccacagaagggcgatgtggagatgctgtgtggtgggccgccctgccagggcttcagtggcatgaaccgtttcaactctcgtacttactccaagttcaaaaactccctcgtggtctccttcctcagctactgtgactactaccggcctcggttcttcctcttggagaatgtcaggaactccgtgtccttcaggcgctccatggtgctgaagctcacactgcgctgcctggtccgcatgggctaccagtgcaccttcggtgtgctccaggctggacagtatggtgtggcccagacacgaaggagggccatcatcttggctgcagcccctggagagaagctgcctctgttcccagaacctctacacgtgtttgccccccgtgcctgccagctgagtgttgtggtggacgacaagaagttcgttagcaacattacarggctaagctcgggtcccttccgaaccatcacggtgcgagataccatgtctgacctccctgagatccagaatggagcctcagcccccgagatctcctacaatggagagccacagtcctggttccagaggcagctgcgagggtckcactaccagcccatcctcagggaccatatctgcaaggacatgagcgcgctggtggctgcccgtatgcggcacatcccgctgtccccaggatcggattggcgtgacctgcccaacatacaagtgcggctgagagatggcgtcataaccaataaacttcgctacactttccacgacacgaagaacggctgcagcagcaccggggccctscgtggggtctgctcctgtgcggaaggcaagacctgcgaccctgcttccagacaattcaacacgctcatcccctggtgcctgccgcacactgggaaccggcacaaccactgggctggcctctacgggcgtctggagtgggatggcttcttcagtaccaccgtcaccaaccytgagcccatgggcaagcaargccgggtgctccatcccgagcagcaccgggtcgtgagtgtgcgggaawktgctmgctcccaaggckwkscagatacctaccggttattcggcaacatcctggacagacaccggcaggtggggaacgytgtgccaccaccactggccaaagccatcggcctggagattaagctctgtctgctggccagcgctcaggagagtgcctcagctgcagttaaaggaaaggaggagactactaccgaggactagtgctctcacccagagccccacgtgcactgatgtttttaacccgtcgagccccatcatttgaagtgttctgctcagtgtctgtgaccatsgctgacactaagctgtttggaggtttgttttgtgaccaagccgtgtagwctttgtgcattctgaattttaaggttttgtttttttgtttttttgttttgtttttttattctgtattctatcagatctgccactgtgtgggtggcaagtgagacttgatgtagttttatatgttgtaatatttcttcaaaataaagcgcttctataaagcaaaaaaaaaaaaaaaaaaaaaa

SEQ ID NO: 482 - DNA, 300 bp, Rattus norvegicus
cccgccctgagctgccgcaccagctgctcctccaggccctgcgtgccccccagctgccatggctgcaccctgcccggagcctgcaacatccccgccaatgtgggcaactgcaattggttctgtgagggctccttcaatggcaatgagaaggagaccatgcagttcctgaatgaccgcctggcctcctacctggagaaggtgaggcagctggagagagagaatgcagagctggaaagcaggatccaggagaggagccagcagcaggaccccctggtgtgccccgcctaccaggcctacttc

SEQ ID NO: 483 - DNA, 1781 bp, Rattus norvegicus
cttatgagtatttcttccagggtgctgggtagtccccaccttttgagcaagttcagcctggttaagtccaagctggggctagctggggctcccacaggccctgggcagggacacggggggtcctggagggacctccaccccccactccatccagagaagaaagaatccggtagctggggctgtgcaggctgcaggagcaatgtcgcctggtggcctgtgaggcgcccaccatggcccggtccctgacttggggctgctgtccctggtgcctgacggaagaggagaagactgccgccagaatcgaccaggagatcaacaagattttgttggaacagaagaaacaagagcgcggggaattgaaactcctgctgttggggcccggtgagagcgggaaaagcacgttcatcaagcaaatgcgcatcattcacggcgccggctactctgaggaggaccgcagagccttccggctgctcgtctaccagaacatcttcgtctccatgcaggccatgattgaagcaatggacaggctgcagatccccttcagcaggccggacagcaaacagcacgccagcctggtgatgacccaggacccctataaagtgagctcgttcgagaagccatatgcagtggccatgcagtacctgtggcgggacgcgggcatccgcgcatgctacgagcggaggcgtgaattccacctgctggactccgcggtgtactacctgtcacacctggagcgcatcgccgaggacgactacatccccactgcgcaggacgtgctgcrcagkcgcatgcccaccactggcatcaatgagtactgcttttccgtgcagaaaaccaaactgcgcatcgtggatgytggcggccagaagtcagaacgtaagaaatggatccactgtttcgagaacgtgattgccctcatctacctggcgtctctgagcgagtatgaccagtgtctggaggagaacagtcaggagaaccgtatgaaggagagtctcgctctgtttagcacgatcctagagctgccctggttcaagagcacctcggtcatcctcttcctcaacaagacagacatcctggaggataaaatccacacctcccacctagcctcatacttccccagcttccagggaccccggagggacgcagaggccgccaagcgcttcatcttggacatgtacgcgcgcgtgtacgcgagctgtgcagagccccacgacggtggcaggaagggatcccgcgcgcgccgcctcttcgcacacttcacctgtgccacggacacgcacagcgtccgcagcgtgttcaaggacgtgcgggactcagtgctggcccggtacctggacgagatcaacctgttgtgacacggggaacccgaagcggtggtggcgaggacactgcgccccstggtggccactctcggaactgcaggcmarggaagtcaagtccaagatctgctccccasgggscctccaagcccagcccctctgtaattyatcccctcactctcctagctgttagagaaaggacctttawccccagcgctcggaggcagaggsaggaggatcctctgtgagtwccgggatcctgggccaaaaactaaacaaacaaaaccggatagaactgtccggggcttgtgacttcccagggatcctgtccaagtcctcctgtgggcctcatgctgggtaagtgaaatgtgcaaggaaggaagttctacttgctgtctacccattggttgractgaggtagactccaattaaagattgacttttgawaaaaaaaaaaaaaaa

SEQ ID NO: 484 - DNA, 2525 bp, Rattus norvegicus
ctttaaaccacagcctctcaaatacgcatccctacactggctcctttcttggtcttcctatctgagccctgatggcttctccagctgctcttccagagacctgggttcaattcccagcacctatatgacaacttacagattggtggctstaactccaatccrggggatgcaatgccatcttctggcctccagaggcactacatacacacatgatacacagaatatacacacgtgtatatttaggtaaagtgcctgtgcacataaaaaaaaataaaaaggaaaaaaattaaatcagaaggaacaggcaccggtcacttaccaaggtcaaggcctacagggcaccacagaaaacaccagcaagatggatggccccagtaatgtctcgctcattcacggtgacaccacgctgggcctgccagagtacaaggtggtctcagtcttcctagtgctcctggtgtgcaccctgggcatcgtgggcaatgccatggtgattctggtggtgctgacctcacgtgacatgcacacacccaccaactgctacctggtcagcctggccctcgctgacctcctcgtgctgctggctgcgggtctgcccaatgtctctgacagcctagtggggcactggatctatggacgtgctggctgcttgggcatcacctacttccagtacctgggcatcaatgtctcctccttctccatcctggccttcactgtggagaggtatatagccatttgccacccactgagagcacagaccgtgtgcactgtggcccgggccaaacggatcatsgcaggcatctggggggtcacgtccctctattgcctactctggttcttcctggtggatctcaatgtccgtgacaaccagcgccttgaatgtggctacaaagtgccccgaggactctacctgcccatctacctgctggacttcgctgtctttttcatcggacccttgctggtgaccctcgtgctctatgggctcatcgggaggattttatttcagagcccgttgtcccaggaagcctggcagaaggagaggcagccccatgggcagagcgaggctgcaccaggcaactgctccagggccaagagctccaggaagcaggccaccaggatgctggccgtggttgtgttgctttttgccgtgctgtggaccccttaccgcacactggtactgctcaactcctttgtggcccagcctttcctggacccctgggtcctgctgttctgccgcacctgtgtctacaccaacagcgctgtcaaccctgtcgtctacagcctgatgtcacagaagttccgggcggccttcctgaaactgtgctggtgcagggcagctgggccacagcggagggcagcacgcgtcctcaccagtaactacagtgccgcccaggagacctcagwaggaactgagaagatgtagctgggctccagtgaggtctcaggtcccacggcagcaggtcccctggsctgtcagcatgagccctacttcagtgtgctctgaggactcccgcctggcccctgaccccgcttrmggcytggttggcatttgggaggcatcaggagaggggcaggcagctccttgcttatgggtttccagaggttcctttaccatggaggaaggcgctggaatgttctcagctgcaccctgcgtgggtaattctcctctctgcagagaggaagctggaggcccagccttcagcgcctgtgggatcaaatcccctcatccgtgttcactcagtgctttaagcacctttcacgggtgtcacctaatgtccttccatgctgccatcgcatctgtccctcgctgagtccgtgcacacagggaccctggactctggggtttacatagaacgggtgtccagccagtcacgtcgcactctgggctgctccatgaggttcatctccagcctcagcaccccttccagtcctccatcacagtgggcagccctgcaagagactctgccaagtgagctcaaccactgtgcatgttcctgaaggagatcactatttgtctttccgatggccatcaggcggccacctmtacctcctcgaccccaaatgtgcaggcctggctctctgaacccactttgccagctgctgccctgcataccacgtctactggaggcgcgctgcggactcagagacgaggcggcaggaaaagcctttgctgagggacagcccagtcgctggctgagcctgaggacagcaggcctctgggtcccaccctgcaaatgtggtcagtgatcctatctcggtcctgagacctcaaggtggagggactcagtcgcgaggatgttccaacaagcagggctgtttgctctgtgacgggagacctcaggaaggcaggaattggggggatggatgctttggggtgtgtggtcggcctgggtgactcagcctactcaagctgtttctggcttcctggctggatgtggtcctagtgactcatccctgctctggggagctcaggtgctccaaaatagatgtggyyttttaggggctctggwwaaaaaaaaaaaaaaaaa

SEQ ID NO: 485 - DNA, 3518 bp, Rattus norvegicus
gcgtccgggcggcgtaggaaaccgggcgaggtccttcgcgcaggaaagccccgcacggcgcgtggagcctgaacacacaggtgctggagagggagcccaggatctgggggccaggtacgctgccactgagctgcattccagtctctccctgtatagcccaggcacctttgtgwccgcaatggggyggctttgcaccaagttcctgtcctccgtgagctgtctgattttgctatgggtgactggctctgggggcatcaaggtcctgggtgaccccacctgcttctctgactacatccgcacttctacgtgtgagtggcagctggatagcactgtggactgcagttctcagctcctcctggactacaggctgctcttygagttctctgaaaacctcacatgcacccccaagaacagtgccgacaccgtgtgtgtgtgccaaatggccatagaggagccgatccaggcagacacatactggctggaactgtggtctgagcggggacagctgtggcaaggctccttcaagcctagtgacaatgtgaagcccccagctccagacaacctcacactccacaccaatgtctccaatgssctgctgctgatgtggagcaacccatacccatcgaacaacttcctgcacaaaggcctcatctgcatggtcrrcayswssagagaggacaacccggcggaattcaaagtctataatgtgacctacacggamcccaagctgagcttcccagtcaacaccctaacatcaggggtgcgctatagggcacgtgtgagggtcttgtcccagagcttccctggcatctggagtgagtggagtcccagcatcacgtggtacaaccacttccagctgcccctgctgcagcgcctcccgctgggtgtcagcatctcctgcatctgcatcctattgttttgcctgacctgttacttcagcattatcaagattaagaagatatggtgggaccagattcccactccagcacgcagtcccttagcagccatcatcattcaggacacgaaggtgyycctctgggagaagcagacccgaagccaggagtcaaccaagagccggcactggaagacttgtctaaccaagctgctgccctgcttgctggagcatagagtgaaraaararararaatccccgaaggctgccaaaaccaagcctctccagagtcctgaaaaagcaggctggtatcctgcggaggtcagcaggaccgtcctctggccagagaacgttcatgtcagtgtggtgcgctgtatggagctgtttgaggccccagtacagaatgtggaggaggaagaggatgagatggtcaaaggggacctgagcatgtcacctgagaacagcggagggggcttccaggagagtcaggcagacatcatggcccggctcactgagaacctgttttcagacttgctgggggctgagaatggaggcgttggccagtcgagcatggcagagtcatcctcccttctgccttcagaaagtgggcaagcttctacgtcctgggcctgcttccccacggggcccagtgagaccacatgccaggtcacagggcagcagcctccacacccagaccctgagagagcaactggcacagcctgcacacaggtcccccttgtcatttcagacaatcctgcctaccggagttttagtgacttctccagccccgccccaaatcctggagagctggcttcagaacagaagcaggctggacatctggaagaaggggatcttctgagcccggttgacccccattcttcagggccaccaatgcagcaagcggagagctgggagcagatccttcacatgagtgtcctgcagcacgggacagctggctccaccccagcccctaccagtggctaccaagagtttgtgcaggcagtgaagcagggtgcgtcccaggmcgstggggtgcctggtgtcgggccttctggagacactggttacaaggctttctcgagcctgctcagcagcagtggcgtctgcacggacacagcagcagcagggactgacagtggatgtggagggtacaagcccttccagaaccctgttcctaaccagtcccccaactccatgcccttattcaccttcggactggacatggagctgccacccagtcccctgaactcagccccacccaatagcaccccagaatgccttggtctagagctggggctcaaaggaggcacctggctgaaggcccctcctccttcagagcaggtgcccaagccctttggggatgacctgggccttggcattgtgtactcgtccctcacctgccatctgtgtggccacctgaagcaacaccacagccaggaggaagatggtcagatccatgtcgttgcwwgccctggctgcggctgttgctatgatgaaaaatcaccatccttggggaatctctcggggaccttggagagctgtcctggggaaatgtcacaggaagccaacctcaccttagcacccaggacaccctccaatttgtcaggggtgggcaagggccctggccactctcctgttcccagccagactactgaggtacctgtgggcactctgggcgtcactgtgtcttaggtgagtgtgctgttgttgctgaggtctgtgctrwsgmcggggttcctccaagccagggaagtgcttcctgagagacagcccagctggcaggtttcccagaaatcgaaagaatggtgaagtgaagatgtgaacttggcctgaccctagaagttcagagcctggctgtctcccctaccgttggcctgggctctcctccctcacaagggattcagggactcattttgctttctcccacagcagtgctgatattcttaagccctgggctctcctagctcttgttgccctacctgctcaggcccattctgtccacccaatagaccgtttgcccaaggctcacagcagtcctggcatagctgtcgggttctccagctggaagctggtcctagaaactcgcagctggcctggcagtggcttgggaggccctaactagtggaaattttgagttaagggagggtagatactgccccaaggaggctattcattgaacagctcggactgagactagaagcagagcctgctgtcccagcttggcccagttgtggaaagcaacaagaacgcaaacttgattgcccaaagtcactgccagttacccacatgtggccagaagccagggctcccaggatgtggmrgyrsgaksccagtaaacaaacacagcagcctagtggcaggtcccagtggacaccaccactggcagccaaggcgagaccacaagggaactgtggggctggttctggttggtggccagatgatagggatggcagatggcagactgcagtctgactgcattctggaggacgggrccaggctcaggactgtctgctcgtgtccctacctttgggacacctagtatgtttgcaaggagggcaggacagaagaggtcacgtggagctctatgtcaataaagactctttwtcttgaaaaaaaaaaaaaaaaa

SEQ ID NO: 486 - DNA, 1581 bp, Rattus norvegicus
ccggaattcgccatggcgatgccgagagaaatcatcaccctacagttgggccagtgcggcaatcagattgggttcgagttctggaaacagctatgtgctgagcatggcatcagccccgagggcatcgtagaggagttcgccaccgagggcactgaccgcaaggacgtctttttctaccaggcagacgatgagcattacatcccccgggctgtgctgctggacctggagccccgggtgatccattccatcctcaactcctcctatgccaagctctacaacccagagaacatctacctgtccgagcatggaggaggggctggcaacaactgggccagcggattctcccagggagaaaaaatccacgaggacatttttgacatcattgatcgggaggcagatggcagtgacagcctagagggatttgtactgtgtcactccattgctggggggacaggctctggcttgggctcctacctcttggaacggctaaatgacaggtaccccaaaaaactagtgcagacgtactccgtgttccccaaccaggacgagatgagtgacgtggtggtccagccctacaactccctcctcacgttaaagaggctgacccagaacgcggactgtgtggtggtgctggacaacacggccctgaacctgatcgccacagaccgcctgcacatccagaacccatccttctcccagatcaaccagctggtgtccaccatcatgtcagccagcaccaccaccctgcgctaccccggatacatgaacaacgacctcatcggcctcatcgcctcactcattcccacccctcgactacacttcctcatgactggctatacccccctcaccacggaccagtcagtggccagtgtgaggaagacaacagtcctggatgtcatgaggagactgctacagcccaagaacgtgatggtgtccacaggtcgggatcgtcagaccaaccactgctacatcgccatcctcaacatcatccagggagaggtggaccccacccaggtccacaagagcctgcagaggatccgggagaggaagttggccaactttatcccctggggcccggccagcatccasgwggccctgtcaaggaagtctccmtacctgccctcagcccaccgggtcarcgggytcatgatggccaaccacaccagtatytcstcsctttttgaaaggacctgtysccagtttgacaagytgaggaaacggkaggccttcatggagcagttccgcaaggaggacatcttcaaggacaattttgacgagatggacacctccagggagattgtgcagcagytgattgacgagtaccatkcggccacacggccagaytacatctcctgkggcacccaggagcaatgagtcgcccgagacagggaccctcatytgccttaccggttagccmwggccctgcctggctgactacccctcagagcacagatcagggmcctcatcaatcactsgcawacacatgcmctgtctgttggcttaggggcgggtttacttctttgagagtatttatytttaataaagcmctggwtgtaammmrrraaaaaaaaaaaaaaaaaa

SEQ ID NO: 487 - DNA, 4952 bp, Rattus norvegicus
cwmragkctgatctactgaaactctaccctcctcaggctgcctgaatgaatgggacacctttaagtttcacctcacctccgaggtctgcagtgcgctcttctattttaccacacagaagtaaatctgaggaggctgcccagtgctgaagagaaaggcaaagccactcaaacctgaagaaatgaaatcgtcaaggactgtcacgctctactttgtgcttattgtgatttgttcctcagaagctacatggagcaggccagcagagcccattgtccatcctttgattctccaagaacatgaactagcaggggaagagctactgaggccaaaaagagcagttgcagtggstggwcytswgscwgaakaatacaccgtggatgttgagatcagttttgaaaatgtctccttcctggagtccatcagagctcacttaaacagcctccgttttccagttcaggggaacggcactgacattttgagtatggcaatgactacagtctgcactcctactgggaatgacctcttgtgcttctgcgagaaaggctaccagtggcctgaggaaaggtgtctctcctctctcacttgtcaagagcatgacagcgccctgccaggccgatactgcaattgtctgaaaggacttcctccccaaggacctttctgccagctcccagaaacatacattaccttaaaaatcaaagtcagactgaacataggatttcaagaagacctagagaacacatcctctgccctctataggtcctacaagactgatctggaaagagcgttccgagcgggttacagaactttaccaggattcagatcggtgactgtgacacagttcaccaagggcagcgtggttgtggactacatagtcgaggttgcatcggcaccactgcctggatcaattcataaagccaatgagcaagtcatacagaacctcaaccagacttacaaaatggactacaactccttccaaggaacaccaagcaatgaaacaaagttcactgtgacaccagagttcatctttgaaggagacaatgtaactctggaatgcgaaagtgaattcgtgtcctccaacacatcttggttctatggagaaaaacggtctgacatccagaacagtgacaaattctccattcacacctcaatcatcaacaatataagcctggtcacccgcctcactattttcaacttcacacagcatgatgcaggcttatatggttgcaatgtgacactggatatttttgaatatgggacagtcagaaaattagatgtcactcccatccggattttggccaaggaagagagaaaggtggtgtgtgacaataaccctatatcgttgaactgctgcagcgagaatatcgcgaactggagcagaatcgagtggaaacaggaggggaaaataaacattgaagggaccccagaaacagacctagagtctagctgcagcacttatacactcaaggcagatggaacccagtgtcccagtggttcttctggaacaacagtcatctacacgtgtgagttcgtcagcgtctacggagccaaaggcagtaagaacatagccgtgaccttcacctctgtagccaacctaacaataaccccggacccaatttctgtttctgagggacaaagcttttctataacttgcctcagcgatgtgagtagctttgatgaggtgtactggaacacttccgctggtattaaaatccatccaaggttttataccatgaggaggtatcgggatggagcagagtcggtgctgacggtgaagacctccaccagagagtggaacggaacctaccactgcatatttagatataagaattcatacagcatagccaccaaagatgtcactgttcaccctctgcctctggagtcagacatcatgatggatcctttggaagccagtggtctgtgcaccagttcccatcagttcaagtgctgcatagaagagaacgatggggaagagtacattgtgactttccacgtggattcctcatcctttcctgctgaaagagaagttattggcaagcaggcatgctacacatacagtctcccaggaaagttaccatcacggtgtcccaaagacattgacgtgttctgccactttaccaatgcagccaacagctcagtccggagcccatctatgaagcttacccttgttccagggaagaatatcacatgccaggatcccatcataggtattggggaacctgggaaagtcatccagaagcygwgscaktttgcaggtgtttctagarkccctggacagaccattgrtggraycgtcacttataaatgtgtaggctcmcastggaaggakgagasaaggkyctgcataycarccscawtcaatggtttgctccagttggmcaaggctttgatmawgagsccctcccakgatyagaarctccctaaatacctgcggracctttctgttarcactgggaaggaagaacaggatatacgctcatcgcccggsaksctgggagccatcatcassatccttgatttgctttcaacagttcccactcaagtgaattcagaaatgatgagggatatacttgctaccattaatgtcatcttasacaagtccaccttgaactcctgsgakaakttactacagcaacagagcaaccagagctctcagttcctgcagtcagtggagaggttttccaaagcgctcgagctgggagacagcacccctcccttcctcttccaccctaatgttcagatgaagagcatggtgataaaacgtggccacgcccaaatgtaccaacagaaatttgtcttcacagactctgacctatggggtgatgtagccattgatgagtgtcagctgggaagcttgcagcctgattcatcgatcgttactgtggctttcccaactctcaaagccatcctggcccaggatggacagagaaagacaccctccaacagcctagtaatgaccaccactgtcagccataatatcgtcaagccttttaggatttctatgacattcaagaacaaccatcgttcgggtggcaagccacagtgtgtcttctggaacttcagccttgccaataatacagggggctgggatagcagtgggtgcactgtggaagatgatggtagggacaatagggacagagtcttctgcaagtgtaaccacctgacgtcattctccattctcatgtccccagactccccagacccaggatctcttttaaaaatacttctggatatcatttcttacatcgggttgggcttttccatagtcagcttagctgcctgtctagttgtggaagccatggtgtggaaatcagtgaccaagaaccgaacttcctatatgcgccacatctgcatcgtcaacattgccctttgccttctgattgctgacatctggttcattgtggctggtgctatccacgatgggcattacccactcaacgaaacagcctgtgtggccgccacattcttcattcacttcttctacctcagtgtcttcttctggatgctaactctgggcctcatgctcttctaccggctgattttcattctacatgacgcgagcaagtccacgcagaaagccattgccttttctctaggctatggctgtccactcattatctcatccatcacagtgggggttacacagccacaggaagtttacatgaggaagaatgcatgttggctcaactgggaggacaccagagcactgctggcttttgctatcccagcgttgattattgtggtggtgaacgtgagcatcacagttgtggtcatcaccaagatcctaaggccctccgtcggagacaagccaggcaagcaggaaaagagcagcctattccagatcagcaagagcattggagtcctcacgccactcttggggctcacttggggttttggtctggccacagtgatccaggggagcaatgctgtgttccacatcatatttactctcctcaatgcctttcaggggctcttcattttgctctttggctgcctctgggatcagaaggtacaggaagctttgctgcataagttttcattgtcaaggtggtcttctcaacactcaaagtcaacatccttaggttcakmaacacctgtgttttcgatgagttctccgatatcccgaagatttaataatctttttggtaaaacaggracatatracgtttccaccccagrgrcaaccagstcatccgtggaaaattcctctagtgsttamtcattgstcaactaggrccagrtaatrccaaattcacaggrgstytcagaaatagggcccctkccaagaaaagggacccatatccaaatytatgggtaaagtgttytctytgcagacttytgggrgcagatgytgaagagactctttgaatwgrgaagatgctttcttttgtaaagacagamtaaatgtttaattttgctcccacccctatcccttgtgtaatgccaaatatgtatagtatttaaaagrammmwmmmmmaarrmdmaammwwwmwmwrwrwawtgtaaaatagaaaattgagagttttacacacacacacacacacacacacacacacacacacacacacacacaccccattggctacaaagataaaagctgattgaaacagtaagtaaaaagtgagtatccagaatttcagtgaattcaagaaaggaaggagtggggaggggagagaaaggatgatataatggaaggtaggaatgaagggaaggagggaggggtgagataggaaggaaggaaggatgatgtagaaaacgttagggagcacatcaatttccacaattgtgatctaatatggctactcatctaccacagccctgggaatgaaatatatggcttaaaaaaggaaaatgagatgaaaccatggggaatgtaggtaagtttctgatctttccctggctaaaaggataaaagacagaggagggaaagtagaaaagaaagtaggagggaaagat

SEQ ID NO: 488 - DNA, 2279 bp, Rattus norvegicus
ctggttcggcccacctctgaaggttccagaatcgatagtgaattcgtggcttattatttgttctgaggaagctctctgtgtggatacagatttataggtattagaagagatgttctatatacagagttctgaggcactgcagattctgaagaattccctaaggaagcacctccctgagtccttaaaggtttatgggactgtcttccacatgaaccagggaaacccattcaagctcaaggctgtggtggacaagtggcctgattttaatactgttgttattcgaccacaggaacaggacatgacagatgaccttgaccactacaacaacacttacctaatttattccaaggatcccaagcactgtcaggaattccttggctcatcagacgtcattaactggaaacaacatttgcagatccaaagttcacagtcagacctgggcaaagtgatagaaaaccttggagccactaacttgggcaaggtcaagcataagcagtgctttctctatatggtatctcatacagcaaagaaactgactccttccttggtggatgcaaagcacttagtagtcagcagtgagaaacccacaccttttgaccatcagttattcaaatttgcccgcctggatgttaagcatgctgcattggtgaatagcatctggtattttggtggcaatgagaaaagccagaagttcattgaacgctgtatctttacctttcccagcgtctgtattatgggccctgaggggacccctgtgtcctgggccctgatggatcacactggagaactaagaatggcaggcaccttgcctaagtaccggcaccagaacctcatttaccatgttgcttttcaccaggtccatacactagagaagctgggctttcccatgtatttacatgtggataaggttaacctcaccattcagagaatgtctgctgtgctggggcatgtccccatgccctgtacctggaaccagtggaactgggtacctctctaaagccagaaaagagtgagagggggactgcacttgtagatggagaaatggctgagtgaacagagagaagtgaactgtcattagggtggtgtgtgtttctagagagcagggttgcatcacactgagctgcacacagtttcttcgccctcacattgctcatgctcttaattccatttctcagcatacagaaggccaccatgtcctgctcccacattctcaggattcctgtaacacatttggctaaattgtactctctcctattcattttgcaggctcattgatccatggctattagtcagtaggtttgttttgtgacctgaccccccacaaccctgcacacaggcatacttcctctggctttckgyasswkkgcttttatgggttggagaagtttgttctcatgtcactcaccagacattaaattgttaatatgtaaaaactactatacatgcaaacacagatacacagtatgtgtggtacaactgtaagaattgttagaaaagagactagagctcagcaagtaaatgtgcctgcagtcaagcctggtaacctgaatttgattcctgggaaccacattgtaaaaggagagaatctattccatcgacttgtcctctaacctccccaggtatggggcgcatgtgcacacacaaataagtaaatgtaatctttaaacagttaaaaagactaactggtgatctttgagactagatttgtattttttttttcaatgaacattcactattacttcccgtgccaggaaggaacacttagcattgttctaaaggctgagcttcattacttcagtctaacgtttatatgtcataaattctttatttatggaagcttaagctctagaaagcaaagaactgtgtggagaagagaaaataacaacattaaaaacaggaaaaacggatgtctgttatgtaggagaaaggaagaagttgggatgaggaaggaggatgggaagcagaactggggtgctgaagggagaggaaaggagggtagtagagaggaggagagaagagggaaggggggggaatgggaaaagaggggaggggagagtgatatcttaggttatagagagatcagctcttctgtagagaggataaataatgtggtcgcattcatagctgagttgagcagaaagtgatcagattaaaagagaatgaaggggggctggggatttagctcagtggtagagcgcttacctaggaagcgcaaggccctgggttcggtccccagctccgaaaaaaaagaaaaaaaaaaaaaaaaaaaaaaaaaaaaa

SEQ ID NO: 489 - DNA, 5762 bp, Rattus norvegicus
gggattatgccgctataaaggcttgttttgctccgggtccgatgttcgcgagcgtgcccgggctgtttgctttcgtgtggggaggctgggatgcagaaattctaaagtgagaggagcctgagccctggtcctgtgtggagtgaagatgaaggatattgacatgggaaaagaatacatcatccccagtcccggatacagaagcgtcagggacagaagcactatcccgggacaacacggcgatcgtgaagaacccaggttccggagaacaagatcattggaatgccaagatgccctagaaacagcagcccgagttgagggtctttccctggacatctctgtgcattctcatctccaaattctggacgaggaacatacgaaggggaaataccaccatggtttaagcgccctgaagcccttccggaccaccaccaagcaccagcacccagtggacaatgctggccttttctcctacatgaccttttcatggctctctcctctggcccaagtggttcacaagaagggggagctgttaatggaggatgtgtggcctttgtccaagtatgagtcttctgatgtgaactgcagaagactagagagactgtggcaagaagagctgaatgaagtcgggccagacgccgcctccctgcgaagggttgtgtggatcttttgccgcaccaggctcatcctgtccatcgtgtgcctgatgatcacgcagttggctggcttcagtggaccagccttcgtggtgaagcacctcttggagtacacccaggcaacagagtctaacctgcagtacagcttgctgttggtactaggcctcctcctgacagaggttgtacgctcctggtcactcgcactgacttgggcattgaattatcgcactggtgtccggctgcggggggctgtcctgaccatggcattcaagaagatcctgaagctaaagaacattaaggaaaagtccctgggggagcttatcaatatctgctccaacgatgggcagaggatgtttgaagcagccgctgtgggcagcttgctggccggaggacccgttgtcgccatcttgggcatgatttataatgtaatcattctaggaccaacgggcttcctgggatcggctgtctttatcctcttttatccggcaatgatgttcgtgtcacggctaaccgcgtatttcaggagaaagtgtgtagccgccacagacgaccgtgtccagaagatgaatgaagttcttacctacattaaatttattaaaatgtatgcctgggtcaaagcgttttctcagtgtgttcaaaaaatccgagaggaggagcgtcggatcctggagaaggccgggtactttcagagcatcaccgttggagtggctcccattgtcgtagtgatcgccagcgtggtgacgttctccgtccacatgaccctgggcttcgacctgacagcggcgcaggccttcacagtggtgactgtcttcaattccatgacttttgctttaaaagtaacaccattctcagtgaagtccctctctgaagcatccgttgctgttgacagatttaagagtttgtttctaatggaagaggttcacatgataaagaacaaaccggccagtcctcacatcaagatagagatgaaaaatgccaccttggcatgggactcctcccactccagtacacagagctcgcccaagctgacccccaaagtgaaaaaagacaagagggctcccaagggcaagaaagagaagtcgaggcagctgcaacatactgagcaccaggcggtgctggcagagcagaaaggacacctcctcctggacagtgatgagcggcccagtccggaagaggaagaaggcaagcagatccacgcagggagcatgcgtctgcagaggacactctacaacattgacttagagattgaagagggcaaactggttggaatctgtggcagtgtgggaagtggaaaaacctctctgatttccgccattttaggccagatgacgcttttggagggcagcattgccgtcagtgggacctttgcttacgtggcccaacaggcctggattctcaacgccacgctgagagacaacattctctttgggaaggaatttgatgaagagagatacaactcagtgctgaacagttgctgcctgcggcctgacttggccattctccccaacagcgacctgactgagattggagagcgaggagccaacctgagtggtgggcagcgccagcgaatcagccttgctcgagccctgtacagtgacagaagcatctatatcttggatgatcccctcagtgccttagatgcccatgtgggcaaccacatcttcaacagtgctatccggaagcgtctcaagtctaagacggtcctgtttgtcacacaccagttacagtacctggtcgattgtgatgaggtgatcttcatgaaagaaggctgtatcacagagagaggtacccacgaggagctgatgaacttaaatggagactacgctaccatttttaataacctgttgctgggagagacacccccggtcgagattaattcaaaaaaggaagctagtggttcacaaaaatcacaagacaagggccctaagccagggtcagtgaagaaggagaaggcagtgaagtcggaggaagggcagctcgtgcaggtggaggagaaagggcagggctccgtgccttggtcagtttactgggtctacatccaggctgcagggggtcccttggctttcctggtcatcatggtcctcttcatgctcaatgtgggcagcactgccttcagcacctggtggctaagctactggatcaagcaaggaagcgggaacagcacggtgtttgaagggaacagaagctctgtgagtgacagcatgagggacaaccccttcctgcagtactatgccagcatctacgctctctccatggcagtcatgctgatcctgaaggccatccgaggagttgtctttgtcaagggtacactgagagcctcctcccggctccatgatgagctcttccggaggatcctgagaagccccatgaagttttttgatactaccccaacaggaaggattctcaacaggttttccaaagacatggatgaagtggacgtgcgtctgccattccaggctgagatgtttatccagaatgtgatcctggtgttcttctgtgttggaatgatcgcaggggtcttcccatggttccttgtggcagtggggcctctcctcatcctcttctcagttctacacattgtctccagggtcctgattcgggagctgaagcgcttggacaatatcacgcaatctcctttcctctcccatatcacgtccagcattcagggcctcgccaccatccatgcctataacaaaaggcaggagtttctacacaggtatcaggagcttctggatgacaaccaagcccccttcttcttgttcacctgtgcaatgaggtggctggcagtgcggctggacctcatcagcatcgccctgatcaccaccacggggctcatgattgttctcatgcacgggcagatcccttcagcgtacgcgggcctcgccatctcctacgctgtgcagttaaccggactcttccagtttaccgttagactggcgtcggagacagaagcacggttcacctcagtggagaggatcaaccactacataaagactctctctttggaagcacctgccagaatcaagaacaaggctcctccccatgactggccccaggagggagaaataacctttgagaatgcggaaatgagataccgggaaaatctccctctggtccttaagaaagtgtccttcaccatcaagcccaaggaaaagataggcattgtgggacgaacagggtcagggaagtcctctctagggatggccctcttccgcctggtggagttatctggaggctgcatcaagatcgatggagtaagaatcagtgacattggcctggccgacctccgaagcaaactgrccatcatccctcaggagccagtgctgttcagcggcacagtcagatcaaacctggaccctttcaaccagtacacagaagagcagatctgggatgccctagagagaacacacatgaaggaatgtattgcccagctacctctgaaactggaatctgaagtaatggagaacggggacaacttctctgttggggaacggcagttgttatgcatagcaagggccctgctacgtcactgtaagattctgattttagatgaagctacagccgctatggacacagagacagacttactgatccaagagaccatccgggaagcatttgctgactgcaccatgctgaccattgcccatcgcctgcacacagttctgggctctgataggatcatggtgctggcccagggacaggtggtggagtttgacaccccgtcggtccttctgtccaacgacagctcaagattctatgccatgtgtgctgctgcagagaacaaggtggctgtcaagggctgactcctcccacgctggaagtctcttccttggagcgttgccattctcttcctggttgggccctcatcctgtcctgctgaaacctcgcctttcctggttttctctctcacgacagttcagggttagctgtgtgtctcacttttaaggaaaatcatattttgattattgtatttattccctattcacttaaatgaaatttagtttttgttcttaattgcactcttaagaggttcagggaaccattactataacgtatcagtggcctataacgaagctttatacgtgtagctatgtctatatataattctgtacatagcctatatttacagtaaatgtaagtggtttattttctattaaagcgagcactgtgctaacacagtgcgctttcatttctattgtttttgtacagctgactgcactacagatctcatttgctcttagctgtaggaaaggcagtgtttccttctccagctggtcgtttcacggtgctgggctccctaggtgtccagggggagacacttggcagcagcgggccctccatggcctgctccgtgggctccccagtggaaacccagtacagtgggctgcaggaggccttgcagagcaccgtgaattctcagggctcctgctttcctgtctccctgtcagttgccatttatgttagagcagcgggcaaagccccacccccttcccctctcaggaatgagaactccagcattcctcagaggggagagcttctttctgcctcccttcttctgctgtcatttctaagcaaggtccagtctgctgccagtgttccgtgcttcaggttcmygaggctggccaccgcagagctcccaagctccccggccagttggttcccagcccccacccgggctccactgctgctgctgtwgtaggtggcgttttcatttgcmtgaccccacagctccagagctcagcarcagggctcaggagtgtggggtccgttcttcctcacttcagtctcctctgcaaagtctgcacccctcagcagctcttgctaatcagtgtckcasaskggyskmgaagttttttktactgtaaagagacctacctcaggttgctgattgctgtgtggtttggtgcgctcctgcagaccccctgtgttgtgggsctcttagcttgggtgggtgtggttgccactgtcaccagttgagtggtcagcgttgcatgtcgtgaccaattagacattctatcgccttagcatgtttgctaaacmccttatgaaagcaaaaatctgaaaaagtgaataaaattattttggatttataaaaaaaaaaaaaaaaaa

SEQ ID NO: 490 - DNA, 434 bp, Rattus norvegicus
gggatgtgcaaagagaatatgctgggagatgcgaagacaaatactttctgtgggacgcctgactacatcgctccggagatcttgctgggtcagaaatacaaccattccgttgactggtggtcctttggggttcttctttacgagatgctgattggccagtcgcctttccacgggcaggacgaagaggagcttttccactccatccgcatggacaatcccttttacccaaggtggctagaaagggaggccaaggatcttctagtgaagctttttgtgagagagcctgaaaagaggctgggagtgagaggagacatccgccagcatcctttgtttcgagagatcaactgggaagagcttgagagaaaagagattgacccacccttcagaccaaaagtgaaatcaccatatgactgtagcaatttcgacaaggaatt

SEQ ID NO: 491 - DNA, 1559 bp, Rattus norvegicus
gcgtcatcaagcttaggtctccaggatttcgatttgcttcgagttatagggagaggaagttacgccaaagtactgctggttcgattaaaaaagacagatcgcatttatgcaatgaaggttgtgaagaaagagctcgtcaatgacgatgaggatattgattgggtacagacagagaagcatgtgtttgagcaggcgtccaatcaccctttccttgttggtctgcattcctgcttccagacagaaagcaggctgttttttgtcatagaatatgtgaatggaggggatctcatgtttcatatgcagcggcaaagaaaacttcctgaagaacatgccaggttttactcagcagaaatcagtctagcactaaattatcttcatgagcgagggataatttatagagatttgaagttggacaatgtactgctggactctgaaggacacatcaaactcactgactacggcatgtgtaaggaaggattacggcccggagatacaaccagcaccttctgtgggactcccaattacattgctcctgagatcttaagaggagaagactatggcttcagcgttgactggtgggctcttggagtrctyatgtttgagatgatggcgggaaggtctccatttgatatcgttgggagctctgacaatcctgaccaaaacacagaggattatctrttccaagtcattttggaraagcagatycgcataccgcgctccctgtctgtgaaagcagcaagtgtgctgaagagtttcctcaacaaggacccaaaggaacgattgggttgtcaccctcaaactggatttgctgacatccaaggacacccattcttccgtaatgtggattgggacatgatggagcagaagcaagtggttccgccctttaaaccaaacatttctggagaatttggtttggataactttgactcccagtttaccaacgaaccagtccagctcactccagatgatgatgacatcgtgaggaagattgatcagtctgaatttgaaggtttcgagtatatcaaccctctcttgatgtctgcagaagagtgtgtctgattctgcttactgccatttagtgcatggatcaaccgttagcccggtcacagttagcattttatgttgtccctacagaaatctctctcaatatcctgttagcgactataggaatcatatagctaagcagagctaaaaaaacagtcatgtcaaactccagttatgcttgctctccagaggctcctaatgagaaaggacagtgtctttgtgtaaaggaaacagcctagcttgtcaaagaaagcctctgctgcgttgtgacactcatgggatgacatcatcagtctcccacagttgtcactttgggttaaggcatggaaggcttaattgtagagtggagggccatgctaagtatatctgctagtgttactggtttctgagttccctcagtttgaatcctcctataaatcttctcattactttgggtaatttaaagaagcagttatcaaattgatacacaattgacttgttttattaagaattgggttctaagttattatctgtgt

SEQ ID NO: 492 - DNA, 3201 bp, Rattus norvegicus
aagcttatcgatgataagcggtcaaacatgagaattcgcggccggataatacgactcactatagggatcacctcgatccagccttatctaggcccctccctaactctccccacactccagcctgtcaaacacccttgtcctttgttaccagaacaggccatgctcccggcagcctctccacctttgcacctgctgttccctcctccaagggggtgggggtggggggacgcttttcttccttatccttccagagagttcctgcctacttcaggaaatagctcaaagtctcacgcctgcatgaaaccctctcccatggcctgtttcagtcggccgcagtgggatttcactgagttgtgtaaaggtacatatttgaccctcactcaggagactggaaatcagagtcagtgaatccggcaatcagaggctgccttctccagagcccagggttccttggggctgggtgtgaatacagccttaatgacgttcccacctctaattcaagagaccatttcatgggcgatggctcccccctcctttggtgtcccctctctatgatgacagttttcctaccctctgactgtatatgacatatctgtccctctacctgtgtcacatacagggacacttctcatgctcccctgggtttttggagcagtaaaaaggactctgtcagctactccggacctgcaggctttggggcaggagtcccagtccccgcccctcacctcacacacttatcccaccctttttcgtttggcgactatattgtgctctggcttcccgcaaccctaagtccctgtgcttgcataagcgaggacaactaaagccatcagacttccactaatgtctctcttagctaggaactttctcacagtgttccctttcccctcaggggaaaaacaaacaaacaaacaaacaagcattatatttagctcagtagaaagactgaagatccttctcggcttttaaggatttctctccaggggacactccaggtgcatggtgtattaatgggtcgcgtgcatctggcccagagagcgatcccccgctcataccaggttgtttatttagtgtatctgctttctattcgctctgttcaaaagcatcaagctaaaaatatcttgtttatgcgctctggaccgaaaatgaagcagtcgggccattaatcactgagaatatgttgaatgagaatttgattaaagtacaggatgcgtcctccagacgaagtcggttctttatactgtaaaccacagtggaagcacagcagacctccccaacagtttttagccgctcctctttgagcctcctgggcggatcgtagcgcctttcctgacctaaaatggccattgcactggggggtcttgaccttgcgcaccctagtgtcgcaggaagaccccccagcagcttggaacgaggacaaatggagttcgagaggacgtaaggcctcaattcaagaagccgccaaagggtcttcggggtgcaaaaacgagagacgtgggtgctcaccaggccccttctgtcccggacctccgcggccgagatccaggtggagaatgaactggacgccacgtggctggggagccgatgctcgcaaactcctaccctcagccgcgagcctgtaggcgcgcgcggtgcggaggatccmaaggactggacagggggctcccagtgggtgctcgaaargctcggtagccaagagctggacacccgagctaccgagattagttcccctctgaatgacagtagggaaagaaaactgtgacttcaggcccctgactatgggccccgcctggggatcacgatccccgattcaaattcacttctctcactccaacaccctgccctctccccgcccctgcgcggtctccttagtgtcttgttccgcgagtcccggaggacccacccgctggtcccggcgtgtgtgtgtgtgtgtgtgtgtgtgtgtgtgtgtgtgtgtgtgtgtgtgtgtgtgtggtgggggggtccggaacatttgactagaagctccacgcagggtagcagcgtccgcgctcataagcctgagcaatcctatcgcgcgtggcctggagacataattaaaaagaaagttttccagcctaggcgggtggaccagccaggtccactaggctccgggtttagcggccgcctccgctccccgccgggtcctagcgccctactactctgaagaacccgtgggaaccctggaagttctaaagaggctgggcgaaagagaggtgctctgcttggaagtagtggggtcgcctggagttcagagataaagacgcacaatctcagcactctgggcctcgcctttcggcagtgcgcgctaggttgctggtccaaagcagtccctaacgtccttgcgccgcggctctccgccacagctttttaaaaatccgggtgggagacaggcctagtcccagcttttaagacaagtctgcaccacggtagctcaagactaacatcctctctccaaacgccccccaaccttcacctccccttgctcggcctctggatgctcccsggctccctagggttggctggaagtgggtgacttagaggcttaaaggaggggcgcctaaccacggaccacgtgtgtgcgggggcgacagcgccgccggggtggggctgagcgccgcaagccgggttcgcctagcagcgcaggagtcagtgggcgttgcgccacgatctctctccactagcactgtgctcccgccccactcaccgccttggaaagtcacaagagaaggcaggctctaagacccagcaggcaccatccggcaggcgccctccgcccaagacccgcttggacaccagggggcgatgcccgaccctctataaaagcggtccccgcgcgggsctggccattcrcgasscaaactgcscgggygcgggcgagttggggtactgggtgggcggcggygacagcggrccacgcscakgctggaggycgcckaggctcgccatgccgggagaactctaactcccccatggagtckgccgacttctaygaggcggagccgckgyccccgatgagcagccacctccagagccccccgcacrcgcccagcaacgccgcctttggctttcyccggggcgcgggccccgcgctgtccccagacccacctgccgccccggagctgctgggcggtatctgcgagcacgacacgtctatatacatcatctcctacatcgacccgg

SEQ ID NO: 493 - DNA, 1325 bp, Rattus norvegicus
cacgaggggccgcgatgggaccggaggcggcgcaaacamamgmgsgggcggcgcggggctcgcggagggcgcgggccggaggcagcarcgacgakgacaacgcggggggacaaacaagtgactcctgtcacccctctgggtgtcccttagaggtcatccagcccagcytgaccaatgtccacagccagggaacagccaatcttcagcaccagggcgcacgtgttccagatcgaccccgctacgaagaggaactggattcccgctggcaagcatgcactwaccgtgtcctatttctatgatgcaacccgaaatgtgtaccgcatmwtcagcatcggaggcgccaagrccatcatcaacagcacagtcactcccaacatgacvttcaccaaaacctmtcagaagttcgggcaatgggcagacagtcgagccaacactgtgtatggchtaggctttggctcggaacagcagctgacccagtttgctgagaagtttcaggaggwcaaagaagctgccagactggctcgggagaaatmtcaagatggtggagaactcactagtactgccctgrccatggcctcccaccaggttccwccaagccccttggtcagcaccaatkgtccagaagagaagctgttccgcagccagagcgcggacgcccctggccccactgagcgggagcggttgaagaagatgctgtcagaaggctccgtaggggaggtccagtgggaggctgagttctktgcacttcaggacagcaamcagaggctggcagggrcccttcgagakkcyawckcggccgccactcagtggaggcagcagctggaggtccagcgtgcagaggctgaacacttgcggcagcgggtggctgagctggaggcccaggtggctgcagagccggtccgggcaggagagaaagaagcaaccagccagtcggtggagcagctggaggctcgggtgcagaccaaggaccaggagatccagactttgaagaatcagagcactggcccacgagaggctcctgacaccgccgagcgggaggagacacagcagcaggttcaggacctggagacccggaatgcagaactggagcagcagctgcgggcgatggaaagcaacctggaggaggcgcgggccgagcgggagcgcgcacgagcagaggtgggccgggctgcgcagctgttggacgtgcggctgttcgagctgagcgagctgcgcgagggcctggctcgcctggcagaggcagcaccctagtttgctctggaggcctgcggccccaaggcaccctggcagggaccagggggccccagctgtctctgagctttgca

SEQ ID NO: 494 - DNA, 13409 bp, Rattus norvegicus
gatctgtggccaagtaattaatgatatggtaacaacaaacctactgggatagtgttattttcattttctgagacagggtctcgtgaagcccaggctagtcctgaactcaccacatacctaaggaaaaccttcaaatcctcatcttcccgtctccgcctgcagagcaccgggattccaggtgtctatcactgctgtatggctttgtatcgagcaaacctaagctcccttctcagccacaggatagagtaccagagaattcagaaactggaggcaactctcttcagctgggctgttaagctgcagctaacctctcaccttacactcagtggctgcttagcgatgagggcgtagctcagaactgcccaagccaagcagcgtatggctgctccacagagttctagaaatcaaaccagagcaaaccgtacacttcctgccagagggccaggcccacttcacgtctgtggggaggaatacgagccgtacctggagcagctttccactgtgataccaaagacgtcatttgtggggctttattaattgtagggtatgttctagcatccttggcttcactttttaaggtgtagttttatttcatgtttatgggtgttttgcctcatgtgtgcaccacatatgtgcctggtgcccaaggccagaaggcagatcccgtggaactgaagttacagacaactgtgagctgccgcctgggtgctgggaatcagtgagtcccctgccagcacctttagtcgcccagccatctctcaggcctccttggcctctctttggtagcatcttcactctgtcttcctaggacaaaatcagagcatctgagtagaaaggatatgaggtattcagtatggtgctgggaacctgataaatgtgtttgttctccttgcttttattttaaagaaccaaggtgtgatttaaatgagaatggctccaccagcttatatatttgagtgcttcctatctagttggtggaaactatttgggaaagattggaaggtgtggccatatgggaggaggtgtgtcaatgggggtaggctttgacatgctattccccctgagcactcacactctccccctccccctccctccctctaacttgccgatctaggtataaagtaggtggtatgtgtgtatgacagaagtagaatgggggctaggggtgcagctcaggtggtcctgtgagttcagtctcttacacagtgtaaactgggtttggtgaggtgtacctctaatccaaggcaagtggaggccggtcaggccctctgctagttggttcaaggccagcctgaacttgaggacattctggtttctgttttgtttttaattattattcatgggagacgaagcatctgcaacaaagcgcttgtttgcatctaagtgaggaaggaaagcagtagcaaggaggggaggttctaagggtagcaggtcctggtgcaggagtctggcacactacagtgaataaccttgaataacctgaatagcaaggccctggcagagggatgtgatgacactgagatacagaacgctgtgctgcaaaggacattagtgactaagaaacggaaaaggcggggtatgtggtacgcgctcaggaggcagaagcagaggcggatctctctgagtctgaggcaagccaagtctccacagcaaactccaggccagccaggaaggactacacagagagtctctgtcgcaaaaaagagataggggaggaaaaggaagaaaaaacaaagagatgaggaaaagagggcgcgcgcaccacctcccggcccaggggacgaggaatgtgaaaggctcaccactaggtattaagagaagcagtcttggggttggggatttagctcagtggtagagtgcttgcctagcaagcgcgacagagaaagagagaaggaaaagacacatggctaccagagggcaaaagaggagcttggtagtttaggacacgtgtgtgaacatagacaagataaagggcatactgtctgtagttcagatgcttgcactgtgggacgctgtaaattttcggttcccccaaattggccagcgaggtatctgtgcagcattacatcaatgaagtcttatataaattacaggaatgtccttcctgaggaatgccctggatgtccactcgatgaatgtaaacagtttgttaagtgcatagtggttagcacagggcatgacactaaaatactattagttaggatatattgctaacggaatgttagtacagcgtccaagtctttctctaaggagcagccatcaaaactagctgcagtaccacccacggtgccactgcgacctcaccggcttatccactgccctccctcatcagttacccagcgctgactgaaaagcatcccaattatcaacatacaaaccaatttttattgttgagtcatgttgggcttccacagggaccctaagccttatatggagtccgtatccttgccagaggagaggagagcccagggcatcaccaagactcgctccaagttcaacactctcctgaaaagctcttcttttcctgtagatggtgttagtccctccacgtcacttctacttcatctgtcctatacctgtggaaatggggagactctgtgaaggactgacggtcccttagcaatttgttctttgagacagcatctgtagcccaggcttacaccgaaatcacgatcttctgccttggtctcccacatgctgggattacaggagcacaccaccataagcatcgcccacaatactttctgttctcctctacccttgttcttcagctttcttacctgttgatttctgcctacctcctgtacctactatctactctctcaaagagtatgccgctcacctctgagtgatcccagaatcttggagaggggtcctgtgcccagcctgaaacatctcccagccagcttgtgctatcatggctccattgtcaatgcagaacctgggaaagaagagagaacagaacttgtggttgagacacagacaagcggtaataacaggaagaaaagaactcaagacaaagaagctgacctcacctctcatctgttgcaaagagctgggctccccgctcctggcacattgttgccatcatctcctgcagccgtacgttacctacaaagagaggacacacagtgaacgtaggtttagccatcttgctgtcacaccagctgggctcccacgacagtttaccagcagagtggggaaaaggaaaagagatgaacagacagtcctctaaattagctctgtgatgtggagtaccgggagcaggaagaaggccctgcccgctgatacgtacatccaactcccccgacgatgagggcttctttggagccacagtgcgccatggctcgctctgtgatctccaccagcattgcaaacacagtctcctgtggaggacagggaagggggaagctcagaggagcatcgacgggacttcaactctagactagaatgagttttacaccccagcttttcactctcctacctgtaaggagaaacacagatcttcaggagtacactctcccgtggccagcattcgctgtgctgcatcctgcaatggaaggggcagcaatccaacacgtgaggacaacatcaggctttcagaaacacaaactccctgtccttgaaaggatcgctgtgtccattataacgagattacaggagcgatgccctcccacactggcttctcctttttcccgtttagggagggactgttttattctgaactgcaaacccattattagaatagtgcccggcacacagagaaggtatacagtatctgctaaatgaatctatttagcacctactatgagtgaatgcttatgcaggaaataatggtgagcaaggcagacacagcattttcaaaagcagggatgtgctgtctccttaacgctcccactcacctcgatgaaggacaggatccctgagaacgagacgtccatccccttcacggtgtatggcagctccactagcttcttgcctctgtgcagaaatgagtaaagcactaaacgcagagtgggctggctgctcaccccccaggacccctcccatacctcattagcataaaggaaagacgcctctaaagcttcggcagccagtgctctcgacttcacatcctcttaccgctttgccatctgctcaatgttgtagcctggacttgggtcattggaaatctatcagcgggaggagagttaggtagagagccatgaatgtacgatgtaaaacacactcttctcacatctactccccaaatcgatgtaagacaagcaaccagtatctatttttataaaccacacacatggacagacatgttagtaacaagtaatagacacatacacataaacgcttaatttctacctatgttaaataaatggcaaagactaacgttagatatgcaatatttacttcttcttgcctttcatttcgttttgcttcccagacccacatcttacacactctatagtcttaatggcctaccttcagcacccgggcaaaacgatccaaacaatttcccacagcaatatcaatagtttccccaaagatgcggtaacgatgttctgagtaggaaatcacctaagaacagtgagaccgcccatgaaactttcagcctgtgaagaggggtgtttagctccgtggaagaaaatagcatagagccaacatggccactagaattgcagtaagaaagaaagggaagctgtctttagtggctcagacctgtaagtccagcactggtctggttggacaggcagccatgttgggctacacagtgaaggctaagggcagcctacacacatagcaagaccctgtctcaagaaccccaaaccaggagctgataaaatggccctgtaggcaaaaacacttgcatatgagcctagagacctgagtttgatcccaacccataaagtggaccctgaaagtctatcccctgatgtgcacatacacaacggcatgtgtgtacccacatacccacatctcacatgcacaaaataaacccagatatgatcaagatatcacatacatgtatgacttgccaaacaattaaaaaaaaattcttccaagaaccaacagaccagtgcttgctttgcagcacacacactaaaactgtaatgatgcagaggacgagcacggcccctgggcaaggactgcactcaaattcctgaagcgtcccgcagtacatacagcctaagaaacagaacgcacgcaggcacgcacacagacattccgtaagaagtagaaaaaggtgagccaggcacggtggtacaggtctgtaatcccagcacttgggaggagtttggaagatcaaaacagtacagggaaagctgtctagtgcactgagaccctaccctactgagtcacatcacacagcaggctctcgatcccagctgcttaggctgaggaaggagaatcacaaatttgggactgggttatctggagaccctgccttttagaaaaggagagcgggatggataaacgaagggaaaatatatttataaggctagagagagggcccagtaattaaatgcactggctactcttccaagggacctgagttcgattccctgcacccacacggtggctcacaactgtctacaactccagttcccagggatctcattccctcttctgtcgtcctggtgctcctacatacatccaggcaaaacacccacacaagtaaaacaaagtttgttttttttttaaattaaaaaaagagaggcatattatcttgaagggttaaattcacattctttttaaatgaaagattctaggtgtatgtataaagttctaacattctaattcttctccaaaacttgcaacttcatacctattattgtattgtctacagtgtcttaggtccgaacgtgcctggaatgtccttgcagctcctgtgactcaggtagactaccttagaactaagagggagtatgaagagtcctcttaagtacctgagtatttcctccgctgacatacaagacagttgggttgacggctccagtgatgaggcggcccatttcaatgtggcctatgcagtggttcacgcctagcaaaggcttattccacaactgggccacagtgcgggcaacaacagctacggaagccagtggggctcccatgccaggacctaacagggtacacacgtggttagaatcctagaaattaggaaagacgtgtagagtagatttgagaatgtgtaacaggggtggtggtagctccacccacattcgcccttgctgaccactcccccagccttacctttggtgtaagcaatgcaatcgatgtccttgggggttaaccctgcctctgttagcgcctcctgcagtaggtctaggatgacagctcggtggtgcctggccgtgtcacctggaaggaaacctacggaaccataaggcaggtattaggttggtgcaaagggaagtgtgatatggggctgtgaactttaaatcactgtaactaggttccaacacatttttattaatcaaaacacaaaccatttttattaacacatcttgcaacaaaccagtcagctaggcggtggtggtgcaaacctttaatcccagcaaggcagaggcaggtggatctctatgagtctaaggccaggctggtctacagagttctaggacagccagggatttgtacaaagaccctgtctcaaacaaaaaaaatttatttattcctgcagcaaacccatgtttcaacaaactcttggaaagcactctctgcatactgcaagttgtggaaacgttttccccaagaaaagttgtcagggtagtgacaaagcggtggtcagttgatgagaggtcgggtaaatgtggtggatttagcaaagcttcactttggtcattcggttttgaagcatgggttgtgccacaggcagtcaggcattgctctgaatcaggctcttcctgctaaacaatgctgactgctggagctatagtttggtgcatctcaatgatctgctgagtgcccttctcagatgcaatggtttccctgggcacccttctcagaagcaatggtttccctgggcacccttctcagaagcaatggtttccctgggcacccttctcagatgcaatggtttccctgggcacccttctcagatgcaatggtttccctgggtacccttctcagatgcaatggtttccctgggcacccttctcagaagcaatggtttccctgggcacccttctcagaagcaatggtttccctgggcacccttctcagatgcaatggtttccctgggcacccttctcagatgcaatggtttccctgggcacccttctcagatgcaatggtttccctgggcacccttctcagatgcaatggtttccctgggattcagaaagctgtagtggatcagaccagcagcagaccaccagtgacccggaccatttttggtgaaaatttggctttggggcttctcagttcaactactaagctggctatgactagttttcccctacaatccactttttgtcatcacaacccaagaaatggttcatacatgagagccgaaaacaacggctgttggattttcagtctgtttatgaggtatcaacctactaaggttttgttttgtgttgttttaacttttcaaatattcaaatgatcactgattggtccacgttgagcgctttggtatatatttctttagctgtaagatcagcttccacagctgttctcagtaaacaggtcaaagccaacttctgatagccaaccatttcagtgctcttgttagtctccttgcaaggtcctaaaccaccaaggcactgttagtaagcagttccagggaccgaatgttaggattgctagggttccaagtcatctccactgctttacctcccattctaaactcagtcgttccttgattccatttttgttatttattttgagacaggtcttacggtgtaccatggctggcttggaatttgctagaccaggctggccccaaactcaagagatttgccagcctctgcctcctggagtactcgaattacaggtttaagctcccacacctggctttagttttatttctgtctaacataatttccatagtataagatagatagacataaacagcaagaagtgtcatagaccaaaaataaataaaaataaagctcatccaaaccccaatgtgatatgtgcacattaagacacgcctgtagccccagcatttgggaggcaaaggcaggtaggcaggtaggcaggcaggcaggcaggcaggcagggagggagggcgaggcagaaaatgaacgattataaatgcattctagtatcaaactatgaattttgacaatgcaaaacctgcaattatttttgcactgcccaattagaagtaaaaaccaacacggacatgttttaacgatgtagggaaaaaaaatccttttctcgcctacgtcttaagataccctcttttcaagcctctacttttaagacaaggttacacataaccccggaccgccttaaaacacagaccctgtcacagcttcccaagcgctaggatgacagacgtcaccacacactcagctagctttccaacttctacacaggctactggggtttcagagacgctgcggacatccacacacaacactcaggagcaatccaagttatccagacctcccactctttggtcacttcccctgtacagagagccctaggaaaagtgactgttggacttaacataatgacagcactacaactgtcagtagcttccctttcacctcaagtatctcagcctctgtgcctaagagcctagaagagtgagtcctgaacacacatacatttctactacataacctgaaacatctcacttgcttagggagtcttcagatataaatgcagcttgtatgtatgtgtgcaagctttgggagagggtaggcaacatgtaacttgtaaatatgttaactgggagttgtgcagtacctggtgcattcacatagttgtccaaacccacggatattcatttccattctaaaaggactgaaagacagacacctaaaacagatcgaaaatacagtaactcctgatatctgtccggctctcccctttcctcattgtagactacttttatatttatctcgctctagtgtaaaacagtctctatgtgcatgtacagtgtacagcctcggtacacttatttttaaaagctcagctcataaaaggtgctcaataaaacgaatgcaatagggaggagtggctcacgtctttaattccagcactcaagagctatagtctttacaaagcaagttccaggtcagtgagaccgtctcaaattatgtattttaaaaaacaaaacaaaacaaaacaaaataaaaaaacaacaaaaaatccttgacaaacacacgtgtcctaagcccacgtgtctgactgttctagtcaaaaagttaccaaccaaacgcgaaatcagggtcttttttctttccttttttttttaagggagtctggagtagggtcacaaggcagtaataccaacaggaacgctgacgaagcaacagtatgggaaatcagcaaagaacccttgacagaaataaatgcgacaaggagtctgcaagcgcggcagcagccactcaccggtgcccggggccgtgacgtatgtgcgccgcgggttcgccagcaccgtgccgtcgcggaccacgcccacgccaatcttgttggcgctgccttcgaaccccagcaccgcgggcatgataccccgtgattcgggatcgtggaactgaaggactagctgtaaccggcaccgcgatgaacgacccagaaccaagcgaagggaccttcaggcgccagaagttatgtcacgagtggcaggcgaaccaatcaccgcgctctagaaccacgtgggggcggagccctcgaatcacgtgacaacaccaatcgcccacgtgggaacagacagactccattctttgtgcagtgaggggctccctgcctcgttgggaggtcaggtaccaggcttaccccgtttcgcgaccttgtttgccgaagggcctaacgcgggcgaggggctgcgaggctcaaggcggggaagactgggagaaccgcggtcccggtgtgcaaacgcctgcgggaggcggctcgcttcctctccttgtattttgatttcaccgtttcttatctgcaggcagcgtagtaaacactgcttcggtgctccagacgcctaagggctttcgttacagcgatgccgaagcgggggaagagagcggcagcggaagacggggaagaacccaagtccggtaaggtggtgaaatgaaccggatcgctcccctccccccaggcaagtttggggctttactagaccgccattaactacttgcttaatatggaccaagttacgttgcaggattccgagatgtttgggtaactagagcgcctaacgagatcatagttaactctgaggttggaaactgccagctcttactacttgacttattttatagagccagagaccaagaagagtaagggggcagcaaagaaaactgagaaggaggccgcaggagagggccctgtcctgtatgaggaccctccagatcagaaaacgtcagccagtggcaaatctgccacactcaagatatgctcctggaatgtggatgggcttcgagcctggattaaaaagaaaggcttggatgtgagtacaattgagggacgtaaactttacttgatagactcttaaggatcagtcatcttgtaggctttttttcctggagattggttccaaaaagtctgttctttaaaccccaaccccctcatttctttcttttttaaactagtctataatgtcgggggggggggatatgcccttgtgtttctaccatatcctcaatcccagtcatttaagatccaagtgggctgagggctggagttgctcagcagttaacagacattgctgagcttgcagaggctccaattaggtttcccgcactccactcaggtgactaatgggcattcactcccacacacagtttgtttatatatcctgctgcttggattccttcggcatattgtatgtagcaatttttaattttccacattgtcattcagtgggtaaaggaagaagcaccagacatcttgtgcctccaagagaccaaatgctcagagaacaaactcccggctgaactgcaagagctgcctggactcacccatcagtactggtcagctccatcagacaaagaaggatatagtggtgtgggcctactttcccgccaatgcccgctcaaagtctcttatggcattggtgagacctcaatggcattcatgtctgaatgttcttcattttactgtactatttctttaacattttgtgctgcttttcatttttatataggtgaggaagaacatgatcaagaaggccgggtgattgtggctgaatttgagtcctttatcttggtaacagcctatgttccgaacgcaggaaggggtctggtaagactggagtaccgacagcgatgggatgaagccttcagaaagtttctaaaggacttggcttcccggaaacctcttgtgctgtgtggggakctcaatgtggctcatgaagaaatagaccttygkraccccaaaggaaacaaaaagaatgsyggttttactccccaggagcsccaaggctttggggaaatgytacakgctgtaccactggstgacagcttccggsatytytacccmaacamtgcmtasgsttawactttytggacttacatrawgaadgcccgctctaaraawgytggttggsvccytgawwactttwtgctgtytcactytyttttacytgctttgkgcgacagcaaratccggwccaaggstyttggcagtgrccactgtsccatcaccctttaccwagcactgtgacactycycycaagtagsttmawgbtgggaaawagcctyctytcctccasgagaccagkgsgktatytyttyttmaggkgtttactmcmctytaaaccaaacttytggtttyctttaaacaatccaagtgaaawaaaagtccymcttttcmamwwmawrrwmwmwrwmmmwwwwtgagtctaaatattccccctttcaaacacaaaacttkttwwwtkkkwwwkkttacagtcatgacattatttatttacaagcacagatgaatccctgacctctcccaagacagtgaccctacctcagcccagttcaatacttcaactggaagtaaagccrgaaggaggaattcagggatgcacagggttaggggaacatatcccatattaaatagttatatatatacacaacagttcctgtagttctgtacagagcagtggctgaccccaccccacgggacccgaaatgtggggagaagagactgagggtgttgaggccggagccagcccctggtraagtgcaatascagcagcaaggtyctaacggtacacaagagggrrgggaacaccccctcccactttcmacccccaccctgccctggaakgtactgagggacaggaatggttctcaaagagcacatacaggaaggacatggctagaaccatctttaggawccaggcttaggggcaatgttgtctatttaccctaaacagcagtccttgkragawagcagscagtcagcaatggtcttccctacccctccaaacctaagtcaggggctggttccttcctacctctccccagggaaaagggagccagctgtttggcttcctttagaagtccagagagccttttgtagtgttactgtggtaccaggcagccgccaggcacacactgcatcaaggggctcaggagaagttctggacaggatggctgaccttcatacagccccagtaaagggcccggcccaaacatagaacggccaacaaaatgacaaacgcccaggctgcgtagatacctccatattgctgtgcaggcttccatgtgccaaactgacaggaggaagaaaaaaaagataaggttacttttggtatccactgtttcaaagtcttagaaacagtaatgcaatgcaaacttctgtctctgcagcccaatcacttgtaacaccctcagggaccaagatcaggtgttttagctttcttcccttaagcaggaaagtactctgccatcccaggcatcagccagcatttcttacacctaccaagtgaaccaggattgccgataactcatttctctctccagagtgggaacactgttttacttagtttattagtgacctctgacttgagttcacctctacctaaatacaaacccccgaccccatcaccagactcattcattcacttcagttttttgtttttttgtttttttaaggctagtgtctcatgtcagcaccctgagcagcctcaaatcctatagttaatggtcttgaaatcctatcctcctgcctccacctcctagtactgggaccatagctttcagggctatgcccagttctgctcagtttatgtggtgctggagatc

SEQ ID NO: 495 - DNA, 361 bp, Rattus norvegicus
caacaagaccctgcccgtggccttcaaggttgtagccctcggagaggtacccgatgggaccgtggttaccgtcatggccgggaatgatgagaactactctgccgagctacgaaatgcctctgctgttatgaaaaaccaagtggccaggttcaacgatctgagatttgtaggccggagcggacgaggcaagagtttcactttgaccataacggtcttcacaaatcctccccaagtggccacttaccacagagctattaaagtgacagtggacggtccccgggaaccaagaaggcacagacagaagcttgatgactctaaacctagtttgttctctgaccgcctcagtgatttagggcgcatt

SEQ ID NO: 496 - DNA, 1644 bp, Rattus norvegicus
cggccgcgcccttagtccgtggctccagcgatggatgcctggccggtgtcgtccctttgaggacaactggacaggcggcccccatctgggtgattctactggccaggttcaggacatcggggcgggcgtggctggcccctatgaagttaccgcgcacagtaktggagagtcgggcgtttaacgttggcggmtggagttgggtgaggcagcattakattcgtayctacraakcacwwggmkwgtsysrkcactttsrmtwaamgstsytcakkatcstacacygrgmaktctytggmgrttagcksrtagmcmgraaaatcaagaaagatgtctaagcaacaaccaacccagtttataaatccagaaactcctggctatgttggatttgcaaatctccccaatcaagttcaccgaaaatcagtgaagaaggggttcgagttcactctgatggtggtcggtgaatctggtctaggaaaatcaactctcataaacagcttattcttgaccgatctctacccagaaagaattattcctggagctgcagaaaaaatcgaaagaactgtccagatagaggcttcgacagttgaaatcgaagagcggggtgtcaagctgcggcttacagtagtggacacgcctggctatggggatgccatcaactccagggattgtttcaagacaattatctcctacattgatgagcagtttgaacgctacctacacgatgagagtggactgaacaggcggcacatcattgataacagggtacattgttgcttctacttcatttcaccttttggacatggactgaagcccttagatgttgcatttatgaaagcgatacacaataaggtgaatattgtgcctgtcattgcgaaagctgacactctcactctgaaggagcgggagcggctwaagaaaaggattttggatgaaattgaakagcacagcattaaaatctatcatttacctgatgcagaatcagatgaasaygaagactttaaggaacagactakactcctcaaagccagtatcccatwctctgtggttggctccaaccagytgattgaagccaasggcaagaaggttagaggccgtctctacccgtggggcgttgtcgaggtggagaacccagaacataatgactttctgaagctgagaacaatgctcatcacccacatgcaggacctacaggaagtgacysragamcytcaswaygawaactkmckttctgagaggctgarrasarkskkcakgaargtagagaatgaggacatgaataaagaccagattttgcttgaaaaggargctgagctccgccgaatgcaagagatgattgcgaggatgcaggcgcagatgcagatgcagatgcagggcggcgacactgacagcagcactcttgggcaccacgtgtgaggtccagcttcaatgttggaaacactttggataaaaagaaagtcttcctgataagtgctacagcatcaagtttcttagctccgtggaagggtacccatctacattgaagtgcctgtgtctgaggatttcagttgttttgttgtgttttggttttttaacatttgatttttggttttttttttccttctttctccctccaacccctaaccccccaaaaaaaaaaaaaaaaaa

SEQ ID NO: 497 - DNA, 2574 bp, Rattus norvegicus
gcatggacacggcgctgaaacggagccgctctgaggagccggtggagctcccgccgcccgcccgggaggcggaggagaaagaggaggaggaagagaggatggaacagggcctggaggaggaggaagaggtggacccccggatccagggagaactggagaagttaaatcaatccaccgatgacatcaacagacgggagactgaacttgaggatgcacgccagaaattccggtctgtcctggttgaggcgacggtgaaacttgacgagctggcgaagaaaatcggcaaggctgtagaggactcgaagccctactgggaggcccgcagggtggcaaggcaggctcagctagaagcgcagaaagccacacaggacttccagagggctactgaggtgctccgtgcagccaaggagacaatctccctggccgagcagcggctgctggaggatgacaagcgccagtttgactctgcttggcaggaaatgctgaatcacgctactcagagggtcatggaggctgagcagaccaagacacggagcgagctggtgcacaaggagacagcggccaggtacaatgccgccatgggccgcatgcggcagctggagaagaaactcaagcgagccatcaacaagtccaagccttattttgagctaaaggccaagtactacgtgcagctcgagcaactgaagaagacagtggatgaccttcaggccaagctggccctggcgaaaggcgagtataaggcagccctgaagagcctggagaggatctcggatgagatacacgagcggcggcgctccaatgccatggggcctcggggctgtggcgtgggggcagagggcagcatcacctcagtggagaacctgcctgcaagcaagcctgagcctgatgccatttccgtggcttcagaagcctttgaagatgacaactgcggcaacttggtgtctgaagatgactcagaaacccagtctgtgtccagctttagttcaggaccaacaagtccatctgaaatgcctgaccagttccctgcagtggcaaggcccggcagcctggatctgcccagccctgtgtccctgtcagaatttgggatgatgttcccaatactgggtcctcgaagtgaatgcagcggggcctcctcccctgaatgtgaggtggaacgaggagacagagcagaaggggccgagaataaaatgagtgacaaagccaacaacaaccgcgttctcagcagcaccagcgctggcggtggcaggagcaggagccaaagcagcacatccctcgagggtcaggccttggaaacccgtatgaagcagctctccctacagtgctcaaaaggaagagaaggaataattgctgacataaaaacggtgcagattggctgatccacccggggctgtggcccatgtgcagctcgtatttatacacgaaatccaagaacattgtgccaataatcatttaacataagccaaatagtacgcacttactctagaccacactaacaagtttcagtgaccttgagggccaagcaatgtccccctggtaagagctcttgggctggtgcgtttttcagagcagagccactgcaggtaaactgtgcccagggccacggccttggcagagccttccctgtggaagcaataactagtttctgtgagagaacctgagccgggagagccgggcacgtagccagactgggtcacagcctgcatctctatccctgtgtcccctccacctggggaaactgagatgattttgacatcacatcacagggcaccaaaataatttaaaaacttacataaacaaaaactcaagtgttccgaacacattgtaacaacaatgccagggacacagttcactatcatcgcctctggtgctcagaggggttaaggagcatgtcttctgggaaaccgttgaaccatttcctagggaagccaccatgaactgcactttttggggtgggaacagtgaatgccaatgtggggatggggaatgaagtagcggggacgtagatagcatagacaggatctgcggctggggacggttttatagcctgcccgccaaggggctttattctaagagacgtgcatgtgaggaatgattaccacggctctatytagattgacaaggagttcatttctctgtagactgtaatttctacaataacagattatttaaggtttatgctgcacctagaattccttagaggaaactgtccttgaagctaggaaagggagtgggcatggttggtaaatagaagcaatggatctgttatgctaatagtagtgtctagacttagtgtttctggttatgcatatttagagcactgtattttatgtgtcttgttttattaatctaccgtttctggaaaaaaaaaaaaccaacccgtttcaaactgcctgttaatgttagccatgtatgtatacctctctcttcatacacgagtgtttctcttttttattgatggacacagtatccttattacaaggttattttgtacttgttttattacctggagtgtaataaaaactaagaagactttgtgacttccgatgagaaarmmmaaaaaaaaaaaaaaaaaaa

SEQ ID NO: 498 - DNA, 3025 bp, Rattus norvegicus
cgggttcctactggcagtcttcagctgaagcgcaggggagaggaagggggaggtggcaccaggaattagcagcaagaacatcacccacccacttacccattctggggttcccctctcccgcggctggcaccttctgtgtgccgcttgggattggtccgttcttttactggtgtctgtgcggttgcctccgcggtaggaccacaaggcaaaggagtgggagagaagtccgaggcagatgggaaattgtttgatattgttgctgttattgggtgttttactcttgcagatgcctggggaatagaggcaggaaggggcatgccctgcttcttggagatacagttcttgagtcctagactctgactaacttcttactgtctctccaggcctcagtttccccacctgttggactttgctccagctctgtagtgttggaatcatgaaatggggatggccgtgtatatgtgtgtgagagagagcgtgtgcacgcacgtgcatgtgtgaatttccacgtgcctgtattctcatcgtcctctctctttctcccgacttttccctccccagatggcatgatcaacattgacatgaccggagagaagaggcccttggatctcccatatccgagtagcttcgctcccatctctgcgcctagaaaccagaccttcacttacatgggcaaattctccattgaccctcagtaccctggtgccagctgctacccagaaggcatcatcaatattgtgagtgcgggcatcttgcaaggggtcacccctccagcttcaaccacagcctcttccagcgtcacctctgcctcccccaacccactggccacgggacccctgggtgtgtgtaccatgtcccagactcagcctgaactggaccacctctactctccaccaccacctcctcctccttattcgggctgtacaggagacctctaccaggatccttcagcattcttatcgccgccacccaccacttccacctcctctctggcctaccagccacctccttcctacccatcccccaagccggctatggacccaggtctcattcctatgatcccagactatcctggattttttccatctccgtgccagagagatccacatggcgcggctggccctgatcgaaagccgttcccctgccctctggactccctgcgggtcccccctccgctcacgccactctccaccatccgtaattttactcttggggggcccagtgctggcgtcacgggaccaggggcaagtggaggcggtgagggtccccgactgcctggcagtgggtctgcagcagtgactgctaccccctacaatccgcaccacctgcctttaaggcccatcctgagacctcgaaagtaccccaacaggcccagcaagacgccagtgcacgaaaggccgtacccctgcccagcagagggttgcgacaggaggttctcacgctctgatgagctgaccaggcacatccgaatccacaccggtcacaagcccttccagtgtcggatctgcatgcgaaacttcagccgaagtgaccacctcaccactcacatccgcacccacaccggggagaagccctttgcctgtgactattgtggccgtaagtttgcccggagtgacgaaaggaagcgccacaccaagatccaccttcgccagaaggagaggaagagcagtgccccctcgtcatctgcatccgcccagtcttcagcctctggtcctgggggctcgcaggccgggggcagcctgtgcggtaacagcgccattggaggaccactggcctcctgcacctctcggaccaggaccccgtgagatgaagctccagctgacacaccagtttcttcaggccccagaggccctctatccactcgagctgcaaacactaccgcccttctgtgttcttccccgtgatcccgtgaacctgtgatcctgggcaaaggaccctaatggagcccagctctgtcccaccttctcacagacggccttctgaaaacttaggccattttaaaggagttgactgtcactccaagaaatggggagccagaagagggctgggcgagggcccctggcctacagggctgtgctctaaccctgacagagagatgtttgactatggtctgcgagcccttccctttgaccctcgatgccagttgctctgagactttttctacaataggttgggagttgttgattcctttgagcaaggacagcgaaaaagactaaattaaagcaaaaccgatgtggcactttaatggcttgggacggacttggggtaggggtggggggttgtacagtgagcacagtttagccctggcctggccgcagcactctgtggccctagaacagtgaatggaagtttctcgagccatctcagcccttaagcaatatgtcctataaactcaagagaacgaacggaagtgcaatgtcgggaaggacaaagcaatattggctcctttttgttgagaaacaaagattatttttccagtgtatatccatttagatttttgtgtwttttttttttttgatgtgcactgttctccgagttctgaacctttgggaaaaaagtgtaaaacatttatgatctcttgaatcgagtcaaaagttaacttatttaaaggggggtgtacataggatgcatgcagtggtgttgcaagtgtcctctgtgccttgtgtgatgtgggcagtgttacagggtctgcatgtgtacaggatgccttactatgaaaaaaaaatcactccctgggtttaagtatggctgtatatttctgcctattaatattyskmrtkyykttagaaagtatatttttgtatgctctgttttgtgacttgaaagtgttaccttcgcagtcaaatttcagatgagagtgtgcttaacgtcactgcagctgacttgtttggttattagctcttaatagttgtggaaagattaaacaatctattctaacacagaaccactaactggagttcagatatcggacggcttatggcaatggtgtaaaataaatacttttcaacaataaaaaaaaaaaaaa

SEQ ID NO: 499 - DNA, 1033 bp, Rattus norvegicus
  misc_feature (174)..(174): n is a, c, g, or t
ttcggtttcgttgtgtttgatgactcggaaccagttcagaaggtccttaataacaggcccatcatgttccgaggtgcggttcgcctgaatgtggaagagaagaagactcgagctgccagggaaggcgaccgcagggataaccgccttcggggacctggaggcccccgtggtggnccgagtggtgggatgagaggccctccccgtggaggcatggtkyagwwccagrctttggcgtgggcagggggattacaactccaaggcagtgaattgcttggctcagatctccacacagcacacagccccggctcctgcagaatggtgaattccttcaaccagcctttggtgtcttggagtagtctattataaactgcttgmgkyygyacrattttwwwwwmrmwwrwrwwmawggtgtgtgctccccaaacccctttcctcccttgaccttttagtccttcattcccagttttccggaatgatactttaggaggaatagatttgtaaagacgaagaggaaagactgaccttcctgctcacgctgcakasacagactggagtctcacggccattccccagagtgtctcgggtttcactgaccacggatgtttcatttgttgggagacacaggatttgataaacattttggaagcgggaaaaatcaagtcacaactcctttctggtgtggaaaaattgccttttggcaactgccactgggtccctgcaggtgtggctaactgaataaaaggtgttcttttgacatgtgattaccaaacaattctaaacctccatttttaccattggatttttaaattgtgatgtagcctgtcaatgtctagaacacagctaaagacttttgttgaactgttagatttttttgaggtagagtttttcatgttttatttgtatttgtmaaaaaaaaaaaraaaaaaaaagaaaaaagaaaaaaggacaaaaaattcccacgagaaaacaaaccccagatctgatgacaaaaccaagcaacacggtgccttctatttatcgttgactccggccc

SEQ ID NO: 500 - DNA, 1914 bp, Rattus norvegicus
  misc_feature (1554)..(1554): n is a, c, g, or t
cggccgccccgggggatgcggctgcctccctaggctggcgtgtasggagggcgggtccccggcctcggcggcgcggcggtggwggggacagcggccatggcgacccctadcaacctggggtcctccgtcctggcgagcaagaccaagacgaagaagaagcacttcgtggctcagaaagtgaagctgttccgggccagcgacccgctgctcagcgtgctcatgtggggggtcaaccactcgatcaatgaactgagccatgttcaaatccctgtcatgttgatgcctgatgacttcaaagcctactcaaagatmamggkggacaaccaccttttcaacaaggaaaacatgccgagccatttcaagtttaaggaatactgcccgatggtcttccggaatcttcgggagaggtttggaatcgacgaccaagatttccagaattccttgaccagaagtgcgccccttcccaatgactcgcaggctcgcagcggggctcggtttcacacgtcctatgacaaaagatamgtcatcaagaccattaccagcgaggacgtggcagagatgcacaacattctcaagaagtaccaccagtmymtmktkgaatgccatggggtcaccctccttcctcagttcttgggaatgtaccggcttaatgtcgacggagtggaaatatacgtgattgttacgaggaacgtgttcagccaccgtctctctgtgtataggaagtacgacctgaagggctcgacggtggctagagaagctagtgacaaagaaaaggccaaagagcttccaactttaaaggacaatgacttcatcaatgagggccaaaagatttatatcgatgacagcaacaaaaagatattcctkgaaaamctgaaaaaggatgtcgagttccttgcacaactaaaactcatggamtacagcctcctggtggggattcatgatgtggagcgagcagagcaagaggaggttgagtgtgagkasaacgagggggaagaagaaggagagagtgacggtgcccaccccatcgggacgccacstgacagtcctggaaacacactcaacagctcaccacccttggctcctggcgagttcgacccaaacattgatgtttatgcaattaaatgccatgaaaacgcacctaggaaagaagtgtacttcatggcgattattgacattctcactcattacgatgcaaaaaaraaarctgcccacgctgcgaaaactgtaaaacacggcgctggagccgagatctcgaccgtgaacccagagcagtattcaaagcgctttttggactttatcggacacatcttgacgtaacctcctgcatagtcccggatgggcacgagctcgggaaggctggtggcggcttcggtgtaggaataaaaaaaarraaaawggaactccacgaagcactcaccttgcaggaagcaaacccttgtttacatcttcaagccgggatgactgaagttgggggctcctcgctttaacagctacccgatatttcccagcgccgccgctacttctgactctctgtgtgtgcgctcgctcgcactntgtgtgtgcacacacacgggcgcactctctcttgtgcacattttaaagtaattaattaattaataattaattaaaaccaatcagcttgaatcagagcttgtaacagccagacccctctgattccggctgtggcagcatggatggatgaagagacaagctgggggaggggaccagaaatgcacctcatcgcagcaccaccagagaagctgtcgatcagtttgttttctgacttgaaagataggagattgttcatcatggtggtggtggtggtggtgatgatggtggtgatgatgatgattaaaaaaaaaaaaaaaaactcgagactagttctctctctctctctctcctcgtgccgaattc

SEQ ID NO: 501 - DNA, 2108 bp, Rattus norvegicus
cggtgacgtatggtcgcctgctccttggcagctgtctttatggaccagtagacagagcgaaattgacgctgacaagactttcgcgtcttggaaggcactgtaatctactgtagtgaagaacagagcctctcaatcaggcgggtggaaataagagagacagaggggagtccaaaagaaaaggaagaggagggggaaaagtgtgtgttgtggggaagcagggaaaagcatttttggtggatggtatgaagccagccatggaaactgcagccgaggaaaatactgaacaawgycaagagagaaaaggttgcttcgaatgctgcatcaagtgtctgggaggagttscctatgcctccctagtggccaccatcctatgtttctcgggagtcgccttgttctgtggctgtggacatgtggctcttgcaggcaccskggcaattcttgagcaacacttctycaccaacaccagtgaccatgccttgctgagcgaagtgatccaactgatgcagtatgtcatctatggaatcgcgtsctttttcttcctgtacggtatcattctgctggcagaaggcttctacaccacaagtgcagtgaaagagctgcacggtgagtttaaaacaactgcctgtggacgatgcatcagtggaatgttcgtgttcctcacctatgtgctgggagtggcctggctgggtgtgttcggcttttctgcagtgccagtgtttatgttctacaatatctkgtcaacctgtgaagtcatcaagtccccacaaagcaatgggacctcgggtgtggagcagatctgtgtggatgtccggcaatacggtatcattccttggaacgctttcccaggcaaaatctgtggctctgccctggagaacatctgcaacaccaatgagttctacatgtcctatcatctgttcattgtggcttgtgctggagctggtgccaccgtcattgccctgctgatctacatgatggctactacatataactatgcggwtttgaagtttaagagtcgggaagactgctgcmctaagttctaattgcataargscaataaggagctatatttagagarcycagcyctgtagcgggtgamcctcactgacacttcagactaaagcgggcckaaggtttctgcagttcgctacagtaattkgtaatagcttcagttactcactttgcatggagactaaataggacttactgtacgtgaattacaaaagaatggggtctgactattcccagtttgaaagggattgwtwtttactgacactggtgagcatcctttgaaaaataattttcttaaactctgagcataagtatctctaagtgaaatattaacaccttgacacaccgtttgtttttccattttgwttgcttgcttgataaccagccttagcgatggccaagagaacaagtgctgaaggcggaaaggttgaacctagctttcattytgtcatycctttctagaaaagattttgcaagtagagktaaaattaagktgaaaaggtctttatatcacatgghtggctcactaccaaataaatgccaagktagacaagataaaaatttgaagsccatcacccatttgatttttctgaaaamtgattacatatttttgatacaacaccattaaggtctttagamcccacaamcctgataactttcaatcaccttgctacatagcaactgttcccttacaactaggttcttaaattacatggaagattttcatgaagagaagttgggcccagatctgaggktctcatctatgttgagaaggaagtatggcatgagaaaggagtctggcctttaaggaaactgagttgtgcagatttgttttgggcaaggggaaaatacatgggaaggatgcatgtgccacagaaactgtaaagaatgataaggattttcatgtgaagtgaacttagaggaaatgaaatattggcagttataaaaggaagaaaatagttgctaaaaattgtttacagactgcatatttttaattttggttttgacattcatttaatttctycatgttaaatatatacttctataatcatttacgcaaaataaacattttttcacacywdraaaaaaaaaaaaaaaaa

SEQ ID NO: 502 - DNA, 1908 bp, Rattus norvegicus
tctagatgcatgctcgagcggccgccagtgtgatggatatctgcagaattcgcccttactcactatagggctcgagcggccgcccgggcaggtcagaaggatcttgacttcgatatggacagcagcatgaatggagcaggtcctcttgggcctgcggagccctcagcaaaggtggcccttgagaggcggcggcggcggcggccaggacataccctctgctgtggcgggtgctccaagcgctggtcgtacttttggggcgccccagtgaccgccttcctgggtaacgtggtcagttacctgctgttcctgctgctgtttgcacacgtgttgctggtggatttccagcctacaaagccgggcgtcttcgagctgctgctgtacttctgggccttcacgctgctatgcgaggagctgcgccagggcctgggcggtggctggggtaccctggccaacgggggacctggtcctggcaaagctcccctgcgccatcgtctgcacctctacctcttggatacttggaaccagtgcgacttgctggcactcacctgcttcctgctgggcgttggctgcaggctgactcctggcctgtttgacttgggacgcacagtcctctgtcttgacttcatgatcttcacactgcgcctgctgcacatcttcacggtgaacaagcagctggggcccaagattgtcatcgtgagcaagatgatgaaggatgtattctttttcctcttcttcctctgcgtgtggcttgtagcttatggggtggccacagaggggatcctgaggccccaggaccgcagtctaccgagcatcctgcgcagggtcttctaccgtccgtatctgcagatcttcggacaaattccccaggaggaaatggatgtggccctcatgaatcccagtaactgctctgccgagcggggctcctgggctcacccggaggggccggtcgcaggctcctgtgtgtcccagtatgccaactggctggtggtgttgctcctcatcgtcttcttgctggtggccaatatcctgctgctcaatctgctcatcgccatgttcagctacaccttcaacaaagtgcatggcaacagcgacctctactggaaggcgcagcgctacagcctcatccgggaattccattcgcggcctgccctggccccacccctcatcatcatctctcacctgcgtctcctcttcaagtggctgcgcaggtgtcataggactaacttgcccgcctccccagtcttcgagcacttccgtgtctgtctctctaaggaagcagagaggacgctgctgacttgggagtctgtgcacaaagagaacttcctattggcacaagctcgtgacaagcgagacagcgactcggagcgtctgaaacgcacgtcccagaaggtggacactgcactgaagcagctgggacagatcagagagtatgaccggcgtctgagggggctggagagagaggtccaacactgttctcgagtcctgacttgratggctgaggcccttagccactctgccttamtgcctccaggggggccaccccctccaagccccactgggtccaaagactgagtgtccctggtggacatctaggtgtttgcatcctgagagggttcattccgagagctgcgcccagtctgcctcaagctacacaactggtggccttgtcctcaccgtagaccccatgttcaggggttgctgtctcgccagagggactgccttccaggagcagcctgaccttgggcagatcaagctctgagctggcaatgttggcccctttgtgggcccagccacaagcagaggagkccagaaggtcctggggtgcaggaaccacagaccytatgcacagcttccccacaatggggaaataaagccatttgwtgrgawdwhmaaaaaaaaaaaaaaaaa

SEQ ID NO: 503 - DNA, 2655 bp, Rattus norvegicus
atgaaagcaaactgtgtgaaaatcgccggtaaccagttaggtctgtgctgtaattaattcagtgtctcttttaatcaaactgaaaaagaatcgggccgcggattgtagagccgtgacatcacccccaaaatcggcccgaaccaatcagcgtcatcactccggggacacgtgggtgagtcccctttttaaaaaaaacacaacacaacgaaaaaaaaaaagagagagaaagagagagagagaaacaacaacaaaaaagccagccctaaagtaaaagtgacacaagttctatttttttttttaaaggaaggaggggggttggcggcgaaggcgcgcgccgaggacaggtgagagctgcagtgggagcggcagggagctgtccacggtgctgacrggccctggcggggccgagcgtgcacgcaggagctctggggccaggtggggctgcttgatcctggggccgcggccgctgtccgcggtgctgagacctccaggtgcgctccgttctgcctgctggtaacgcggcccgggccggctgctatccgccgtgctgacccctgccctgggctaccgtttgcctggaggaagcgtgccgtttggattttgctttttcaaaagacgatctttattcagattccatcagcctcgcgtttcttcagtgccaaaggggccctcgggccgttcttctaccctttggctcttcccaacttggcgcgccctcctcccattcctccctgacactcccaccaccaccaccccaccccctcggctcggcggctcggcgcggtgctgcagaagacgctttgagcccttttggatgtgatgcgcagaggaggttggcccagagctcccaggctcccccaaggctgaactccatccaaggtgcccacaggctccctgcccgccttccccatgccagcccgcagctaggggcaggggcagcggcggctggggttgggggtgggtggggagcttttggggaggacaggtcgcagcttggctatggaaggctccaatggctttgggattgactccattctctcccaccgagcgggcagccccgcccttcccaagggggaccccttgcttggggactgccgttcacccctggagctgagtccacgctcagagagcagcagcgactgctcttcaccagcctcgcccggaagagactgtctggagaccagtacctcgcggcctggtgcagcatctggcccaggtttggactcccacctgcagccggggcagctttcagccccagcccagtcgcgaactgtcacctcctcctttctgatcagggacatccttgctgactgcaaacctctggcggcctgtgcaccctactctagcagtgggcagcctgcagcccctgagcctgggggccgccttgcggccaaggccggggaggactttcgagacaagctggacaaaagtgtcagcagcgcttcatcggactctgagtacaaagtgaaggaggagggcgaccgcgaaatctccagctctcgggacagtcctcccgtgcgcctgaaaaagccacgcaaagcacgcaccgccttcaccgaccatcagctggcgcagctggagcgtagcttcgagcggcagaaatacctgagtgtgcaagaccgcatggagctggccgcctctctgaacctcaccgacacgcaggtcaagacctggtaccagaaccgcaggactaaatggaagcgacagaccgctgtggggctggagctgctagcggaggcaggcaattattcggcgctccagagaatgttcccgtcgccttatttctacccgcagagtctcgtttccaacctggaccccggcgccgcactctatctgtaccgcggacccagtgcgccaccacctgccctccagagacctctggtgccccgcatcctcatccacggactccagggcgccagcgagccgcccccaccgctgcccccgctgcccggcgtccttccgcgcgctgcgcagccccggtgaagcgcgcgcttgccccaagccatgctctgggacccacagctcagcctgggcgcgggtccctcccttcgtcccggggcagggctgcccggctccccgccgcagcccagtgtccccgtgggaaagaaattcactgaggctacccctcccctgcgtcctctcttggctgctccatccaggaaccactcacacccgccggatgtacatatgcgcccctgcccacctctcagccacccccaggtccctgccggcttccccaggtgtcccctgtcccctcagcagcaggtaggggacgccggtctcccagacctgggcccacccttcttgcgcctctgcgggacagggtgggagcgctgtacggagtttccctcccatttcttttattctccctgagccccgggctagcagcggagctgtacatacagtgtgcaaagtgtatatgaagttatttattcgtgacccatgagcccgtgaccgtgtccgtgaatcagtgagtctgtggcctgtgccctccccatcccgggtggggcaggaaggggccgagagggcttgcccacgcgtcctggcccccagccccgctcgctccacccaggtcccaggacagccagatctcttgggttctctttttttaaatgtggaaataaacttcttacaawtgaaaaaaaaaaaaaaaaa

SEQ ID NO: 504 - DNA, 2389 bp, Rattus norvegicus
aggggaggagcctcccctcccccgccgggaggggaagggccgtccccctagtgctgctttcagggccaaagtaggttgcgagtgggaggcggtggctgcggctccacggcttggggaagatggcgccgccggtgacggaacgggggctgaagagcgtcgtgtggcggaaaataaaaacaacagtgtttgatgactgccggaaagaaggcgagtggaagatcatgctgttggatgacttcaccaccagacttctgtcatcgtgctgcaaaatgacagaccttctagaagagggtgtgacagttatagagaatatttataagaatcgtgaacctgtcagacaaatgaaagctctttattttatctctccaacaccaaaatctgtagattgtttcttgcgagattttggaagtaaatctgagaaaaagtacaaagcagcatatatctacttcactgacttttgtcccgacagtctctttaacaagattaaagcatcttgctccaaatcaataagaagatgtaaggaaataaatatttcctttattccacatgaatctcaggtttacactcttgatgtaccagacgcgttctattactgttacagtccagaccctagcaatgccggcagaaaagaagcagtcatggaagcaatggctgagcagattgtgaccgtgtgtgccactctggatgagaaccctggagtgaggtataagagtaaacctctagataatgccagtaagcttgcacagctggttgaaaagaagcttgaagactactacaaaattgatgagaacggcctaataaagggtaaaactcagtcccagctcttaataattgaccgtggctttgaccctgtgtccactgtcctgcatgaactgacctttcaggcaatggcatatgatctactaccaattgagaaagatacatacaaatataaaacagatgggaaagagaaggaggcagttcttgaagaagatgatgacctgtgggtgcgggttcggcaccggcacatcgcggttgttttggaggaaattccaaagcttatgaaggaaatttcatcaacaaagaaagctacagaggggaagacctcactcagcgcgcttacccagctgatgaaaaagatgccgcacttccggaaacagatctcgaagcaagtcgtccatcttaacctagctgaagactgcatgaataagtttaagctgaatattgagaagctctgcaaaactgagcaggacctggcacttggaacagatgcggaaggccagcgggtaaaggactccatgctggtgctcctcccagtgctgctcaacaaaaaccacgacaactgcgacaaaatacgggcagtcttgctctacatcttcggtgttaatggaaccactgaagaaaacctggacagactgatccacaatgtaaagatagaagatgacagtgatatgattcggaactggagtcacctcggtgttcccattgttcccccatcccaacaagccaaaccaccaagaaaagatcggtctgccgaagagacttttcagctttctcgatggacaccttttatcaaagatatcatggaggatgccattgataatagattggattccaaagaatggccatactgttcccggtgcccagcggtgtggaatggctctggagctgtaagtgctcgccagaaacccagaaccaactatttagagctggaccggaaaaatggctcgaggctgattatttttgtaattggaggaattacatactctgagatgcgttgtgcttatgaagtttctcaggcacataaatcctgtgaagttattattggttccacacatattttaacacccagaaagctgctggatgacataaaaatgctgaataaatccaaggataaagtttcctttcttaaggatgagtagcttttttattgtggtttagaggttttgttaacatgcacagctaaagcagatgctgctgcggtcactgaagcggtgtaaatagtgtgtggaggaacacggtcttcaggtggacacctcgaggacgcttatgttactggatttgccatttctaataatttaagtactgttgctgctttggtcaagacatgatgttaacgggccttgtaatcaggcagttttcaccttggagcagaacctgttctgaggtgtgggtgttttcacagccagctgtatatgtgcccactaattactcactggatacttatgctgaaattagtgcgggcaaaaacgactttgaatgaagagatcataaacgtaaaaactgtaaatgtatgtatgatagagttattataatgcagtttcttaagactgaaattcataatttttatgtataaaataatttgttattaatatgatgacttcactgtgtatattacctgcaagataat

SEQ ID NO: 505 - DNA, 1486 bp, Rattus norvegicus
actgtcgttttcagacagactctgcgggctccgacccgagccttagaaaccggcctcgaatcgggactgggacccgggcctgccgggcagctgaggccggagcggcgggagcgcgtggcgcagcctcgagccctgagccccgtcctgcagccccgagagatcgatggtgcgcgggcgtcgtcgctgtgggcgcgggcagccctggggggcagccgcttaggcgccgctctcttgtccccaacaggtcgcagcccgggtggccgggcgctcccagctccggctcctggagcgccctttgcggtccccacctccatggacgccttcaagggaggcatgagcctggagaggctaccggaggggctgcggccaccgccaccgccgccacacgacatggggcccagcttccacctggcccgcaccgccgacccccgggagccgctggagaactcagccagcgagtcatccgacgccgatctgccagacaaggagcgcggtggagaggccaaggtgcctgaggatggcggcgcgggcagcgctggctgcggcagcgcggaagacccagccaagaagaagaaacagcggcgtcaacgcactcatttcacaagccagcagttgcaagagctggaggccacgttccaaaggaaccgctacccggacatgagcatgagagaggagatcgcggtgtggaccaacctcactgagccgcgagtgcgggtctggttcaagaaccggcgagccaagtggcgcaagagggagcggaaccagcagttggacctgtgcaagggcggctacgtgccgcagttcagcggcttggtgcagccctacgaggacgtgtacgccgccgccggctactcctacaacaactgggccgccaagagcttggcaccggcgccgctgtccaccaagagctttaccttcttcaactccatgagtccgctatcctctcagtccatgttctcggcccccagctccatctcttccatgaccatgccatccagcatgggcccgggctccgtgcccggcatgcccaactcgggcctcaacaacatcaacaacctcacgggctcctcgctcaactcsrcsakgtcgccrggcgcctgcccctacggcacccccgcctcgccctacagcgtctaccgggacacgtgcaactcgagcctcgccagcctgcggctcaagtccaagcagcactcstcgtttggctacggcggtctgcagggtccagcgtcgggcctcaacgcytgccagtayaacagctgaccgccccgccgggtccccggggccgccggccggcaaggcgcakcgggagcgcgcggagcacacggggcgctcgcagcacctgggacctcacctctgcgcagccccttcctccccaccctgcctccaggttggttttgtgtttgcttttccggaccccgctctgcccccaatgaataaaaaagggaaaaaaaaatcaagccaagggagggggtgggggagagaaagc

SEQ ID NO: 506 - DNA, 1285 bp, Rattus norvegicus
cccksagtycsgrwskmssggagtccaggctggctagctgagatgacttccctgggtttggtgatggagaacagccaggtgctccccgcctttctgctctgcagcacactgctggtcatcaagatgtacgcggtggctgtcatcacaggccaagtcaggctgcggaagaaggcttttgccaaccccgaggacgcgttgaaacgtggaggtctccagtactgcaggagtgacccagatgtggagcgctgcctcagagcccaccgcaacgacatggagacgatctaccccttcctcttccttggtttcgtctactcattcctgggacccaaccctctcatcgcctggatacatttcctcgtggtcctcacaggccgtgtggtacacaccgtgscctacctgggcaaaatgaacccmcgcattcgctccggggcctatgttctggcccagttcgcctgtttctccatggccctacagatcctctgggaagtggcccaccatctgtgaccagcagctgaagcctcctcagataccacaatgggrgacggagccatgaaggctgaaccagaggacttggtgccccttctagaacagggatgggctcaggtccagggttcctggctaagctaggtgwgyrgatytcysagcyyarystgcwmmtgygygkcytwgsytyytsggaccytgggtgatgtgtccgatyasrascgcttacagattgacagaamawmmddmamvdmacaaatgccttaaacttcctcttacccataaagcaaaggacagaagattgtccaacagagccatcatgccatatagggctaaggatgagggcttctcagacytacctgtaattctggcacagccagaggaragacacgtgactggtgtgtgtctcagggcgtcctcacaagaggcccagcagtggccggctcccagtggaagtagggtgccawgttttcagaggagggcaggtcagagcttccctgtcccctgttgatacctctctgtcctgccttagstagcacaggctcagggtgaagcaaatgttcccagctcagcstgctcctgcgcggccttggctcctccaaagactgaaagtcaaggatgggctttgaccaaccgstaaaaaccgcacctgtgaggtttgaagatgccaaacatctactcctgtgaaaaatctcacctatgtgtgtgcagtgtccctccagagtcctcctgagaccggttcaggcttagccattaaacagcagagtgtgacckgtraawaaaaaaaaaaaaaaaacaaaac

SEQ ID NO: 507 - DNA, 575 bp, Rattus norvegicus
gctaattctgcctgtggctggcaacatgaaggaagaaacagctcttctggctaccgtcaccctcgtgggagttctgctgcaagtgatctctgcgcgaagaactttccacgtgtcgccgccgctcacctctggccctcccgagttcgagcgcgtcttccgagcccaggtaaattgcagcgagtactttccgctgttcctcgccacgctctgggtcgccggcatcttcttccacgaaggcgccgcagccctgtgcgggctgttykasctgttsgsgcggckssgctacttscwskgmtmcgcgmgckccgcmcagcacaggctggatcccctgtacgcgagcgcgcgcgcgctctggctgctagtggcaatggctgcactgggcttgctagtccacttcctccctggcacactacgggctgcgctcttcagatggctccaggtgctcctgccgatggcctgaggcgaaggmcctccrartcagcagaactggagatcttcgaactaaacgctggggcgcccacctccgaatcccaatttctaattaaagtttccacgrrraaaaaaaaaaaaaaaaa

SEQ ID NO: 508 - DNA, 3178 bp, Rattus norvegicus
ccgggactgggctcgtgcctcccctcacacccttcgttcctcgtgtccccagcaccccgcgggtcatggtagtcggttgccggcagagaccacgcgtctgagaccggcgatcgggccgccgagaccatggggaacaatcggggccgcaaggccggagggggctcgcaggacttcggcgccggactcaagtacaactcccggctagagaacatgaatggctttgaggagggtgtggagttcctgcctgtgaacaacgccaagcaggtggagaagcgaggccccaggcgctgggtggtgatggtggccgtagtgttcagcttccttttgctctcgctcatggccggcttgctggtgtggcacttccattaccggaatgtgaggatccaaaaggtcttcaatggccatctgaggatcacgaatgagaactttctggacgcgtatgagaactccacctccacggagttcatcagcctggccagtcaggtkaaggaagcgctgaagctgatgtacagtgaagtccctgtcctgggcccctaccacaagaaatcgactgtaactgccttcagtgagggcagcgtcattgcctactactggtcagagttcagcatccccccacacctggaggaagaggttgatcgygccatggctgtggagcgagttgtcacactgccaccccgagcacgggcactgaaatccttygtgctgacctctgtggtggccttccccattgaccccagaatgctccagaggactcaggacaacagctgcagttttgccctccatgcccgtggcaggacagtgacacgtttcactacccctggcttccctaacagtccctacccagctcatgcccgctgccagtgggtcctgcggggggacgcggactctgtgctgagcctcaccttccgaagttttgatgtcgcgccctgtgatgggcatgacagtgacctggtcacagtgtatgacagcctgagccccatggagccccatgctgtggtgcggctgtgtggcaccttctcgccctcctacaacctgactttcctctcctcccagaacgtcttccttgttacgctgataaccaacactgaccggcgacatcctggctttgaggccactttcttccagctgcccaagatgagcagctgtggcggccttttgagtgaagcccaagggacgtttagcagcccctactatccaggccattacccgcccaacatcaactgcacatggaatatcaaggtgcccaacaaccggaacgtgaaagtacgcttcaaactcttctatctggtggaccccaacataccagtgggaagctgcaccaaggactatgtggagatcaacggggagaagttctgcggtgagaggtcccagtttgtggtgagcagcaacagcagcaagattacggtccacttccattctgatcactcgtacacggacaccgggttcctggctgagtatctctcctacgactccaatgacccatgcccagggatgttcatgtgtaagactggacggtgcatccgcaaggacttgcgctgcgatggctgggctgactgcccggactacagtgatgagcgtcactgccgatgcaacgctacccaccagttcatgtgcaagaaccagttctgcaagcccctcttctgggtctgtgacagtgtcaacgactgtggggatggcagcgatgaggagggctgcagttgtcctgccgggagtttcaagtgttccaatgggaagtgtctccctcagagccagcagtgtaatgggaaggacgactgtggagatgggtctgacgaggcctcatgtgacaatgtgaatgccgtctcttgcaccaaatatacctaccgctgccaaaatggcctctgtctgaacaagggcaaccctgagtgtgatgggaagaaggactgcagcgatggctcggatgagaaaaactgtgactgtgggctgcgatcctttaccaaacaggctcgagtggttggtggcacgaatgcggacgagggcgagtggccctggcaggtgagcctccacgctctgggccagggccacttgtgtggggcctcgctcatctctcctgactggctggtctctgcagctcattgctttcaggatgagacaattttcaagtactcagaccacaccatgtggacagccttcctcggtctgctggaccagagcaagcgcagtgcctctggggtacaggagcacaagctcaaacgtatcatcactcacccttcctttaatgactttacyttcgactatgacattgccttgctggagctggagaagccggcagagtacagcactgtcgtgcgccccatctgcctgcctgataatacccatgtytttcctgccggcaaagccatctgggtcacaggctggggccacacgraagaaggaggaactkgagcactgatcctgcagaagggagagatccgggtcatcaaccagaccacctgtgaggaactcttgccgcagcagatcaccccacgaatgatgtgtgtgggtttcctcagtgggggtgtggactcctgccagggtgattccggtggccccttgtccagtgtggagaaagatgggcgaatcttccaggctggtgtggtgagctggggtgaaggctgcgctcagaggaacaagccaggcgtgtacacaaggatccctgaagttcgggactggatcaaagagcaaactggggtatagaagcatggacagacaacccaccatgaactcgcaaagggatgccccccacgcgtacctggatacassagrggatcgctgaggacatttgtgctgtggcctctcccccacatcccagactgtgaactgcttccctaggactcagaatccttccctgagcttccaaagtgggacccctcaggagttggccagagatcttctgtgctggtggcccagcccgggktggggcaaggatttgatggcagcyttcccctctaaccctgaactgggtaaagacgatgctttcctggagaactgcttccagactctaaaggaaaactatcgtcgcgctcctgggggccctatgggcagaggggctgcagggtctttcaggaagctccagccctagggaccccagaaaagagtggcacctatggctgagtttgttttgctggtatttgagagtaaaacattttatttctttttarrwaaaaaaaaaaaaaaaaaa

SEQ ID NO: 509 - DNA, 1289 bp, Rattus norvegicus
tttttttcccgcccccccgatattctaaagttaattcttctatttatcatttcctttttcgggaactttatttagtcattctttaaaaaatgcttatgtatttttcttttattgtgtggatgtttcgcttgcatcctgtaggtccaccgtgcatatgtctgatgcctgccaaggtcagaagagggtgtcggagaaacttgcttctcgccatgtgagatggagtacggcaaatgtttgatcactaatcaggaagaaaagtggaattgtatgaagtaactttttgggtttatttctttttaaactaatataaagagaaaactttatattagtccttgcctctgtccaactccatattagaaatgggagtaactgggacccccagctattatagtgacaagaactgtacaatagaaaacttcaagagggacttttaccctatcatctacctgataatatttgtctggggagccttgggaaatggcttttccatatatgtcttcctacagacttacaagaagtccacatctgtgaatgttttcatgctcaacctggccatttcagatttcctattcataagcaccctgcccttcagggctgactataatttcagaggttctgattggatatttggggactgggcctgcagaattatgtcttattctttatatgtcaacatgtatactagcatttatttcctaactgtgctgagtattgtgcgcttcctggccactgcccaccccttccagatgctccatatcaccagcgttaggagtgcctggatcctctgtgggattatatgggtcttcatcatggcttcctcaggactgcttctgaagcatggccaagagaagaaaaataacactacattgtgctttgagctgaatctccaaaagtttaaaaatctcgtcatcttgaactacattgcattaggggtgggcttcttgcttccatttttcatactcaccatctgctacctgttgatcatccgggtcttgttaaaggtggagattccagaatcaggtccacgggatgctcagaggaaggcactgaccactatcgtcattgccatgatcatcttcctcctctgttttctgccataccatgcacttcggaccatccacttggtcacatgggatgcagattcatgtatggatgaattacataaggccacggtcatcactctgaccttggctgcagccaacagctgcttcaatccctttctctattattttgctggagagaatttcaaagcacgattaagggctatattcagcaaagatcatctatag

SEQ ID NO: 510 - DNA, 1020 bp, Rattus norvegicus
atggttggagctgaaaatatgacagcatctttcagtaataacagatgtcatgacacaattgatgaattccgaaatcaggtgtactccacaatgtactctatgatctccgttgtgggtttctttggcaatagctttgtcctctatgtcctcataaaaacataccatgagaaatcagccttccaagtatacatgattaatctagccatagcagatctactctgtgtatgtacattgcctctccgtgtggtctactatgttcacaaaggcaagtggttctttggtgactttttgtgccgcctcaccacctatgccttatatgttaacctctattgtagcatcttctttatgacagccatgagctttttccggtgtgttgcaattgtctttccagtccagaacattaatttggttacacagaaaaaagccaggtttgtgtgtgttggaatttggatttttgtgattttgacaagttctccatttttactgagcaaatcttaccaagatgagaaaaacaatactaaatgttttgagcctccacaggacaaacaaactaaaaaatatgttttggtcttgcattatgtgtcattaatctttggtttcatcatcccttttgtcaccataattgtctgttacacaatgatcattctgaccttactaaaaaatacaatgaagaaaaacctgccaagtcgaaggaaggctataggaatgatcatagttgtgacagctgcctttttagtcagcttcatgccatatcatattcaacgagctatccaccttcactttttacacagtgaaactagatcctgtgactctgtccttaggatgcagaagtcagtggtcataaccttatctctagctgcatcaaattgttgctttgatcctctgctatatttcttttcaggtggaaactttaggagaaggctgtctacatttagaaagcattctttgtccagtatgacttacatacccaaaaagaaagcttccttgccagaaaaaggagaagaaatgtgtaaagaataa

SEQ ID NO: 511 - DNA, 1245 bp, Rattus norvegicus
atggtgcctgtgttactaattcttatgggagcttcggcaacactgcatgctgacttactttctcctgaaaagtttttacttctgccacctgtcaattttaccattaaagccaccggattagctcaagttcttttacactgggacccaaatcctgaccaagatcctgtggatctagagtaccatgtgaaaataaatgttccacaagaagacgaatatgatactaaaaatactgaaagcaaatgcgtgaccccacttcatgaatgctttgcagcgagtgtaaggaccattctgaagagcatccactctcccctggccagcagctgggtttctgctgaactcaaagctccaccaggatcttctggcacctcggttatgaatttaacttgtaccacaaacactgtcaaaagtagccacacccacttcaggccataccaagtttctcttcgttgcacctggcttgttggcaaggatgcccctgaggacacacagtatttcctatactataggtttagtgtttggactgaagaatgccaagaatacagcagagatgcactgaacagaaatattgcatgctggttccccaggacatttatcaacagcaaagggtttgaacagcttgctgtgcacattaatggttcaagcaagcacgctgcaaccaagcccttggatcagctgttcactctatatgccattgatcaagtgaatcctccaatgaatgtcacagtggaaattgaaaacaattctctctatatacaatggggaaaaccactttctgcctttccagtccattgctttaagtataaactgaaaatttacaacacaaaaaatggttactctcagatggaaaacctggtcaccaataagttcatctcaaaaattgatgatgtttctacatattccattcaagtgagagcagctgtgagctcaccttgcaggatgtcaggaagctggggcgagtggagtcaaccgatttatgtgggaaagaaaaagaagcccttggtagaatggcatctcatcgtgctcccaacagccatctgcttcatcttgttaatcttctcactcatctgcagagtgtatcacctatggacaaggttgtttccaccagttccggcgccaaagagtagcatcaaagatctccctgtggtgactgaatatgagaaacctccttggaatgaaaccaaaattgaaatcgtacattttgtagaagaggatggatttgaagtcatggaaaattccctgttttga

SEQ ID NO: 512 - DNA, 1656 bp, Rattus norvegicus
aaaagctatactctagatttggatggttgctggttgatacaagttgatgagagaatactgmcaacwtcawagcaaatgaarttcktyctgctgctttccctcattgggytctgctgggcycaatatgacccacayactkykkatggrmggwctkctattgtccayytgttcgagtggcgctgggytgatattgcyaaggartgtgagcgrtayttagcwcctaakggatttggaggsgtgcaggtytctccacccaatgaaaatattrtrrtyaayartccwtywagrccwtggtgggaaagatatcaaccaatyagctacaaaatwtgctcmaggtctggaaatgarratgaattcaragacatggtgamsagrtgcaacaaygttggtgtccgkatttatgtggatgckgtcattaatcacatgtgtggstygggcrmtrrwgcwggaacamacagtacmtgyggaagttayttcaayccwaataacagggamttyycwgsagttccrtaytctgsttkskaytttaaygataataaatgkaatggagrmattrakaactacaatgatgcyrmtcaggtcagarattgtcgtctgtctggccttctggatcttgcactygakaaagattatgttcgwaccaaggtggctgaytayatgaacmatctcattgayattggtgtagcagggttcagacttgatgctkctaarcacatgtggcctggagacataaaggcagttttggacaaactacataatctaaatacaaaatggttctccsaaggaagcaracctttcatttwycaagaggtcattgatctkggtggtgaagcarttmaaggtartgagtaytttggaaatggccgygtgacagaattcaartatggwgcaaaactkggcamagttwtkcgcaartggratggagaraagatgbcytacttaaagaactggggagaaggttggggtttyrtgcctwctgacagagcccwwgwvttygtgsacrassatgacaaycagcgaggacatggtgctggaggakcatccatcctgacwttctgggatgctmgamtstataaaatggcwgtyggatttatgttggctcatccttatggwttcacymgrgtaatgtcaagttwccrwwggmcaagawatttcsagaatggmaaagatgtsaatgactggrttggaccacctaataacaatggagyaacmaaagaagtgaccattaayycagacasyacttgtggcaatgactgggtctgtgaacatcgatggcgtcaaatmaggaacatggttgccttcaggaatgtrgtcaayggtcagccttttgcaaactggtgggataatggcagcaaccaagtrgcttttrgcagaggaaacaraggmttcattgtctttaacaatgatgactgggmyttgtcaasmactctacagactggtcttcctgctggcacatactgtkatgtcatttcwggagayaaagtcratggcaattgcactggamtwaaagtmwatgttggcagtgatggcaawgctyacttctctattagtaactctgctgaagacccattcattgcaatccatgymgastcaaarwtstaaraktyaaawtaaasakawwtwgattsagcayyaawmaaaaaaaaaaaaaaaaaa

SEQ ID NO: 513 - DNA, 1850 bp, Rattus norvegicus
ccccgggcggctcctttaggcagctgaagggggatttaggcccggaagatccgagtccatccgcggcggggagagggcgagcggggccggcaggggccggagcagcggcggcggcgctcggactgtcccatccgccccgtattgaggcgctgagagcgacggggcgaccagaaagcgatggtgaaagcggggccgtgaggggggcggagtcggaccggacccgcagtagcggcagcagcggcgccgcctcccggagcgcagacccaggaagcggccgggcgggcagtagcgagccgcaccgctgccatggagctgagggtcgggaacaggtaccgactgggccgcaagatcggcagcggctccttcggagacatctatctcggtacggacattgctgcaggagaagaagttgccatcaagcttgaatgtgtcaaaaccaaacatcctcagctccacattgagagcaagatctacaaaatgatgcagggaggagtgggcatccctaccatcagatggtgtggggctgagggggactacaatgtcatggtgatggagctactgggacccagcctggaagacctattcaacttctgttcaaggaagtttagtctcaaaactgttctgttgcttgctgaccaaatgataagtcgtattgagtacattcattcgaagaattttatccaccgagacgtgaaaccagataacttcctcatggggctgggaaagaaaggcaacctggtctacatcattgactttgggctggccaagaagtatcgggatgcccgcacccaccagcatatcccctatcgagagaacaagaacctcacagggacagcacgctatgcctccatcaacacacaccttggcattgaacaatctcgaagggatgacttggagtctctggggtacgtgctgatgtacttcaacctgggctctctcccctggcaggggctgaaggccgccaccaagaggcagaagtatgagaggatcagtgagaagaagatgtccactccaattgaagtgctgtgcaagggctatccttctgaatttgccacatacctgaatttctgccgttccttacgttttgatgacaaacctgactactcctacctgagacagctcttcagaaatctgttccatcgccagggcttctcctacgactatgtgttcgactggaacatgctcaaatttggtgccagccgggctgcagatgatgctgagcgggaacgccgggaccgagaagaacgattaagacactcccggaatccagccactcgtggcctcccttctacagcttccggccgtctgcggggaacccaggaagtggctcccccaacgccccttacccctacctcacatacggccaacacctctcctagacccgtctctggcatggaacgagaacggaaagtgagtatgcggctgcaccgtggggccccagtcaacgtctcctcatctgatctcacgggccgacaagatacctctcgcatgtccacctcacagattcccggtcgggtggcttccagtggtcttcagtctgtcgtgcaccgatgagaactctcctttttgctgtgaagggcagacaatgcatggctgatctactctgttaccaatggctttactagtgacacgccccccggtctaaacccgaaatgttaacgccgggagctctccaggccactcacccagcgatgcacatggggaatcaaaacacaaactaaatggacaggctccaagagctgccatcgccaggggctgccaccatggccccatgtgagctcagttgtcatggggctgggacgaagagcagagctgggaaaccttgcagagagaacccgactccctgtgaa

SEQ ID NO: 514 - DNA, 27615 bp, Rattus norvegicus
tgatatgtttcatccatcctcaataaagtatatatgcatgtcttactctatatgataccaaatattgttgtactagacaataaacagaaaccatatatatgtatgttcacatacacacgagcttacagggtagggacttcgcctatattgtttactccagtgggtccagtgctcagcacataggctcttaataaatgctagtccaatggatgagctcatggttacagaagaggaccacgcctcttctgggtgcgggttttctttacgacacttaaaccaggacataacagtagagtgaactttggccagaccagggctgaggagaacggaatgaggagctcccagaactaaactgtttggatggcctcaggcttggctactgctgcgcaggtccccacgggagtctccatcaaaaatgactgtgtaaacatgacgctaagtaagctctaggacattaaggaaatagtttctgttcagccaaaagaataaaacaccctccgggtgtggaaatgttgcagataattcaaattaatgttgcaaaggtcttccttcaactcttgtcatctctctgatgagtcagtcagtgtagatatgtcactgtcctcccaggattaaatcatgggagagatgttctactgtccgttacagaatagaagctggcctcttaaaacctacagagtggttatgtatgtcctaagggaatggctaatctacaagatgtagcctgttcataggctaggtttactagcaggatctgcagcccttctgtctatgttctcactggaatattttgttcagaagctccatggtagctgctgaaggagagacagcccgttctggacagtaagacccttctcagggctgtcagccacagtgagatctgtaacttcagagtccagtcttacagtcactaaagcctttcctctgcctgtgcagtcttgggggtggcacttgtagagaacagcatgcactgttctctgtgttggtccaggatggctggatgatgggcgagctggtacattagttacggtgagcttccaacagacttcagtgaatatcacttgtcctcaggagtggtttggcttatttctgtgatcagcctacattcaccaagttcccgatgctttgacgtctagatcattgctgcctttagagtgtatctttcatgtgcaaaccaacccatgcctcagctacctctacatctggctctcatactctaacctactgtgtacccatcctaatcacactaggaccaggcatgagaccccctagaacagcccttctgggagtatttaaaagagccaaggctgcctttgtcctgcaccttcgaaaggaaaggaaactacaataaagtgcctcctgactatctcggatactttccaacacagccctgcgtgtgtggtgtgccataccgctttgtatttggaaactgtaagaagcaaactgtcttttcaacaagaactatctcctgatcaattccgtctcatcagacacatggaataataaaacctgcatttcaaagcgtccgagtttcgccatctggaaaacagagcctgtaacatacccccctcccccagcagaagtgtgtacaaaacaaccaaaatttatagaaaatatgtagtccagtactytgtatacagtactacttaacaaatagttgtggttctccgtggggcatgagttattatttgagacaagataggtcatataaacatggcagcgttctgagctcactgttagaacactgagtgcttagtttatccttttcgactctctttgatwgcagaacccaactgtgaaagatcttataggattcggtcttcaagtagccaagggcatgaaatatcttgccagcaaaaagtttgtccacagagacttagctgcaagaaactgcatgtaagtatgagaatgcctccattcctgaggtgcaagtgaagcgtttcctcactactgtgctagtgaggacatttagggggaaaaaaatctgtatttccttgactattttgagtgaatctgtaagcccctggggtgtaggtggggcttttagttttatcaaacwaagcgtttaaaaggttgctccacgggggacctcaaacagctgctctgtactccagttccttggtccttcccaccaacagtctccagtgttgtggtttcacaccgaattagtgattgggagagagaatttgatctccagcatttgacagtgaaaaaggaaagctggtagcgagaataccagcgcagtgtaacagcagctttgaaagcagcctgcagaagcgctaccaaaaatggtcttcgggaatggatatacaaagaacttttatttgtgtctggctgcccggctatgtaacaacaacagtcaacagtttataattgaatcccggctttcccttgcagagcactgattcatggctcgcagtatgtgtgaatcaaagatctatgctattcatgctctacctaggttttgctcggggcaatatcataaaagtatgttaaacaagggatagagatacaccgtcttggttcacacaaagtgtttgcccatggatgttgtgttgttgcttttttttttaaacatgacagttttcttgagtgctttgccttcaatctcactacctcactgagttttatgtgctggctggcccattttagagcaaaaaatagtaagatagcacccatatggtcttcatcccatgaaacatagaggaagtaaggtagcaagcgaagactgctgatataggtcaggcagggcataggtctggtgccctgtttattttgccaccaagaaaagctgggtagaatccacctttaccttttctgcaaacccacaccatagcaaatgccatgccattcatcacagctccttcagccagtggaatttgtaatgtaaatgtcaggcatttttattcaggaatcccactgtaatttagcattagtcaataggccagaggaaattatggatcactaataccgacgccacttttgaaaatatacagacattcagcactgttgtaaattattctacttcagtcagtaatttttttctcctgtaggttggatgaaaaattcactgtcaaggttgctgatttcggtcttgccagagacatgtacgacaaagagtattatagcgtccacaacaaaacgggtgcgaaactaccggtgaagtggatggctttagagagtctgcagacgcaaaagttcaccaccaagtcagacgtggtaatgtacccatcctttctaaatctctcattctgtactttctctcccatagttgcagggtaacatgttcttttaagagattccaaaccactaactgcagggtatcttcaatcacaggtgtaaaactggagtcaactgtccagtgggtaccaaactatattcagaaattctcttgtctattcaaaaatacctgtagtctgaagcaccgaactgggctatatgcccaggtcccggtaatctcttaaagaccccatctcctaacagcggcacacacagaaatctaaactagtaatatttttatgagagtccagaggaaatcatttcaaagaatctacacagtaaggagagcggggaggcagagaggctgaagaggcaggagagcctacatggaagtcagcggaagagaaacatgtaacaagcgatgtgggtgaggggaacagcagcaagtccactgctcactattccagaagcctcggccttggtctcttaggacttcacagagcatgctcagaacgtgagtgctgcgtgaaactccgagtaggctgttttactcacatgccacaagtcaggaaaagggaaatgtctaggtagaaaagcatctaatgttttacccttaaggatacaaccacagatctgtgctgcccatacccaggtcatcctggaaatgttcctggagggaggctgtgaccttctaaaggggaggtcggcagctgcagagatgacaagggatacagactgagggtggtagaaagaagttagctccctcccttgtcagtcagagaggagtgggctctatggataaaccaaagaagcagtgcacatctagtttctgatcctgtgaggaggaggaggaagagatactggcgtttattccaggtgactaatccattggttttcaagagtaaatcgcaagccatggtagcgtaaagagacttctagggctatgagatccgttaaaggaaggaaggaagaaaggaggaaggagaaagggagggagggagagagagagagggggagcgcgagctcacaaagtagagcctaatgcctgagattttgacagtgaaagtttgtctaaacaagaagtgaagaagtatagaaaaatgcgtgttagagagggacactgtaaccaaggtggcaggtcagtgcctaagatgagagcttactgatcctcacattcagacttgaccacctgtgtgcttacaggaggggaggagggttaactactcaacagcaaaagtagacaaaggacctgaatcagcattacaccaaacacatgtgcgactcgttagctaataatgaagtgaaaagcatgctcacacaaagatttacatgtaaatgatggcggtagtattattcataattgtcccaaatcaggaacagtcctaatattcatcaacctgaggatggataagtgaaatatgatgcacctagatctgtggagatgcctcagtcagtacagtactggccgtgcaggcatgagcactgagggtgtccctagcacccaaagctgggcgaggcatctgtggctccagccctggggtgcctaagacaggggaacgtgcctggggcttgatatccggctcatctactcaaattggtgtgctccaggctcagtgagaatccccgtttccaaagagtaaaggtgacggggcttagagcgatggctcagccaggtaactgcatttcctgccctgctagcattttgtagcaggtaacacccttctacaaatcgagtttcaggggactcagcacgttctcctggcatctgtgtccaccaagcacatgatacacatatgtgcaggcaaaatactcatacatccaaaatataaataaggtgggtagatacccaaagtagaccttgatccctggccttacacacacacacacacacacacacacacacacacagagagagagagagagagagagagagagagagagagagagagagagagagagaggtgggcccttgaatgcaaaaccatttggcagtatacaagaatgactgacatatgctgcagtgcagataaaactcccgaaattatgtcaagtgaaaggaagcagacttaaatgatgaaatgttcaatgattccgtttgtgagaaatttctagaaagcggtagaactataaccagaacagatcagtggttgccaggtgctaagaataggactagggaccgattacaaatgggcctgagggaactttctagggtgttgtgagtgggctaagaccgggacgcagtggcacctatgacctagttgaatttttccgcatcattgattatatagtgatatgcaggtaattctataactgtagacatcagcaagaaaaggcctaccccaagagccacgaaaactaagacaaacacttaagggaaactgcagatgtcagtgcacttcctctctccctctcactaaaagacactgtgctctgaagggtaagccacacacaatgctacgttgaccgacagtcactaattgcatggaataatttgtatggagtttcatttcaaaggcagcatagtcttttgaacgttgacatggaacgcttccaagagcgtgtagtaaattgaaagcatctcgaatcctacgagcaaaaacttgcctgcatttgattaggttctctttttagccaatgcccaggtgcagtttggccacaccaactactcttgggtgcattcaaatccaatagggatcacttcccatggagttactcatgcccagacagccccgtccagtggctctcacttagcacaagctcttcaccaaagtttgtgttcttgcttgttcaatccagatggcttttctttgtcccccattctgaatcttttcccagaaggtatcgtccaccattcacaggacccaactcttccttgaaatccccctttctagacactgggccacttgattttcttaaccaagaaggtttctttacagccttctgtctcctccttgagcagctgaaggagtctattggtaggaagttacctacacataattacaattgccaagacacctgcctaatagacatgtttgtgtgaatatgttttcgtttcattttagataggtgccacactcctgcacgttctaatgtttgagaaagtgccaaatgttttacagaatggctgtatcattttctctccccaccggtgatccctgtgagttcttgtcatccagcatcctcaaacacagttggctttgtcagatttgggaagtttaaaccaatctaataaagctgtattttcttcttaatgtacatttctctaacgactactcaatgttgagcacaccatgtgcccggtttcatccttgttatcttttttgatgagctgtctaatcacaccttacctccatttctgtttgagttgttcaagtcatttgtgtattctggatacaggtgtgccatcagacgagtgtttttgttatagtctaggacagtgctttctggaagctgtgtccctccatctcctgtctgatgccattgcctaaggtgtatgatatttgagagtcctttttctccattctgctccttctccactgcagaccctggatctgatcagcctcttacaactctggcttccttgtccttacaacacctacaaagttattcacacttcaagggtatgctcgtggttaaagcattctaaggattaaataaacaagttgggtaggaagtgatgcccacacatactgcactgtgtggcggacagccttctggtatcaggcttgggggaaagatccacaggcttacatgtttctcctactgaagctcccttccctgttcttattcagaatcctccatctgagggtttgtgaaccaacttctccatttttttttaaattttgggcagagtcttagtcatgtaccccagactggtcccagacttatggtgtgtgtgaggaagttcttggacttctgatactcttgcttctgtctcctaggtgctagaatgataggcagactctaccattcctggttttaaatatactgggacaggaacctagggctccgtgcatgctaggaaagcactctaccaactcagccacgtcactgctagcgtctccttttgccttaagcacttttgtggtcacagtctccaggcacccagcaaccatatctcgccactttcagcctggcccattttcaacctttgaaacccccccacacacacacagtgttgttgtgaccatgtctccccatcacccactccacaggttagaagtgtgacttctccagtactagaaatatcttccttttggacgaagataagggcttaagacagggtctctaacacttcagtctggcctcaaactcattatcctcctgcctcagtttcccaggccgataattagagatatatgccaccatacctagcttcgtgtgcctactcttgctgctgcaccactacatccagaagtcagatgccatgaagtcttgagtcagtttttcctgttcctcaagatctgttttcccttccctcctcccgtaatctttctgacttctcaccacagctgtgctgcttctctatcgtccgtctctattacagtcctgttcttattgcccaacactgttaacactgtttaatcagccccgggacctatctggtaacttggacagtaaccgacttgtacaggatcaaaggtcaatcgacacttgttcaatggacttaaattttaactcacgttctagagcttaagcctttacaccgtacgtttccagagtgagagttacatggaaactttaataagagactgagttgagagtgagactacccagctcactccctcccgggaggggatttgtgtctcctacttcgatcagagtattcagtgatcttgatggctctcgagtcagacacggtgactcatattcatagcacaactctcaggaggcagaggtgggatggttgctgccgactcaagcccaagtagactccagagtgagacagtacccccattcctaagagggcaggagagccttgagggctggcacagtgctttggtgggtagaggtgcttgcacacaggcctgatgaccagtctgttccccatcgtgaccccacaaggtggtaggagagaactgaattctgggaattcttctctgacttgtacatactcgccatggcgcgcgcgcgcacacacacacacacacacacacacacacacacacaccacaaataaatcatttgaaaaagggagaggtgggcaaaggaaagagccattgatatgattgcttcggccactctgacaactagagagctgaccccagagctccattgttttcttctgtctcaggattcagaaacatatatttctctttttgctaaatattctgagctatatttgattctaacttccttttggtatagattctgtttcctacacacacacacacacacacacacacacacacacacacacacacacacaccggcctctcgaccttcccataggctcttttgtatggaaatgacctagaaatgctgcctaccagaatctattgttctgagtcctctgcatagggtgacttgcatgtgctgacttgtcaaggttttcgcatgtcccgtgggggtggggtgggaggaatgatatgcatgacctgtgctattttgagtagggagctttaaatcaagagaatgcatatctgtgaagtccaatcgacacagccagacccgagggtcaagaactctttaaatgtgtatgccagtgtgaactcagatacatcaggggatttgagcaacccttagcccctctatgcctctctggtctcccagtaaaatactgatgcagctgttgcacattaatctggcactttattaaaatttattaaaattagttttattaaaattagatttattaaaattagttttcaatagaaaactgttgcctaacaattggattagttatgcatttaatacaggtttttttttttttttttttacttacactgatttggaactttaacatgaacatttagatatgtttacatttctccccctttttgcatgttcacgtttgtttgacgtgtatgcctctctgtacatgcattcgtgtgggtgtgggtgtgggtgtgggtgtgtgtgtgtaagctcatatgcacatgacagtgtgtttgtggaggtcagaggttgttgatacttatgttttcctcagtctctctccattgtgtttactgaagcaaggtctcctgagcctgagttctctgtttagctaacttgccctagggatcccctgtgtctacctctcaaagtctgagattacagacagactgctaagcctgctcctccctttttagggctagtaataagaactctggtccttatgctttcatagcaagctctccatccctagatgtgcttccagttcctgtctctttaaatgtttgtattttgatgttttgcctgcatgtgtgcttgtgcgctgcatgtatacctgtgcactgcatgtatacctgtgcctgcatgtgtgcctgtgcctgcagaggccaggagacgacttggatccataaaactggagatggctcagcagttaagagtactgattgctctcacagaggacctacgttctgttcacaacacccatattgggcagcccacaacaacccatgtcagttctgtgggcatctttatccacatggcgcgaatatactcacacagacacgcaaacatatataaacaggaattttcttaattcgttttttttttaattcttggaggtcacttttatctataaaaatctaaagttgtggcaaagctattgaaggggaagataggaacatgttggtaatttggcccttcaagaaagaactccactaaccacttattaaatcttaaacatcctgtagacttcacacattctttttgaaaactataattcttgtaatctaagccttatctcattctggtttaaacaggccatgaaatgtatagcttactagttctctttagagaaattttccccctcaatagaaactgtgctaagtatgtcaagcaaggattaattgcagagagctactgattttcccttcatagtagtgcggttaacactttgctcacctgacttctcctctctcttgttttattagtggtccttcggtgtgcttctctgggagctcatgacgagaggagcccctccttatcctgacgtgaacacatttgatatcactatatacctgttgcaaggcagaagactcttgcaaccagagtactgtccagacgccttgtaagtagactgtctggtagggtcttgtgtatggctgaagcttatgacttgtacataagtacttgccattgtgtctctcacagaatttctttctgaaacaggtatgaagtgatgctaaaatgctggcaccccaaagcagaaatgcgcccatcgttttctgaactggtctccaggatatcctcaatcttctccactttcattggcgagcactatgtccatgtgaacgctacttatgtgaatgtaaaatgtgttgctccatatccttctctgttgccatcccaagacaacattgacggcgaagcgaacacatgacggataagaggcccgccagcccccttctaagaaacagtactggcctagaccagtctataccttcttcaacagttctcactgcctggcctttggaaggtcacccaacatttcttgttgttgttgttgttgttttgtttttcttgtttttgtttgctttggccataactgcagcacaatgagacactgacttcctgtttcaaattcctggattctaagggatttctcatctgacagtgcattggaaacagaagcgtgctccccacaggctggggaccaacggctgcctgcagctatgacagcactcctatctcagtggagttctaaatctcagttctggcttgaaggttttaaaaatcaggtttttttttgtatatatatatggatacagatacattgaactttgaagatttctcatagaaaacgcagaagagatggcctcgctcaagttaaatgtggtggtcccagcaggctgcttgttggaattccagtattttaaaaatatttttgttgtgttgtggtcatgaacattttccatttctgatattgtctacccatcaggcaaacattcccgtttaaacatttatatacacattcctttggttggaggaatagccacagacaatgcacttattttcaaaatagcatgacatgaggtgtgtttataaattatcagggagttatgtattgtacatagatgacaatagggagatttttttcaagaaataactttgttacagtaaaatatttgtcatttaaaactcagctgtttagcaaggagtgttggctcacacctataatcccagcatttgggaagctgagggaggcagacttccacaagtttgaaaccaaccttggctacataatgatttacaggccagcatgggttacagtgtctgtcttagcgaacaaacattcaactctttgaggaggattttgttctgatctaatgaatgtgaacattaaaattttttatctgttttttaatggcaactttgagaatgagtaacttgtggtggtaaatctttttagaggcaactcagtatgtttttaaaggccaataagactgaatgaagggttcactattcccagtcactgcttatgtgtagaacaaagaaagggtcaatggacaagaaatatatactgtttttcaggaggagccttctcacctaaaacaattggatccaacacttttggggaagtctcattttttttttgcattagggcrtattttaggttaaacaaaagcatattttakaaacagacaaaaggccaattgaaaatcttgratgaatagttactctggacagggctwtggatgtgttctgctctgtggaattttgtgcttmctactgtatagtgcatgtggcytaggttgctgtarmtggttttgtccgtgtwmacakygaaagtattatatttttatagaaatgyttattttttaatgatgtatgaaaatkttkgytaggccgcabaaktwtgggaggtatgtgagactgggttcggcagcakcctgttttttttyttaatggctgtaagttatgataaggaasygyactgattgccaktacaccccaccctcattacgtcaccgggacttggagccaagggttaatagagcaagctatgacatgggtgtgctctgctgaaacccaatagttgaatttggctgttgttgcaggaaaacgatggcaatcaacaggtctttgatggtggtagaacatatcagaacacataaggaactgtagtcgagatttatttcaattcagatgttactgcttcgtaactatgaagagtagtsccaattcacagagcactgtcaatggctgacagcaaaacataatctgctctgcagaaagagttgactgccattacgaggtcaagagaatgaacagaaaatggcmccaggaacagaaagagctgtgggagacacycatacctgtatatacatgccccagaaagctgtaatgtgaacatcatgtttcctatttatgaaccttcctagggcactgtgtctkgacagactgtgagaggaagtcattctcctaagatacttgtcrctgcctttacctgcacttgagstgaatggtactccgtgtgttaataattgttctggtaaatcmtacmgtgaaaataaaatgacgtaacatcttgwawamwrwrarwwramwrwarmwrrwmatgcttgattacctacctcatttacataatgacagaggaagcctaagattgatttcacctggctccgtggcccagatgctgattccttaatggatgggcagtagctacatagatttgcatgcctgactctctggaagtctctgtgttgccaagggtggtttctcctgaatttttaattccctgcatttttctgacaacctttcccctgctagagtccttagttctgttttaacttggaattcttctccagcaagagagtacccatgggccagaagctgaggcaaaggaacttcagtgcagttgccagaaagaaagctggatacacaagtgcaattggaaagagatgtctttttgcctcctcaaaatcccccttttgatgtacacatgtacccaccctttggggcctttgactatcagagaagctacagtcagctcatctctatattctcaaaaacgaaaaaggggctcaaagatgataagtccaccatctaagaattgagtagcactttgggggatatctgattctttaaaaatccaagtttatgctgttgttgataaaatacagtggggttggggaggctaatttgttagttcctgtacacagccaggagatgctgtcttacacaaagttcagtcttctgtctttggaagagaggctcctgtcatcttcatatccctagtatttggacccttaccattactgaactgagcctgccgtttcatttcccttcagccactttaaaccagcaggaaaagctcttacctatgcatctcctgtgacatttggtgaacaccaacacaggacatgtggttaggaaccttctgaagaaagagatcatcttagttagggtttctgttgctgtgataaaacatcacgaccaaaagcaatccgtggaggaaagaattgactttagcttacagtcacacatcactgtccatgttccagggaagtcagggcaggaacctgaaggcaggagcagagccagaggcggtggagagggctgcttcctggccactctacatggcttacatgaacttgctttcatgaagctcccagaccacccaccgagaggcaacactgcccacaatgagtggcctcctacatcaatcatcaatcaagaaaatacacctcagtcttaggcttgcccacaggcaagactggtggggatattttctcaactgaggctcctcctttaaacagactctggcttgtgtcaagttgacataaaactagacagcaaaataataataataataataataataataataataataataacaatatgggctggaagatggtttagtggttgaaatgcttgtcgcacaagcatgaagactggagttcagatcctgagaacccacagaaatgacaggtaatcatggcaaccagcctctaattccaaattctgaaaggggatctccagaataagcagggtcttaataatggaaattctgcttcaaaaagttatataggaagtatgctggctagttttatctcaactaaagacaagctagattcatctgggaggagggaatgtcaactgagaagatccccctaccaggatgacctgtgggaaagactggtatgtttttctaattagtgattcatatgggtggtcccaaactactgagaagagtgccccaccctggatccctgtggtataagaagacaaactgacagagacctgcctgtgcatgccattgcactggtggaggagccactacaatgagcaagaatatcatggaaagaaagaagcagagcagtttgtgcactctgaagagagacaggactggagatgaactggtaaggaacagcctgatgtgaggaacctgcactgacacctgaggccatagtgatgtctggacccatgcagttgccaatggccgtgtcgcaactgcaccagggatctgtgctgatgaccctggcccatgttaccatcaaaggccctgtggacatctatgctctgggctgttacctggggccatgttgatatctgaggactgctctgagctgtccccaccctcaccagctgtggcacgtaggtgagctgttcctgtctagcacctgggcagtaagggagaggtgaccctagtggcttgaacaaaggagaactgggagactgaccaattgagctaccacccaggcccacatccagggctttaagttgtcccattccaacatctaccccatctatgagcttctaaagcacccaatcatgcagcactaaagcttaacgtctccacaacacacgacaacagaatatccaagaggaatcctggtgaggatccagtattgatagtagagcagaagccagaggcctcagaccaaaccaatgactcactgcaatgaacatttgcaagtaaagctctttggggaaaggatttactgtgtgacacactgtgaaacattgtagcttctagatcgagatacttttcttttggggagaaggtcgcaagggtggagggactgggatatgagtgtgattggggtacataaaatgaattcacaaaaaatcaataaaaagttgatgaaaatgaacaagaagaagaaaagaaaaacgggagagaaaaaagaagaggagcaggaagagcaggagatggaggaggcaaaggagcccaaactgattaagccatgagcaaaccagtctgcaacactcctccatggcttctgcttcttctgcctccaggttcttaccctgcttgagatcctaccctagtccattgatgatggactgcaacttgtagctgtaagttcctccccaagctaactttggaaatgatgctttatcacaggaatagaaaccctgaacgaagatagagagcgattaatggatgctaccctacatcaaccacaggcctccacatgcacacatgccttaccaaagtacacacacacatatgcaaaacatgcacgggcacacaagagggggtggagggagagggagagggagagggagagggagagagagagagagagagagagagagagagagagagagagaaatagaaaaggaaaactaagacattttgcatagctttgtttgatgttctgactatttaattgtggaaatatattttcatctcatgatccaaacaccaatcatatttttactctttgacctttaaggaagattctattcatggtaaataaagatataccaagtgttcagatgatgacaccttcccaatttatttcaaaacataagagtaatatgatagcaaagaaattgactgtcacttaggttaacaaatacttctcaggcagcttctatgtcgggtgctgttaggtaatgaggatgtaaacctgtccttactctaaagaattcaatggataagatagacagcaagtacttaactagggaacaataggaataatacaccttggcttttcatagatccataaaatgtctttcaagaagcatcacagttaatacaaaaatggtaggctcttggacaataagaccaagctctgacttagccatgaactgaacttcttccctaaactcagttcctcagctgtcaaatagactggtccttcttaactcacaagagtgtttcaggactgaaaatgagagttcaaaacagctgatttccactgctgctgagtaactggaatattactgtgatctttagtcttggacaacaaaagcccacataaagggtagcctgtgattgctctgaaaggaccttacagatgtttacctgcgaaccttcatctgattctttctcatccttgagcatacagatgggaaagtgagtgtgcaaatggagagcgtgacaaaacagtgtccaggtggtggcacttttgttccagggcaggacgcctgaaggacaccagcccaccatgtttctctgaagctcccactactccctgccactctgacaatggctggtttcctttttctcttgtttaatcttcagacctgggatccacaaaagacatggaaaataacaattcatataaaattctaggaatttcgcttgagggccaatgatagagtcacagcccccacagcttaaagattgttaatatttttatttcgctcaagtgagtagttactgactattccggttccggcagagtaacttatgccctgggttgttctgatgcacatcatgtgctgagaagctaaggaatacttcatgggcatccttctccatccagatgactacacacagggagctacacagacacgactctgtctggcacgtgagataatgctgtgacacagaaaggcatgagggcattgtgcctcagaggaaacaacacctactgctggtttccctcgtcaaacctgacctttttcttctggactatcttaattccctatctatcacaaaaatggaaagaacttcagtcatagccagtgaaatatttcagttggtgaattgaaggtaataaaacagaggctgcccaaactgtcctttgttgtaaatcacggcaaaggtctagattacatcagccaaagggtattgatcacaacgctgagaggtttataactactattgacttaccatgtgaccctggaacagaaatctaggaaaattgcaaaagcatacctatggtaatgaaaacccatcattagccgggctgactgccctgtcaaccagctagagctgtgttggcttcaaggcaaatactgaacaaatgcttgaaatggaaggactgtctgccctcactctctttccttcactggatgctttaaaaattattccggtgaatgtgtttttcttattgttaaaaaatgtggattcagaaggctcatgcgaattacctttttcattttacttatttataataatgtattttatttttggattaccatacaaagtagcaggttcccttataacattttcctgtatagcttaggttgaaacctcccctgcttcctctcctttcccccttctccctatcccactcctcacgtgtacccttgaactgttccaccccagtattcccttttccactgtctcgtatgatctatataatagtatgcataattaatatctaaacaatatctcttcatcctttattattgctgtggtttaaaaaaataaggaatagggggtctagagagagatcagtggatgaagtgctaactgcataagcctgaggacctgagttcaaatctctagcacccatgttttaaaaaggccttggattccccaagagtttatctaatccgaatggccagtcctaaacacttgtacatacaagcagcagtaaatggactgggtagtttgtgtgtgcgtgcatgcgtgcatgtgtgcatgtgtgtgtgcgtgtgtgtcagacaatagttacagaagaggtcataaatgtaaaagggagtgaggggagggagtagtatagttatacaaatacagtattaacgtatggaattcttgaaaaaataaaaaagcataatgcctaggcttaacaatgcatatttgtaattccagcttgggggggggttggagatgggaggatcctggggctctatagtcaaccaatctagttaataggtaagttctgggggctcagtaatagactgcctcaaataaaacaaggcagagaggggtaaaggaagaggcctaatgccaacatctaacctccaactagcacatgtggatgcttacagagacattcaccactttgtgtgtgtgtgtgtgtgtgtgtgtgtgtgtgtgtgtgtgagagagagagagagagacagacagacagacagagagacagagagacagagagacagagagacagagacagaaagacagacacagagacagagacagaaagacagagagagacagagagacagatacagagacacacagagagacagagatacatagagagagacaaagacagagagacagagagacagagatagacagagacagagacacacacacagagacagtgacacacagaaagaaagacagagacagacagtgacacacagaaagaaagacagagacagacagtgacacacagaaagaaagacagagagacagacacacgcacacacagagagagagagagagagagagagagagagagagagagagagtgagtgtcagagagacaaggagagacaaggagagacagagagaggaagaggctatcagtgaaaggaccagctaaactaagtttcaaatgctattcaggtggcactgaagaagtaaaatgagaagaaaatggccatgtttcatcatgaataaacagaaatttcaattttaaataaataataatcccacattgttttggagcaccagctcaagacttagatgacgattaatttccatcccttctgtgggaagcagtcctttgtcttcattcgtttacttgttcactgtgagacgagaacattcttcgtgctaacacagagctccaggctggcagacacatccagtaatccttagaccacttggctggaactataaaaatgcataaaatcttaccaggccaaaagagatcaactcaaaaaaatttttggcatccaaacatgtcagaattgtttttacccccaaaccatttgtgttcctcggttatggtccaggagccataatatcagttcctatttttattgggcagactggaattctttagtaccatatttcatctacctttctgtggtttctcctaattttttcagtggttttatgcctgtctgctgtctgtctcttattttatcttaatttgttttagttttcgttttgcttactctattctctttccttattttttcagtgttcagaatcaaatctgaggctcagcacatggcatctcggagtcccacccctgggctgcgtctctagctctgtctctgatgccgggtgcggggaagtagccatgtgccctccgccagcccaagtccttaccttcacatctgcttcttccattaaagtcaagccttctctccgtcacgaccgtgactaaacagccaccatactcctcagtggtaaaggagaaacacccaacgagggacctttgtgaaaccggcccccaagaaacccaacttcagtcacatgatcctcagagataatttcagaagtcgcagtaaagaaaaactacccagatatcacagtgccagctttctgcagagctgtttctaatttgttatgccgtaagagtaagagcctctgtggtagccacgggggtctctgggaacacctgggtgaagaagcatcaaatcgctgacccaaatgtttcagaaagaaaatgtccattgttagaactagcaatgcagatattttctctaagatgaacttaatatataaacagaataaaataacagaataaatagtaataagaataatgatctcatcccaggaaatgccctgtctggaagctaatgggctaaggtaatgctctcagggattagtctcgcttaatgaaatgctgttagtttagtaaatgaatgcttaaaatgatggaaagtaaaaaaaaaaaatcaggactggttgattcataggggtgggggggagtaagccaaagcagcatgtgtcacactgtggttttttaattattattattattattaatctgtgattcagaaaatacatatgctttacaagttactgtcttttatacatctgtcccatcattttactctgtggatatgagtatttatggaatatttaaaataaactgttaacaaacagataaagtactttattttttcagatgcagttcttataatgagcattaaaattgagattttcacttaaagctcacataaaagcaaaatgtatctcttctagagcttcaaataataacgtattttattttgcctgtttaaaaaacatgattaatacaaaaccaaatttcattgatttttgtttgatggctaagatattgttctgattgtgacttcaggtcctagattgaatcctattgtctgtagctttgctgcacgagcttcttaggcagggagggaacacagctctgttaacttccacttcctctgaattgaagcatccatttctataaggagaagaggctcgtgtgactcaggaagtaaaccttacaagtcttggaaagctgacatttatgactcggggagctgcaaacaagtttcaagggtgtagctttgtgagccctcattgctattaatgatggagaatgctatttagtgacacatctttcactgagtcatccatgttcctgtaagttatgccaataaagtcaatagttcactaaaaaataaaaaaataaaaaaaataaataaataaactgttaagaaaaacataagtcgaggttggggatttagctcagtggtagagcgcttgcctaggaagcgcaaggccctgggttcggtccccagctccgaaaaaaagaaccaaaaaaaaaagaaaaaaagaaaaacataagtccctctatggtaagcatatgaaatgtctatagttggatgggtttttatcttaaacacgttgatatgaggacaatgtggatactatgtatgagctttacaatatgccttctagttgtacttggttcagaagtccaagattattacagtggtcgacccctcgattctgcccactgtgttttatcttctccttttaactaacaaaacaaaacaaaacaaaacaaaacaaaaagcaaaaaaaccccaaaagacaaaaaaaaaaaaaaaacagctgtcaaaatcatacacctgattacatcacctgcctgcttcaaaacccagccctaaattttctgcctcagtcttttgtgctgtttgtgtttgtttgtttgtttgtttgtttgtttgtattatgaaatagatcttcatggtaaaacaataataacaacaacaacagcaacaactgggccaaatgctataaagaggacagaaaatagcctttgaccactgtctccctccttccagcctagctctccagagtgactcctgctgaaactctttgtatggtaatccagaaatgttccaccctgggaaggggcccagatgaaaccagatgtgccagcccatccttcaactacgtatgaatcaacgggagctcaacacagcagaggtttctctaaaccttggtgactttgaactccgacccaaagtatccactcaggatatgaaccatatgcaaaagttaggataagagcaattatccctgccctttagagcaaccttcctaatgccgccaccctttaatacagttcctcaggtcatggtggcccccaaccataaaattctttcattgctatataactgtaattttgccgctgttatgattcgtggtgtaaatatctgatatgcaggatatctgtgaaggggtcgcgacccacaggttgagaatggctgctctaggggcttgccagttaagcacccctgcagactagtactcttcatatgacttacttaagtacttaaatacttaaagtcctcataaaacagacttgcttgtttctattttgcccaaacagaataagctcacttctgaaagtttacaaagtgctaaaactttcctaaaatgcatgttctctttcgccatggaagtttcaaactgcttaaaagtttcgaaagattggtaaactgaggtataatccgctgcccccttacagttctgtgagggattgttgcaacagtgcagcgcacaggtgatgacgtcaccaactagggtggactgagtgtgtgcaagatggatggttggctgtagcggtcactttccttgacgccagctgtccctgcggtgcaagcacaccccatctgattttgtcttaacttgaaacttctgccatcacgttcctgtcttaatcctgtcagtgcccggcaacctctgagcgagctcccctcgctctctttctgcacagaacaaccggaacagacgtctgcctgggcacggtttgtaatcagacgtacttggtttgaactgatcccggataaagagtgcagtggctttccagatccatcactgtgtctctacgccttagtctccacactgaaaaaccttcattttcaatcctttttctttttgatatctataatctgctctgtggtccaaaaagattcaagacagaaggcccttgcataaaattacctgccaataaaggggacaagagagggtgatgggaggtgaatacaatcgaaatatgttatgttcatgtattaaagtgtcacaataaaatgtgtgtgattggtttatgccaacaaaaacgtatttttaaaggtaagagtttggcattgcctttatataaaggtaaaaatcttgaaaacaggcactggttttcttcgtcatttcagaaaaatgaaactaatatgaggaaggggtcctaggcctaatttctcatacctgtgtggctttctgtgtcatgtaaccattctaagttgtattttccttattcttacttacagctcataaattttattataaatattaaatattcactaagattatttttactcattgattgctttggtctctgtctgatgctcagaccagctttagagtcctaggctcaaggaccaccctgcctgagacaatcattctgtgagtctcggaccataggtgggcttcatcacgcaccggtattctaattactatacttgtctcagtaaggtcttttcttcaaaagtctccttacaacacatctaattcataaaattacttccaatgaagcccactcaagatttcacttggttctatatggctgctaagctcatatttgcaagactctgtgctaagaatcaagcgctaagagcttggagtgacacgccatcagggagagctaagggctgtacgtggtacggaatcccaaacaggtctcaaaggagggttttggtcctgtacaacgtccaaagttggggctcaaataatcatcgtttctcaaagataaacaccctgaatgtggtttcagggactcgtgaaagccacgctgaacttcagttggggctgtgtttttccagcacaattcactgctctttgtttaaatcaaaacttcattttattttccacaagcagccctgccaggtttccttgatttaattgcatcttttttgtctgatgacaatggagaacagaagaaaatagtcttgctaaggaaatgaagtattaccaaacacaacagtcattctcccactataggaggtgattttataagttacaaaagaaaaaaagtctttatcctttggatgaacagtgttattgctgtaactgttaggtcaaatccgtatggcccaaagaaaatgttggaaagaaaattaaccagttcatagggtacagataacactatttttaaaaggaaatggttcttcccacatagaaacaatacaaagtgataggaaaacaaagtgattaatttggacaattattagaacaattcaagtaaaatatgtgaggtccaggtaaatattgtttacagggaatacaagcgaaattatttctggtttgtttttaacttcgcttagcttaagttcctctggcttgcacaccggagaactctggggactggctgagcagtaaggactaagatagcaggaggattcaaagcaatatgggcccagggtcccagctctgctctgccttccagtccccattagcctatgggcaaatttggtttttcacttattctatttaaaaaatatgggtgtggacagtctacataataagcctcgttctaaggaaaagaggtgcagaagagtgagctcgcagagtctgttgtctcccagagatacacgtcccataacacttaaccaatctgccaatagataccagcatttggtaatccgaatcagagaactgaggaacagaagctcaaggaagccaaggacaaagctctagggcactgttcagtgcttacaggactgaggctgaaaaatttgcctacttcagcctaaaaatgcaaggtcattatctggaaagagtaaataaaactacacgtgcttagattgttttcgtattttaaccctcttcactccccctgtgttaacagagttcattgtaaaggcaggatgtagccactattcaccctaaagaatttacaggtataaaaataaaatcgcaccttttccagctcgatttatctaccgcaactggaagcaacggccaagcaaagaccgaccgctatcaagtcacagggcaccacagatgacgggactttcctgtcctcctccgtgttttttatttcattcaagttattctaaagtttgcaccaccaacctgatgcaaactatgtctgacggaagaaaattactcttccttgcatttacatcttcccattaaccatctgcacccctgcctatgctcagaccataagcttatgtaatcattattataaattgagaaagttcctaaaagcaaaacaacgggaaccgttccaaacatacactcagaaaacccgaaacaacgcaattacgcaaggtcagagggcatcaaatggagcgggcaatggtacgcagcgggtcagcgacacagactcccatctttctgccttactctccccacgtgtggtatcttcatccattccacaggctaggaaagactgggtgatttatatcgaacagaaaaattattagttaatggttctggagaggtctgagataagaggaccagcatctggcaaggtcctgcttgatgcaacatcccacggtggaagggtaaagaaagggcaagaagaagaaaggggacaaaacacgtccgactataacgaactcgctccctctatattgcattccaatccgtttgtgagggcagagtcccccttgcctaatcatctttcattaagctccacttgccagacctgctgcattgggggttttatttccatcccaggcaacccccaacatgtgttttctatccttaaggtcatctcatagttcagatggcttcctgagcttctggaacaaagaggaaagacggggttagcctgttttaggaaccttcctaaagagccttgaaccctcccactaagatatttgaccagagtatagtcttgggtctaatctagatactagggataagtcagaagtgcagtgctctctgcttggcccaaatctacctggataaaaaacagggttgggttgaggaaggagagagcattgatgtgcaattggttgtctttcacactgggtaaggcagactagtgtcaacagtgttcttcctgtaatacaccatcaaaataccttcctgctttaatgaggacgattgttccaaaagaaaaagttactgaccactgacacagccatctgccctggacccttgataaagttgtacgctgtgccaagtgggtacatgtaacatctgcaaaagtatttgtgttgctacaagattttggtcacgcggcacagggaacacaacttacacattcctaaaacagaaaagcaagggatagataatgaaggtggcagatgacggcttgcccagcatgcatgaaaccccaggtttggtcttctagaccacacaaaacgggaggtgatgacccacacacggattcccaagacttaggcagtagaagcaggaggaaccagagttcaaagtcatccttggctacttagccagctagaagacgatctgggctccaccagactttgcccttttctccctaaagaggaagagaactggacaaaagaggaaagaggagaggaagagagtaattagggcagaaatcttgattggagtaaattactgcagtaggcatggaggttgggaagtttgagagttttatatgtaaggggcatccttatcatataagcagtttaaggaaaactttacaaaagaatgcctctctttgtcaagcctagctggacagtcaggggaaaaaaaaagacattccccatgaagggaatcgtgtggtcaaagaagcatgacaatggttaccaaacaagtaaggttaatttgcatgtgagactaccttggcaatgaatagaaacatgattttgtaatgcacgtccctgtacaccgagtacaccttctctgcccacagctagtctcactgttcgtatgttctcatggtgtggagaagtgggtttggaaagtcaaagacagagctgggtggtaggggatataatcagaatagaaagtgagtcctatgcaatctttggctctcatccgcccagctcgagccttgtcagcccattcttaccatggtagtgcatccatataaaatactctgtgccggtggctgtggtgtgctgaggtattaactctattgaaggaacaggacactgccaacaggagatcccactaagtgttgcaggagaatcccatggcacccctgagtcagggcactgggacggtatagtttctccaggagtacagaaaggttccaaaccttagtgagctttgatatcaccctgtggtgttaggaaacggtcataatcaaaggctttcacgcagaagggcaatgaaaccagaactcttgtgtgaaataataatggtgttgaaaggaagcagactatggtgaaaggtcgggtagaaggctgtttcataaggtcgggttgacttaagcagaaaccacagcttgcaccaatggagacaaagggtcggctcccctgctcccgttgagcagttgctttatgattgtgtttgatggcacgattgtttacaacccttgactttctcccctgcctcatcattagtgttcctttagaataatgaagcctgctccatccattaactccactaacatttgctctccccgtggacagaggttaaaaattaattactcttccaacatattgattacacgactataaatataaaaacag

SEQ ID NO: 515 - DNA, 1593 bp, Rattus norvegicus
atggcaaccgatgggctgcacgagaacgagacgctggcgtcgctgaagagcgaggccgagagcctcaagggcaagctagaggaggagcgggcgaagctgcatgacgtggagcttcaccaggtggccgagcgggtggaggccctgggccagtttgtcatgaagaccagaaggaccctcaaaggacacgggaacaaagtcctgtgcatggattggtgcaaagacaagcggaggatcgtgagctcctcacaggatgggaaggtgattgtctgggattccttcactactaacaaggagcacgcggtcaccatgccttgcacctgggtgatggcgtgtgcttatgccccatcaggatgtgccattgcttgtggtggtctggataataagtgttccgtgtacccactgacatttgacaagaacgagaacatggctgccaagaagaagtctgtcgctatgcacaccaactacctgtctgcctgcagcttcaccaactcagacatgcagatcctgacagccagcggtgatggcacttgcgccctgtgggatgtggaaagtggacagctgttgcagagcttccatggccatggggctgacgtcctctgcttggacctggccccctcagaaactggaaacaccttcgtgtctgggggttgtgacaagaaggccatggtgtgggacatgcgctctggccagtgtgtgcaagcctttgaaactcatgaatctgatgtcaacagtgtccgatactaccccagtggagatgcttttgcttccggatcagatgatgccacgtgtcgcctctatgacctgagggcagatagagaggttgccatttactccaaggagagtattataykwggagcatcaagcgtggrttyctccctcagtggccgcctgctctttgctgggtacaatgactataccatcawtgtctgksaygttctcaagggctcccgggtctccatcctgtttggacatraaaaccgtgttagcactctgckagtgtctcctgatgggacagcattctgctcagggtcrygrgrtcacaccctaagagtttgggcatawkcctctcccagcgtgcaaraaggacacgtgctctcccgtgtggatacgacctcttgatgagcccagggcttcccacaggtagcctatgggagcaatcccagtcagcactcactcacccgtccagtgtctccatgaaatccgccctcccasgaaatactcagataggccctggctcttcaactggycctccaagcccttctttcatctcaaayactctgtgaagttttgtccgtttttgaagctattccawccaccagaattccacgtctgtcagcatttcaaatgtccctcattgcttccttgaatccagtctgtcttcagagcactttaaagtctaccttttcttggtgtcgactgtggtttctagagccatcgtctggacatgccggctatatggactgtgagagtggctattcagtggtctgtaacagaaggaaatttcagttccaaatgtacagaatcacacagaatcactttttaaaactgtttctaggtaaaagtatctttttcaammaaaaaaaaaaaaaaaaa

SEQ ID NO: 516 - DNA, 1618 bp, Rattus norvegicus
gatcccccgggctgcagggaactaagtgggttgtccgggttccgagactagcgctctgcagagacaccagatcgctggaccctctcacaggaaggcgtcatgccccaaaacgtagttctcccgggccctgcgtcctgggggttcagactctcaggaggcatagacttcaaccagcctttggtcatcaccaggatcactccgggaagcaaggcagaagccgccaacctgtgccctggcgacatgatactggctatcgatggctttggtacggagtccatgactcatgctgatgctcaggacaggatcaaagcagcatcttaccagttgtgtctcaagattgacagggcagaaactcgcttatgtcccgcagtgtcggaagatgggaaagcgcatccctttaaaatcaacctagaggctgaaccgcaggatgtgaactactttgaacacaagcacaatattcggcccaaacctttcataattccaggccgaaccagtggctgcagcactccttccggtattgactgtggcagtggacgtagcaccccttcttccgtcagtaccgttagtacgatctgcccaggtgacttgaaagttgctgctaagatggcccctaacattcctttggaaatggaacttccgggcgtgaagattgtacatgctcagtttaacactcctatgcagttgtactcagatgacaatattatggaaacacttcagggtcaggtttccacagctctaggggagacaccctccatgagtgaacccacagcttcagttccccctcagtcggacgtgtaccgaatgctgcacgacaatcgggatgaaccagctgctcctcgccagtcaggctccttcagggtcctgcaggagctggtgaacgacgggtctgatgaccgtcctgctggaactcgaagtgtgaggccggttactaaagtccatggcggggctggcggtgcccagaggatgccactctgtgacaagtgtggcagtggtattgtaggtgctgtggtcaaggcccgggataagtaccggcaccccgagtgctttgtgtgtgctgactgtaacctcaacctcaagcagaaaggttacttcttcgtggagggggagctgtattgtgagatkcrsgcamgagcccgsrygwrgcycccasamgsykacgayacckkcactstgtmcmcymaagctyarattcttwmcagacgagaacaytcattcacgcatgsgcacacacgaacaccggsggatgwtaaggaggacttcaagcaggrggagtgcgaaggtmacctcccaatsgaaagcgaggcttttagtcatttatcttactgtgtagtgagggaaagacatggggaggcagaggcctgcctamtgacaaaagtattatctgtgggttgtaattmtttatmtttggggacagcawtggtgacatttaaagcaataacgttgtaatrccatgctytacggtttccatytgttacacgcccatccgatgcgtgaacachtggatatktagggggggtccamttgtmtttcctwccaagttgmttttggtaattgtagtaacgcsrarttacagctttgtaytgghvcaaaaaaaaaaawwwaaaaaaaaaaaaaaaaa

SEQ ID NO: 517 - DNA, 2163 bp, Rattus norvegicus
ttggaacgtgtgcgacagctcgggcaagccctgctgctccggctgcgggaggtcacccattctgtgcgcataggttttggctcctttgtggacaaaacggtgctaccctttgtaagcacagtgccctccaagcttaaccacccatgccccagccggttggagcgctgtcaggcacccttcagctatcaccacgtgttgcccctcaccagggatgctcaagccttcgagagagaggtgggacgccagaacgtctctggcaacctggactcacccgaaggaggctttgatgccattttgcaggctgctctttgccaggagcagattggctggagaaatgtgtcccggcttctggtgttcacttcagacgatacgttccacacagctggggatgggaaattgggtggcattttcatgcccagcgatgggcggtgccacctggacagcaacggtgtctacactaacagcgcagagtttgactatccctctgtgggccaagtagcccaggctctcacagcagcgaatatccaacctatctttgctgtcaccggcgcaacactgcccgtgtatcaggagctgagccagttgattcccaagtctgctgtcggggagctcagcgaagactccagcaatgtggtgcagctcatcatggatgcttacgacaacctgtcatccaccgtgactcttgaacactcttcgctcccacctggagtcagcatctctttcgagtctcactgtaggagtcctgagaagagtgagggtgaggctggggaccgtcggggacagtgcaatcatgtccgagtcaaccggatggtggatttctgggtcactcttcaagcctctcactgcctcccagaagcccatgtcctacggctctgggcccttggcttctcagaggagttaactgtggagctgcacacactgtgtgactgcaattgtagtgatgcccagcctcgcgctccttactgcagcgatggacagggggaccttcaatgcgggatatgcagctgtgcccctggccgccttggtcagctgtgtgaatgctctgaggctgacctgtcctccccagatttggaatctggttgccgggcccccaatgggacagggcccctgtgcagcgggaagggtcgatgccaatgtggacactgcagttgcagtggacagagctctgggcgtctgtgcgagtgtgatgatgccagctgtgagcgacacgggggcatcttctgtggaggctttggccactgccagtgtggagtgtgtcactgccatgccaaccgcactggcagagcatgtgagtgcagtgagagtgtggacagctgcgttagtcccgaaggagggctctgcagtgggcatggtgactgcaaatgcaaccgttgccagtgcctggatggctactacggggctctgtgtgaccagtgcctaggctgcaagtcaccatgtgagcaatacagggactgcgcggagtgtggggcgtttggtacgggtcccctggcagccaactgcagcgcggcttgtgctgacgtgaatgtgaccttggccttggcccccaatttggatgatggttggtgcaaagagaggacgctagacaaccagctgttcttcttcctggtggagaattcggccagaggggtcatactgagagtgagaccccaagagaagggagcagaccacacccgtgccatcatactgggctgcgtagggggcattgtggcagtgggattagggctggtcctggcttaccggctctcagtggaagtctatgaccgccttgagtacagccgctttgagaaggagaggcagcaactcaactggaagcaggacagcaatcctctctacaaaagtgcggtcacaactaccgtcaaccctcgcttccaagggggcaacaaacagtcgctgtccctccctctgacccaggaggctgactgacttaggattcttgtcttggaggacagagggggcagtagggcaggggcagtgtctgttgcaaagttttttttcagactggccttcagagggcagcgtaaccacggcaacagccaccccacgtgaagggctggtccttscaccataaagttctgcctcagactttcggcctgtgctgtacttcaccccgggacaaaaccagaaacaaataaacaaacammcaaamaaaaaaaaaaaaaaaaa

SEQ ID NO: 518 - DNA, 1851 bp, Rattus norvegicus
  misc_feature (961)..(961): n is a, c, g, or t
  misc_feature (995)..(995): n is a, c, g, or t
ctccggaccacgggacccgggcgccccagactcgcgcctctagcgcgcccccgtcggctgcgggcacgcgtgggaargttggcctggaaccggcccgaccagttcctgcctggcgcgcggaccggccgcaggaagttgccgcaaaactttttttgggggggtgcgaccggagccccccgagcgcgcgggmtgcatgcgcccgggatagccgggttcccctcgggtcgccaggcgtgcccagagggacggactcgtccggggcgccccggccsgctgtccccggggctatgscmatggtgaccggtggytggggcggccccggaggcgacaygaacrgcgtsgrcamgrsakgtgggagctacccacgcgcgaccgaggacgactcggcctcgcctcccggggcgactagcgacgcggagccgggtgacgaggagcgtccggggctgcasgtggactgcgtggtgtgcggkgacaagtccagcggcaagcactacggcgtgttcacctgcgagggctgcaagaktttcttcaagcgcassatccgccgcaatctcagctacacctgccggtccaaccgtgaytgtcagattgatcagcatcaccggaaccagtgtcagtactgtcgcmtcaagaagtgcttccgggtgggcatgcgcaaggaggckgtgcagcssssbsssawmycgcacgctctcccggktchcgcggsctgcagccctccgggcgcggcgssagtcbagccgttcgcgrrgccgccrgtgtccgarctgatygcgcarctgctgcrcgctgagccctamcccgcggmtgggcgctttgrtggcggcggcgccgtgcwgsgyatcsacawcgtgtgcgagctggyggcgcgcctactgttcarcacggtcragtgggsccgccacgcgcccttcttcccggagctgmcggscgccgascargkggsbctgctgcggstcanctggwgcgagctgttcgtgytgaacgcsgsgcangcgsskstaccgstgcacacggsaccgctgctggstgscgyggggstgcacsccgsscccatggctgcggrgcgcgcggtggscttcatggaccaggtgcgtgccttccargagcargtggrcaagctgggccgcmtgcaggtggatgctgccgaktacggctgcctcaargccatcgcgctcttcacgcctgatgcctgtsrcswkkctgacccagcccatgttgagagcctgcaggagaaggcacaggtggccctcaccgagtatgtccgtgcccagtacccatcacagccccagcgctttggacgcctgctgctgcggctgccggccctgcgtgctgtgcctgcatccctcatctcccagcttttcttcatgcgcctggtgggcaagacacccatcgagacgctcatccgggacatgcttctgtcagggagcacctttaactggccctatggctcgggstagtgatggtcctttcctaggacacatggaagctggggccttgtagggaccatgggraccagggccccagcttctcttctgagactgrcykmkktttttaaagactgtgaaatgtttggtttggtttgttttttaaataatcatgaaaccaaaaagattcggatctcccaggctccagctttgtcctggcagccttcggcagggtggggctgagggtctggagccagcatgctagtgcctctggtgtcstgggwatctggaaggrccactgcagctgggcaggggtgctatgggccaggagggtccyctggamacatggcccatggagggaaccatgaaatcatggccaacamtaaagatattcccatccytraaaaamaaaaaaaaaaaaaaa

SEQ ID NO: 519 - DNA, 1790 bp, Rattus norvegicus
caaaaaggaaaaactaactaacctcaatcaactagccctgagccacccggggcgccctcccgcgccctctcgcaccctcgcacacacaaaaggcggcgcgccggagcccgagacccgggagccgccgccaccccgccgccgcccgcagccaggggagcagaagtccggacgcggcccccatagatatggcaatggtagtcagcacgtggcgcgacccccaggacgaggtgcccggctctcagggcagccaggcctcgcaggcgccgcccgtgccgggcccgccgcctggcgccccgcacacgccacagacgccgggccaagggggcccggccagcacgccggcccagacagcggctggcagccagggcggccctggcggcccaggcagcgacaaacagcagcagcagcagcacatcgagtgcgtggtgtgcggggacaagtcgagcggcaagcactacggccagttcacgtgcgagggctgcaagagcttcttcaagcgcagcgtgcggaggaacctgagctacacgtgccgcgccaaccggaactgtcccatcgaccagcaccaccgcaaccagtgccagtactgccgcctcaaaaagtgcctcaaagtgggcatgagacgggaagctgtacagaggggcaggatgccgcccacccagcctactcacgggcagtttgcactgaccaacggggaccccctcaactgccactcgtacctgtccggatatatttccctgctgctgcgcgcggagccctaccccacgtcgcgcttcggcagtcagtgcatgcagcctaacaacatcatgggcatcgagaacatttgcgaactggccgcacggatgctcttcagcgccgttgagtgggcccggaacatccccttcttccctgacctgcagatcacggaccaggtggccctccttcgcctcacctggagcgagctgttcgtgttgaatgcagcacagtgctccatgcccctccatgttgccccgctccttgccgctgctggcctgcacgcttcacccatgtcagccgaccgggtggtcgcctttatggaccacatacggatcttcmaagagcaagtggakaakctcaakgcactgcacgtcgactccgccgagtacagctgcctcaaggccatartcctgttcacctcakatgcctgtggtctgkctgatgtascccacgtkgaaagtttgcargaaaagtcccaskgyrcwkkggaagagtacgttakgagccagtaccccaaccagccaacacggytcggaaagcttttgcttcgtctcycttccctccgcacggtctcctcctcagtcayrgmgcaattgtttttcgtccgtttggyaggtaaaacccccatcgaaaccctcatccgggatatgttactgtccggcagcagttttaactgkccatacatggcaattcaataaataamtwwatcaaaataagggggagtgaaacagagaawgaaaaggcaaaagactggtttttgtttgcttaatttccttctgttaagaaaggatgttacaagtttgctaaaagaagagaggggaagaacttaatggactttgatttcaaaaaaaggacagagagaaagaaagaraaagagactgccaaatgaacttttacagaatgcattaaaaaaaaraaaamaamtcctgtgttgggcagaacaacttgctacttatyatttttgkataaaaagaaaattagtctttcttttctttatggtaaatatttgaaaaatattgctaacagtgcatttaagagattgggagaaaattagcaca

SEQ ID NO: 520 - DNA, 5270 bp, Rattus norvegicus
gagttaggtgggcagtggcacacacctttaaccccagcattcagaaggcagaagcaggaggatctatgtgatttcggggccagcctggtctacaaagtgagttccaggacagccagggatgttacacagagaaaccccatctcgaagaaccaataaatatccaaaacctccgtgttcagtagctggacagtttcaggggtatcggcctcaccagaaaccagtgaacaatgggcaggcatcttccagtaggcaccttgcagagacagacgtgttaggggagacatacacctccctgtgggagctcaactgctgccctcacagagacacccacatgcccttcgggcctcgaaagccaccattcacaacttcactgtgcgtggtcctagagggaggcgccaagtgtccagccaagacagatgtaccatgacgactgcatttcacttggatgatgtctgaagaaacaggcagtgtgttctgtatctgttggcatattctgggcgacacacagggcccaggtaaggtactaggagatcaaactggatagaatggcagggttgttggggattaagggggttcagtggctgagccttctgttcctgcgctgcgtggctgcagcactcagaggctgactcgggtctaaacaaactctcaaaaacctggcgaggttttcatagcacataagacagggcttggagtggacaggaagagctcctagtccagcaggaacccacaaggactcatgggcactgctgctggcccctgtcctcaacagaggctggccactggccccggagccctgctgaggccgcacttttgctgtgtaaactgctctgtggctctgggcggagactccctccccgcagatctataatttctcagaaaagaggctgaggaataacctggaaaatgccctagacatgggacagcatggtgggaaccacagtcccctgaccttcccagacctgcctatttcctctgcttgcttagagatagcttccaatgatatcccccagtccccctaagaaactgtccttcctgaaacccagtactgcctctcccggcccctcccgtgtgcattcccaccatcccagggcaaagggacagagctcaaggcagggtttgctgagctttgaagtgtccagcaggtcacagctctcaggccctggaggaggaagctgagatgtggctccggcagggtgagtggagccagggccaggttgagggtcccacatgcagccctcctgcctcccccagggacagcatgtttacccggggtctttgcacacaaggaagtagttaggccctccatactgtggaggccggtggaagctggctctgaccctccaggcttgggtgcccactgtcttcctgccagccagcctttcctaggaggactgtgctgggtagagcaaacatgaggtagctggtggccctgccaggtgttcctagaagaggccctggaggaggggcagtagccagacatcagctgacctagaggtcacaggaaggctgagactgggccttggacaaacccctgggctgggaggcacaaatggtgggcccactcaggcttaagaaaccccaggttagacagcatgggagaagtacaagcaaggccttaggaaccgcaaaactgcttaaccctgacacagctatctgctcagtataggggtgaatagggggattcccaggaaccccggagctcccctcaccttgtctgaacctattgggagacagggtcccctaaacctaccttgagcaccaatcctgtaagactactccaccaagcctctacctccaacaccagcaggggtggcttttaaagtctccctgagggagactttagggcagacgaagtgcccctcccttgctccatctgcacccaggagagctgctgtcgagactagctgcccagcacgagagggttaaaggagcgagagtgtggggcagggccagctgagggctgccagctacaggcagtggggaaatccacagggcagcagcctgtattgtagacggcccttgctcactgcctgcctgcagccagctctgtacaaggaacaatggccctgaggacaggtgaggaacccctatcccctgccacttgctctgagggtggctggtcctctcctgagcccactgggagaagccccttaactcagggtgggctggtgggaattctgggttgggtcttgttataacaatttctggcaccggagggtctctcttccttttccccttggtggtggcactgtgagaaagggccaaatgaaggcagggcagacagaagcagcaagtaccttacccctgggcacacggtgcagaaatggcgctcaatgctctcgacattcccacctcacagcctgctgagatggtttgccgcacacggcccgcgacccttctaactaccattcctcttaagggcccggccctgggtgaataggaaaatgtcttatcccttgtctgcctttggagtgcccccaccgagtctcacttccaaaccaccaatacgcagtcacaccagacacatacggcataggtgcggaatattgttgtcctacccaacttgatctggaactctcagcatgcacctgaggtagattagaattggggtgccagctgggtttgtgtgatttgacgtctggttggatggacaactggggctttctagactcccactcttctaccagcaagggttatagccttcatatactagggagcaaataaggctcgcttcacccctattggggcctaaaggcagggaacgcacaattttctgtccagacactgaggactacaaatgaatatgctacctgggtctatcccagaatattctggaacagtcagatctgggccagcacctcgattctatttctcagtctggctgttgtgaataccccagaggacacagaccgcctagtggccagggcccaggttgcctgtaaagccagggtaaatggaaaagagctacatatcctctgtgcccttgcaataagatggggaccaccacttgctggttccatgggttggaaaactgaagtggcttcaaaggacaggatccggcagtcaccagtgtctgcttggtatcaaagtgggatggcgtccctctcttaccatggctgagggctaaggtttggctcacatcctggggcacagtcctttgggcacctccttgccaagcccttctccccacaggaggcccagccctggtggtgcttctggctttctgggtggcactgggcccctswcasskgcaggggacagatcccggagcgtcggcagatgccgagggcccccagtgccccgtcgcctgtacctgcagccwtgatgactacacagatgagctcagcgtcttttgcagttcaaagaacctcacacatctgcctgatgacatcccagtcagcaccagagccctgtggcttgatggcaacaacctctcttctatcccctcagcggccttccagaacctgtccagcctggactttctcaacctgcagggcagctggctgaggagcctggagccacaggcactgctggggctgcagaacctctactatctgcacctggaacggaaccggctccggaacctcgccgtgggcttgttcacacacacaccgagtctggcttcactcagcctgagcagcaacctcttgggccggctggaggaagggctgttccagggcctcagtcacctttgggacctcaacytgggttggaacagtctagtggtcctgcctgacacagtgttccagggactgggcaacctccacgagctggtgctggctggcaacaaactgacttacctgcagcctgcgctcttctgtggcttgggcgagctgcgggagctggatctgagcaggaacgcactccgaagcgtcaaagctaacgtctttgtacatttgcccaggctgcagaagctgtacctggaccggaacctcattacagccgtggcccctcgtgcctttctgggcatgaaggccctgcgttggctggacctgtcgcacaaccgcgtggctggcctcatggaggacaccttcccaggcctgctgggcctgcacgtcctgcgcctggcacacaatgcgatcgctagcttgcggccgcgcactttcaaagacctgcacttcctggaggaactgcagctgggccacaatcgaatcaggcagctcggggagaggacattcgagggcctggggcagctggaggtgctgacgctcaatgacaaccagatcactgaggtcagggtgggcgccttctctggccttttcaatgtggcggttatgaatctctccggcaactgtctgaggagcctcccggagcgggtgtttcagggtctggacaaactgcacagcctgcacctagagcacagctgcctgggtcacgtccgcctgcacacttttgctggcctctcagggctgcgcaggctcttcctcagggacaacagcatctccagcatcgaagaacagagcctggcagggctttcggagctcctggaactggatcttactaccaaccgcctcacacatctgccccgccagctcttccagggcctcggccacctggagtacctgcttctctcctacaaccaactgacgactttatccgcggaggtcctgggccctctgcagcgggccttctggttggatatctcacacaaccacctggagacgctggccgaaggccttttctcatctctggggcggcttcgctacctcagcctcaggaataactccttgcagaccttttcaccacagcccggcctggagcgcctgtggcttgatgccaacccctgggactgcagctgtcccctcaaggcgcttcgagactttgccctgcagaaccctggtgttgtcccccgctttgttcagactgtctgtgagggggacgactgccagccggtgtacacctacaacaatatcacttgcgctggccccgccaacgtctcgggcctcgacctaagagacgttagtgaaacacattttgtgcactgctgacactggctacttactggcccggtctggccgaacactgcctcatggccaggacggggtctcattgttaacagaataagctggctctcaaattcctacccatctctaggggacaggtcctggctgctcacttcctggaagcaggctgtactggaagctatgtggcctagaaagggtgggctcaggccaagtgtccaagggcccaaaggagggaggtgctcagaggctctccctgctgccaacaattaaagcaaatactaagatagcttgtgacctggagta

SEQ ID NO: 521 - DNA, 1456 bp, Rattus norvegicus
cacgaggcagagasrcgrgkgcgcgggckgacagcgggcaccatgcgggaaggctatccccgggggtgggcagtgccactctctgccacccacctggcgctgtgagaccggcgtcgccaccatgttccccagccctgcgctcacacacacgcccttctcagtcaaagacatcctgaacctggagcarcarcarcgcagcctggcggctggggacctgtctgcgcgcctcgaggccaccctggcgcccgcctcctgcatgctggccgccttcaagccggasgsctactcaggccccgaggckgsagcgcccggcctggcakagmtgcgcgcggagctgggccccgcgccttcgscccccaagtgctctcctgctttcccaaccgmccctacattttatccgmgagcctacggtgaccctgaccccgccaaggaccctcgggcggataakaaagagctgtgcgcgctgcaraaggcggtggagctggacaaagccgagacagacggcgccgagmgrcsacgmscrcggcggcgacggaagccacgcgtgctcttctcgcaggcgcaggtctatgagctggagcggcgcttcaagcaacagcggtacctgtcgscssctgagcgcgaccaactggccagcgtgctgaagctcacgtccacgcaggtcaagatctggttccagaaccgccgctacaagtgtaagcgacagcggcaggaccagactctggagctgctggggccgccgccgccgcccgcgcgcaggatcgcggtgccggtgttggtgcgcgacgggaagccctgcctgggggactcggcggcctacgctcccgcctacggcctgggtctcaacgcctacggctacaacgcctacccctatcccggctacggtggcgcggcctgcagtcccgcctacagctgcgccgcgtaccccgccgcgccccccgccgcgcassccccagccgccagcgccaacagcaacttcgtgaacttyggcgtcggggacttgaacacggtgcagagtcccgggatgccacagggcaattcgggcgtctccacgctgcacggcatccgagcytggtagggaaagggcccgthtggggmaccccggaccgactcccacctttaggagaagggcgatramwmmrrrgatrgaaaggctcccactgtgtcctgtccctcggatttcacacccacacttgcgcaggcctgggacctttctccgatccatccccttttgttgacytaacctgatgcctcggtcytgggaaagcccttcaggkccaaaggcaccctccacggattccatayyaggacccggagcctgggccsgscgcccgggccctgggtgccttgccgscrcccaccsrccsgkrtttatgtttttacctgttgctgtaagaaatgagaaccctyttcccattaaagtgrgtgsgctwamrmmaaaaaaaaaaaaaaaaaa

SEQ ID NO: 522 - DNA, 2388 bp, Rattus norvegicus
ttccctcccgcctctccacccgccccacttctcattcacttggctcgcacggcgcagacagccaggcgagcacacaccgccagtctgtgtgcagagcgggagccagaagccgtgggggacacccggtcatgcacgcccccaactgaagcgacacctcaaagccgcagctcctggcagcccaggccattgcaagaagctcaggctagctcataggaacataccccttgagaccctcggatcctcccttccaggccagtcctctctcagactctctgctaagtgcagacaggagcgcacagtggcccctgctcgccgcatcatggagcggatccccagcgcgcaaccacctcctacctgcctgcccaaaacgccagggctggagcacggagacctgtcagggatggattttgcccacatgtaccaagtgtacaagtccaggcggggaataaaacggagcgaggacagcaaggaaacttacaaattgccgcaccggttgattgagaaaaagagacgtgaccggattaacgagtgcattgcccagctgaaggatctcctacccgaacatctcaaacttactactttgggtcacttggagaaagcagtggttctcgagctgacgctgaagcacgtgaaagcattgacaaacctaattgatcagcagcagcagaaaatcatggccctgcagagcggtttacaagctggtgatctgtcgggaaagaatattgaggcaggacaagaaatgttctgctccggtttccagacctgtgcccgggaggtacttcagtacctggccaagcatgaaaacactagggacctgaagtcttcccagcttgtcactcatctccaccgtgtggtctctgaactcctgcagggtagtgcttccaggaaaccattggactcagctcccaaacccgtggacttcaaagagaagcccagcttcctagccaagggatcagaaggccctgggaaaaactgtgtgccagtcatccagaggacttttgctccctcgggcggggagcagagtggtagtgacacggacacagacagtggctacggaggcgaattggagaagggtgacttgcgcagtgagcaaccctacttcaagagcgatcacggacgcaggttcaccgtgggagaacgcgtcagcacaattaagcaagaatctgaagagccccccaccaaaaagagccgaatgcagctctcagatgaggaaggccacttcgtgggcagtgacctgatgggttccccatttcttgggcctcacccacatcagcctcccttttgcctgcccttctatctcatcccaccatcggccactgcctatctgcctatgctggagaaatgctggtatccgacctctgtgccactgttatacccaggcctcaacacctcagcagcagccctctccagcttcatgaacccagacaagatcccaactcccttgctcctgccccagagactcccttctcccttggcacattcgtcccttgactcttcagccttgctccaggccctgaagcagatccctcctttaaacttagaaaccaaagactaaactcttgagggcgaatctcctgctgctttgcttttcctttccccactaattccaagaccacaaaaggtttctgtgagtgcagagagatcggcccaccatgcagacccacagagaagattcagaatgtgtgtgagagtgagtgtgtgagtgcgcgtgcgtgtgcttgtatgtgtgtttatagatgtaggacattaagttccttctgacacagggaagatgtgagaaggatggcctgacatcagatgacaagaggtctatagcacatctctgggcttttccctacccagagaagagccccctttgatacaaatcagttggattttcatatgcttcaaaggcttgatctgtgagtcactccagtttgggacataggtctgtctgtggctttgagaaaaggtactttcaaaagagggctttccagagcacagctcacagccagctgttaggaccccacccttctcctttattgtggaggtgactcacagcagactgacagtggtcagactgagctttctgctaaggtggtgaggtagccaacactggcatgtctcggtagtggtttgggcaaatttccgcaggtctcttcccccaaccctgcctctgatgaataaagacaatgagtacagttccttaattcaggcttttgtgactagcttactacggaaccgaaaatggtcccctttgtacaagccgagctgttatggaatcacggtgaaccagacccaggtctgtggcacctgtttgtttgtttttttttttttttttttttagctctcatttctacggcatgctttccaaggaaccaaaggagggtctcagagatgccccctcgt

SEQ ID NO: 523 - DNA, 1131 bp, Rattus norvegicus
gcaggcagtccatggacttgtgtcaacttgaattgcttcctccagagatgagcaaatgccataattatgacctcaagccagcaaagtgggatacttctcaagagcatcagaaacaaagatctgcactccctaccagccgacctggagagaatggtatcataagacgaaggtcttctatagaagaactcaaaatatctccactgttcgttgttcgagtccttgttgcagccatgaccattcgcttcaccgttatcacattgacatggcttgctgttttcataactttgttatgcaacaaggaagtttcagtttcctcaagagagggctactgtggcccatgccctaacgactggatatgtcacagaaacaactgttaccaattttttaatgagaacaaagcctggaaccagagccaagcttcctgtttgtctcaaaattccagcctgctgaagatatacagtaaagaagaacaggatttcttaaagctggttaagtcctatcactggatgggactagtccagagcccagcaaatggctcctggcagtgggaagatggctcctctctatcacccaacgagttaacactggtgaaaacaccaagcggaacctgtgctgtctatggctcaagctttaaggcctacacagaagactgttcaaatccaaacacatacatctgtatgaaaagggcagtgtaaagatttcattaaccgtctcacagaaacagccaggacaagagaattgtcccaggagaaactggaactaatgagactcaacataagacaaacataaaagaacagtactgcgccctccacagaactaatagttggacatatcgtgtccggtaaaacaaggggagcctgtggggccaaggaactatgaggcaggggatggagggagcaagaggactaagagtttggttgaggcctatccaaacccgggaaatctggccctgccctactggaggaggccttgttgcccagtagactctcccttataagatcaagtctatcaacacctggaattcttccaagatatcccctacacactccctaaaagtttaaatagcccctttccccccaattaaatgacctatcttattcaagatgcctcaaaaaaaaaaaaaaaaaaaaa

SEQ ID NO: 524 - DNA, 357 bp, Rattus norvegicus
gatggcttcatgcaggcatccaccacagctctacatatcacggaggctgacgctgagagcagtccacccagcatgcattgccacagcctggcagccagatattacaactgtgtgtcctttcctgggcgcctggtcagggggactaaggctccaggttcctccaggatgaagacgtttgaagaattgcccatgacccctacaacctacaaagcctctgtggataaccaaacagacagcgggatggtgctggcctcagaagagtttgagcagatagaaagcaggcatagacaagaaggcagcttcagccgtaaagatcctggccagcacatggatatttccagaggacacccggacctc

SEQ ID NO: 525 - DNA, 378 bp, Rattus norvegicus
gtgtccgtctacagatgtgggggttgctgcaacagtgaagggctgcaatgcatgaacaccagcacaggttacctcagcaagacgttgtttgaaattacagtgcctctctctcaaggccccaaaccagtcacaatcagttttgccaatcacacttcctgccggtgcatgtctaaactggatgtttacagacaagttcattcaattattagacgttctctgccagcaacattaccacagtgtcaggcagctaacaagacttgtccagcaaactacgtgtggaataactacatgtgtcaatgcctggctcagcaggattttatcttttattcaaatgttgaggatgactcatccaatggattccatgatgtctgtggaccc

SEQ ID NO: 526 - DNA, 185 bp, Rattus norvegicus
gcgtttgtggtgtgttggctacactgttctgcagatcctcccattggtggtgcttggggtcacctttrtcctcggggwcctgggcaatrggcttgtgatctgggtggctggattcmkgawsacacgcacagtcacacatctgttactgactgcctgctgactttcttcacgcacatacatctatg

SEQ ID NO: 527 - DNA, 525 bp, Rattus norvegicus
aaaggatccatgagtgctacacgccgcgtcttggttttgcagctctgcctcatggccctctctggctgttactgccaaggcacactcattgaaagcctagaaagtctgaagaactattttaactcaagtagcatggatgctatggaaggaaagagcctcctcttggatatctggaggaactggcaaaaggacggtaacacgaaaatacttgagagccagattatctctttctacctcagactctttgaagtcttgaaagacaaccaggccatcagcaacaacataagtgtcatcgaatcgcacctgatcactaacttcttcagcaacagtaaagcaaaaaaggatgcattcatgagcatcgccaagttcgaggtgaacaacccacagatccagcacaaagctgtcaatgaactcatcagagtgattcaccagctgtcaccagaatctagcctaaggaagcggaaaaggagtcggtgctgattctggggtagagagtgtgccaataagaagaattctggatccttt

SEQ ID NO: 528 - DNA, 1611 bp, Rattus norvegicus
tttgaattggtccccactgcttccagaaggaaaggcaagtttgttcctatgacatccccggacagatacttgccgctgacctgcccagggccctgcaagccttgaaaggtctcatcttcttttcccgagcaggagcctgaggtctgcctcctatgcaccccagcacccccatcagctccctcttctccttcaccagccccgcagtgaagaggctgctgggctggaagcagggagatgaagaggagaagtgggcagagaaggcagtggactctttggtgaagaagttaaagaaaaagaaaggcgccatggatgaactggagagggcgctgagctgcccgggccagcctagcaagtgcgttaccattccacgctccctggatggacgcctccaggtgtcccaccggaaggggctgccccatgtcatctactgccgcgtgtggcgctggccagatctgcaatcccatcatgagctgaagcccttggaatgctgcgagttcccgtttggctctaagcagaaggaggtctgcatcaacccataccattaccgcagagtggagaccccagttctgcctccagtgctggtaccaagacacagcgagtacaaccctcagctcagcctcctggccaagttccgaagtgcctcgctgcacagcgaaccgctcatgccgcacaacgccacctaccctgactctttccagcagtctctcggtcccgcaccgccctcctcgccaggacacgtgtttccgcagtctccatgccccaccagctacccgcagtcccccggaagtccttccgagtcagacagtccttatcaacactcagacttccggccagtttgctacgaggagcccctgcactggtgctctgttgcctactacgaactgaacaaccgggtcggagagactttccaggcatcctcccggagtgtgctcatagatggcttcacagacccctccaataacaggaataggttctgtcttgggcttctttcaaatgtaaacagaaattcgacgatagaaaacaccagaaggcacattggaaagggtgtgcatttgtactacgttgggggcgaggtgtacgcggagtgcgtgagcgacagcagcatctttgtccagagccggaactgcaactaccagcacggcttccacccggccactgtctgcaagatccccagtggctgcagcctcaaggtcttcaacaaccagctcttcgcccagctgctcgcccagctgctcgcccagtcagtgcaccacggctttgaagttgtctatgaactgacgaagatgtgcacgattcggatgagctttgtgaagggctggggagccgagtatcatcgccaggatgtcacaagcaccccctgctggattgagattcatcttcatggaccactgcagtggttggacaaggtgctaactcagatgggctccccacacaaccctatttcttcagtgtcttaagtcatgtgctcagctgcatttccacagaatagacgaaggcaggggcttctaccactgcaactcgcagctagtaaaagaccctggacgcagatgtaaacacgtacgatgcacacgattcccatttctatccccattggttctgtgctacctactt

SEQ ID NO: 529 - DNA, 2458 bp, Rattus norvegicus
agctttccggggcagcgagtggcggggccgggtgctgagcgagcggggcgtggagagcgtcgcgcggcccctcgcgccgggctccgtttgcaggccacagcccccgcgaggtggcccgccggccctgggccgcccgtcctctggcagctgtggtgagcgcagcgtcgggccggcatgaaggtcacgtcgctcgacgggcgccggctgcgcaagatgctccgcaaggaggcggaggcgcgctgcgtggtgctcgattgccggccctacctggccttcgccgcgtcgagcgtgcgcggctcgctcaacgtcaacctcaactccgtggtgctgcggcgggcccggggcggcgcggtgtctgcgcgctacgtgctggccgacgaggcagcccgcgctcggctgctgcaggagggcggcggcggcgtggcggcggtggtcgtgctggaccagggcagccgccactggcagaagctgcgggaggagagtgccgcgcgcgtcgtcctcacctcgctgctggcctgtctgtccgccggaccgcgggtctacttccttaaaggtgggtacgagaccttctactcacagtatcctgagtgctgtgtggatgcgaagcccatttcacaagagaagctcgaaggtgaaagaggcctcctcagccagtgcggaaagcccattctcagcgtcgcctacagaccagcttatgaccagggtggcccagttgaaatccttcccttcctctaccttggaagtgcctaccatgcatccaagtgcgagttcctcgccaacctgcacatcacagccctgctgaatgtttcccgccggacctctgaggcctgcacaacccacctacactacaagtggatccctgtggaggacagccacaccgccgacattagctcccactttcaagaagcaatagattttattgactgtgtcagggaagagggaggcaaggtcctggttcactgtgaagccggggtctcccggtcgcccaccatctgcatggcttacctcatgaagaccaagcagttccgcctgaaggaggccttcgagtatatcaagcagaggaggagcgtggtctctcccaactttggcttcatgggacagctcctgcagtatgagtctgagatcctgccctccacacccaccccccaacctccctcctgccaaggggaggcagccagctccacctttataggccacttacagacactgagccctgatatgcagggtgcctactgcacattccctacctcagtgctggcaccggtgcccacccacgccaccgtcgcagagctccacaggagccccgtggccacagccacatcctgctgagaccggtcggctaccagcgcatccccaagagcaactgtgacctttggattttttaaacttgtggacatttcatacccgtgcaatactgaagacctctctctgtcccgctgccccggtgagatggtgaggggtcagcaggcttgcagatgcacttcaggctaacccggaggatggtttctcgcgattgtaggaaggccaagccatgcccccctagcacagcggcgtgctaactactgtacttccagaagccccgcccactcaggaccgcctcatccttgcacctcagaagtcccggcttctcatttcaagtgtaaggcaatacacagtcgcagcaaagtaggagcaagctgtgctggaccaggaggggaggagtccgcccgtcygrgrggaagcacaagtttcactgttaatttgaatttcggccaactttgtctgtctctgtcctctgtcacttcagggaagagagctggtcaccgctcagtcagaaaagttaaccccgctggatttgtcaagacaaaaggacctgcccgtctgaacccagtrykwskgaggttctgtctaggatcccatggaagctgttggtgtaaggagaagctcctgactcattggagtttcttgctcaccgagggctccttggtgaccttggactttggcatggttttwacaaatasttgaacctgtcccattgtatctctccmtaaagcacctstggtgtcattcagaaagttgtcagacchtagaccaaaaaccacccytttgagggggtagcaggaactgcmtgcgttctgggtcagtggtggtgactgacatactttttcagtttagtgtcctgtgtgctttttttgtcatccattgtgacaatgtttccctccmtaccctggggagtcgttttcaaactactgattctggggtctgcatcgtttgcaatgtggtactactatgtccttcgtagattgtttttccaaggggggaaaggcaataagtcacccccaaacccatgtgaatgtgaagaaaagcagygttgatgttttttttatatatatatatatacatgtagkacrmawttwraaaaawrwmaaaaaawaaaaawaaaaagtgmwwarwdmwwrwraaaaaaaaaaaaaaaaaa

SEQ ID NO: 530 - DNA, 783 bp, Rattus norvegicus
atgatagaaacatacagccaaccttctcccagatctgtggctactgggcttccagcgagcatgaagatttttatgtatttacttactgtttttcttatcacccagatgattgggtcggtgcyttttgctgtgtatcttcatagaagattggataaggtagaggaggaagcaagccttcacgaggattttgtattcgtaaaaaagctaaagaggtgcaacaaaggagaagggtccttatccttgctcaactgtgaggagatgagaaggcaatttgaagaccttgtcaaggatatatcgttaaacaaagaagagaaaaaagaaaagagctttgaaatgcaaaraggtgatgaggatcctcaaattgcagcacatgttgtaagtgaggccaacagtaatgcagcatctgttcttcagtgggcgaagaaaggatattataccatgaaaagcaacttggtagtgctggaaaatgggagacarctgacggttaaaagagaaggactctattatgtctacacccaagtcaccttctgctctaatcgggaacctttgagtcaacgtccattcatcgtcagcctctggctgaagcccagcagtgggtcagagagaatcttactcagggcagcgaatacccacagttcctccaagctttgtgagcaacagtccattcacttgggcggagtatttgaattacaagcaggtgcttctgtgtttgtcaacgtgactgaagcaagccaagtgatccacggaattggcttctcatctwttggcttactcaaactctga

SEQ ID NO: 531 - DNA, 731 bp, Rattus norvegicus
atgaaaattttgaaaccatatatgaggaatacatccatcttgtactacctgtgtttccttctcaacagtcacttcttaactgaggctggcatccatgtcttcattttgggctgtgtcagtgtaggtctccctaaaacagaggccaactggatagatgtaagatacgatctggagaaaattgaaagtcttattcaatttattcatattgatactactctatacactgacagtgactttcatgttattttgcacgagtacagtaacatgactcttaatgaaacagtaagaaacgtgctctaccttgcaaacagcactctgtcttctaacaagaatgtaatagagtctggctgcaaggaatgtgaggagctggaggagagaaacttcacggagtttttgcagagttttatacatattgtccaaatgttcatcaacacgtcctgactgcactcgaacctcgtcagtgtttctgttattaagacacctccgcctgctgcccagaggcagcacagctccatgcattcgtgatctgctgggaaaccaagctgcctaacaggaaacggttgagccatttggatcccatgaaccctcgggaatgaagagagggaaagggcttttctcggacttatttttgcttgcttatttttaatttattacttcagttgtgcatatttgtaatataacagaagatgtggaataaagttgtatgcatattttaaaaaaaaaaaaaaaaa

SEQ ID NO: 532 - DNA, 2334 bp, Rattus norvegicus
aattcgcggccgcgtcgaccagagaatggacatttcctccacaatcagtgacttcatgtctccgggccccaccgacctgctctccggttccctgagcaccagtggtgtggactgcaaccgcaagaggaaaggcagtgccactgactaccaagaaagtatggacacagacaaagatgaccctcatggaaggttagaatatgcagaacaccaaggaaggatcaaaaatgcaagggaggcccacagtcagattgaaaagaggcgtcgggacaaaatgaacagttttattgacgaattggcttctttggtaccaacatgcaatgcgatgtcccggaagttagataaactcaccgtgctcaggatggctgttcagcacatgaaaacattgagaggtgccaccaacccatacacagaagcaaactacaagccaacatttctatccgatgacgaactgaaacacctaattctcaggaatgaccttattggccagagtttgttcgactacctgcatccaaaagatattgccaaagttaaggaacagctatcttcctcggacactgcacctcgggagcgactcatcgatgcgaagactggacttccggttaaaacggatataacccctgggccctcccgattgtgctctggagctcggcgctctttcttctgtaggatgaagtgcaacaggccttcagtaaaggtggaagataaggacttcgcctccacctgttcaaagaaaaaagcagatcgaaagagcttctgcacaatccacagcacaggctacttgaaaagctggccacccacaaagatggggctggacgaagacagtgaaccagacaatgagggctgcaatctgagctgcctcgttgcaatcgggcgactgcactcacacatggttccacagccagtgaacggggaaatacgggtgaagtctatggagtatgtgtctcgacatgcaatagatgggaaatttgtttttgtagatcagagggcgacggctattttggcatatctaccacaggaacttctaggtacatcgtgttatgagtattttcatcaagatgatataggacaccttgcggaatgtcacaggcaagttttacagacaagagaaaagatcacgactaattgctataagtttaagatcaaagatggttcctttatcacactacgaagtcgatggttcagtttcatgaacccgtggaccaaggaagtagaatacattgtctcaaccaacactgttgttttagccaatgtcctggaaggcggggacccaaccttcccacagctcacagcatccccccacagcatggacagcatgctgccctctggagaaggtggcccaaagaggactcatcccackgttccaggcattccagggggaaccagagctggagcaggaaaaataggtcgaatgattgccgaggaaatcatggaaatccacaggataagagggtcatcaccttccagctgtggctccagcccactgaacatcacaagtacgcctccccctgatgcttcctctccaggaggcaagaagattctaaatggagggactccagacattccttccgctggcctactaccagggcaggctcaggagaccccaggctatccctactctgatagttcgtctattcttggtgagaacccccacataggcatcgacatgatagacaacgaccaaggatcaagcagccccagtaacgacgaggcagcaatggctgtcatcatgagcctcttggaagcagatgcggggctgggtggtcccgttgactttagtgacttgccatggccactgtagacactacattttgctctggcaacagctacagtatcaaagtgcattactgtgaagttttacmgwskgtgaagcttactggatagggagagaacagcttttatgtactgactccataaaagccatctcagagccattgagacaagtcaatctaccatgtgtaacttcagacaaagtggaactaagcctgctccagtgtttcctcatcattgagtttgggctagctgtggatagcttgcattaattgtatattttggattttggttgtgttgaattttttaatcattgtgcacagaagcatcattggtagcttttatatscaaaatggtcatttcagatgtatggtgtttttacactacaaagaagtcccccatgtggatatttcttatactaattgtatcataaagctgtttattcttccttgtaagaatcctttactataaatatgggytaaagtataatgtattagacagttaaatatttttaataaatgtttcccttgttctataaaaaaaaaaaaaaaaamaaaaaaaaaaaaa

SEQ ID NO: 533 - DNA, 3471 bp, Rattus norvegicus
ggcacgaggaccggctgaggattttatggttcttaagcggacttaagagcgttgtttcggattgttaagattcccgtttgctgggttttcctccctcaatcgtgctctcccgcggctgcctggggactggctcggcgaaggaggatggagagggggctgccgttgctgtgcgccacgctcgcccttgccctcgccctggcgggcgctttccgcagcgataaatgtggcgggactataaaaattgaaaacccggggtaccttacatctcccggctaccctcattcttaccatccaagtgagaaatgtgaatggctaatccaagctccggagccctaccagagaatcatgatcaacttcaacccacatttcgatttggaggacagagactgcaagtatgactatgtggaagtgatcgatggagagaatgaaggtggccgcctgtgggggaagttctgtgggaagatcgcaccttcacctgtggtgtcttcagggccatttctcttcatcaaatttgtctctgactatgagacccacggggcaggattttccatccgctatgaaatcttcaagagagggcccgaatgttctcagaactatacagcacctactggagtgataaagtcccctgggttccctgaaaaataccccaacagcttggagtgcacctacatcatctttgcaccaaagatgtctgagataatcctagagtttgaaagttttgacctggagcaagactcaaatcctcccggaggartgttctgtcgctatgaccggctggagatctgggatggattccctgaagttggccctcacattgggcgttactgtgggcagaaaactcctggccggatccgctcctcttcaggcattctatccatggtcttctacactgacagcgcaatagcaaaggaaggtttctcagccaactacagcgtgctgcagagcagcatctctgaagatttcaagtgtatggaggctctgggcatggaatctggagagatccattctgaccagatcactgcatcttcccagtatggtaccaactggtctgttgagcgctcccgcctgaactaccctgaaaacgggtggacaccaggagaggactcctacagggagtggatccaggtggacttgggcctcctgcgattcgttactgctgtggggacacagggtgccatttccaaggaaaccaagaagaaatattatgtcaagacttacagagtagacatcagctccaacggagaggactggatcaccctgaaggagggaaataaagccattatctttcagggaaacaccaatcccacggatgttgtctttggagttttccccaaaccactgataactcgatttgtccgaatcaaacctgcatcctgggaaactggaatatctatgagatttgaagtttatggctgcaagataacagattacccttgctctggaatgttgggcatggtgtctggacttatttcagactcccagattacagcatccaaccaaggagacaggaactggatgccagaaaacatccgcctggtgaccagtcgaaccggctgggccctgccaccctcaccccacccatacatcaatgaatggctccaagtggacctgggagatgagaagatagtaagaggtgtcatcattcaaggtgggaagcaccgagaaaacaaagtgttcatgaggaagttcaagatcgcctacagtaacaatggttctgactggaaaatgatcatggatgacagcaagcgcaaggctaagtcttttgaaggcaacaacaactatgacacacctgagctccgggcctttacacctctctccacaagattcatcaggatctaccccgagagagccacacatagtgggctcggactgaggatggagctactgggctgtgaagtagaagtgcctacagctggacccacgacacccaatgggaaccccgtggacgagtgtgacgatgaccaggccaactgccacagtggcacaggtgatgacttccagctcacaggaggcaccactgtcctggccacagagaagccmaccattatagacagcaccatccaatcagagttcccgacatacggttttaactgcgagtttggctggggctctcacaagacattctgccactgggaacatgacagccacgcgcagctcaggtggagggtgctgaccagcaagacggggcccattcaggaccacacaggagatggcaacttcatctattcccaagctgatgaaaatcagaaaggcaaagtagcccgcctggtgagccctgtggtctattcccagagttctgcccactgcatgaccttctggtatcacatgtccggctctcatgtgggtacactgagggtcaaactgcactaccagaagccagaggaatatgatcaactggtctggatggtggtcgggcaccaaggagaccactggaaggaagggcgtgtcttgctgcacaaatctctgaaactgtatcaggttatttttgaaggtgaaatcggaaaaggaaacctcggtgggattgctgtggatgatatcagtattaacaaccacattcctcaggaggactgtgcaaaaccaacagacctagataaaaagaacacagaaattaaaatagatgaaacagggagcaccccaggatatgaagaagggaaaggcgacaagaacatctccaggaagccaggcaatgtgcttaagaccctggaccccatcctgatcaccatcatagccatgagtgccctgggggtgctcctgggtgcagtctgtggagttgtgctgtactgtgcctgttggcacaatgggatgtcggaaaggaacctatctgccctggagaactataactttgaacttgtggatggtrtaaarttkwwawwwgataaaytgawsycacasartaattwytcakagkyrtgaaggcamggagctggagggarsaaggrargagcgcggcaggagaacagtggaggcgcagggactctgttactctgctttcactgtaagctgggaagggcggggactctgkyackscgctttcactgtaagctcggaagggcatccgcgatgccatgccaggcttttctcaggagcttcaatgagcatcacstacagacacaagcaggtgactgcggtaacaacaggaatcatgtacagcctgctttcttctsttggwttcgtttgggtaatcagaagccagttgagaccaasysksactgacttcayggyycatcctacttggccccctttttcctctctttctccttaccctgtggtggattcttctcggaaactgcaaaatccaagatgctggcactaggcgttgttcagtgggctctttcgatggacatgtgacctatagcccagtgcctagagcatattagcataaccacatttcaggggacaccaatgtccgcttttgcatcgctacgtgcagcgagcacaggaaaaagaaaaaaaaaaaaaaaaaaactcgag

SEQ ID NO: 534 - DNA, 420 bp, Rattus norvegicus
ccacacgcctcacacgccagctctgctgctgcagtgtgggtaaagcctggggcgcccggtgccagcgctgcccagcagatggtacagcagccttcaaggagatctgcccggctgggaaagggtaccatatcctcacctcccaccagaccctcaccatccagggtgaaagtgatttctccctcttcctgcaccctgatgggccacccaaaccccagcagcttcctgaaagccccagccgagcaccagcactcgaggacacagaggaagagagaggagtgaccttggacccaccagtgagcgaggagcgatcggtgcaacagagccaccccactaccaccacctcacctgcccggccttacccagagctgatctctcgcccctccccacctaccttccaccgattcctgccagacttgcccc

SEQ ID NO: 535 - DNA, 3053 bp, Rattus norvegicus
cggccgcctcccggacttyrtcgccaagctgaccaacaatacgcaccagcatgtctttgatgacctcagtggctcagtgtccttgtcctgggttggagacagcactggggttattctcgtcctgactactttccaagtgccactggtaattgtgagttttggacartccaagttatatcgcagtgaggattacggaaagaattttaaggacattacgaatctcatcaataacaccttcattcggacggagttcggcatggytattggtcccgagaactctggaaaggtgatattaacagcasaggtgtctgggggaagccgaggaggaagagtgttcaggtcatcagactttgccaagaactttgtacagacagacctcccctttcatcctctgactcagatgatgtacagccctcagaattctgattacctgttagctctcagcactgaaaatggcctgtgggtgtccaagaattttggggaaaaatgggaagaaatccacaaagcagtatgtttggccaaatggggaccaaacaacatcatcttctttaccacccaysysaaysrckmctsyaargcwsatcttggtgccctggaattatggagaacatccgacttggggaaaaccttcaaaaccattggtgtgaaaatctactcatttggtcttgggggccgtttcctcttcgcctctgtgatggctgataaggatacaacaagaaggatccacgtgtcwacagaccaaggggacacatggagcatggcacagcttccctctgtgggacaggagcaattctattctattctggcagccaacgatgacatggtgttcatgcatgtagatgaacctggagatactggatttggtacaatctttacctctgatgaccgaggcattgtctactctaagtctctggacagacatctctataccaccacaggcggggagaccgactttaccaacgtgacttccctccgtggagtctatataacaagcacactctcagaagataattccattcagagcatgatcacttttgaccagggargamggtgggagcatctgcagaagccggagaacagcaagtgcgatgctaccgcaaagaacaagaatgagtgcagccttcatatccatgcttcttacagcatctcccagaagctaaatgttccaatggccccactctccgagcccaatgccgtgggcatagtcatcgctcacggtagtgtgggagacgccatctcggtgatggtcccagacgtgtacatctcakatgatgggggttactcttgggcaaagatgctagaaggaccgcattattataccatcctggactctggaggcatcatcgtggccattgaacacagcaaccgtcctatcaatgtgattaagttctccacagacgaaggccagtgctggcagagctatgtgttcagtcaggagcccgtctacttcaccgggctggcttccgagccgggagccaggtccatgaacatcagcatctggggattcacggagtctttccttacccgccagtgggtctcctacacaattgatttcaaagacatccttgagcgcaactgtgaagagaatgactataccacatggctggcacactccactgaccccggagattacaaagatggctgcattttgggctataaagagcagttcctacggctacggaagtcatccgtctgtcagaatggtcgagactatgttgtggccaagcagccatccatctgtccctgttccctggaggacttyctctgtsackwkggctacttccgtccagagaatgcctcagagtgtgtggagcagccggaactgaagggtcatgagttagagttctgtctgtatggcaaagaggagcacctgaccacaaatgggtaccggaaaatcccaggagacagatgccaagggggaatgaatccggcccgagaagtaaaagacttgmagaagaaatgcacaagcaacttcttaaaccccaagaagcagaattccaagtcgagttctgtcyctatcatcctggccatcgtgggactgatgcttgtcactgtcgtagcaggagtcctcattgtgaagaagtatgtctgtggcggaaggttcctggtgcaccggtactcggtgcttcagcagcacgcagaggctgacggggtggaggctttggatacggcctcccacgctaaaagcggttatcacgatgattcagacgaggacctcctggaatagctcttctgaggagctgggactgagtgtgcatggagccacagtacctcctacattccctgaggctytgacttggggaaataaatcccccmctgcgtcsgsccccagctctctttytgccgcttccacccacgcccaaaggacctacactaaagaaagcagggtgggggtggggaccccaactgatytcagttggctctgaaaagaggggggcaattttaaattctttaacatttttgtttcaatttctgtcttttgtaaaagtgtgggctttarrmwwmwmwmrrwwtgttttgtatgttaagggacatgacttgggattcaaagggattgcttcgctgcccccactcttgtgtgtcctgtctggtgcccgccccagggcatctgccaactccaccatcaactcaactcccacatcatacctggtgctgtccctgggctctgctggtcatgcgaagccacctcagagaaggaaacagagggtgcagtgactggcgccgcctggccagcttccctccatccgtggacagccctgttcaaagagtaccgtgcaccagtgcaccagccctgctgcggcttccctcacccccaccccacccccaaccacgactytaaggcacagtgacttttcttttcccgtttaattaggcaatacccttgttaattgccctttggcaactaacttaatcatgtgcttccaacacactaaatagggaaaacttacagggcaatattattcttgtggcaagaaggagggagggacagaattgactagatctaacacctattaaagacaaaactggctgcttccaaaaaaaaaaaaaaaaaa

SEQ ID NO: 536 - DNA, 590 bp, Rattus norvegicus
targmtcgrcggcctcagactccttgggtatttggaccactgcaccgaagataccatctctccggattrcctctccctgagctccagacaccatgaaccttccttctacaaaggttccctgggccgccgtgacgctgctgctgctgctactgctgccgccggcgctgctgtcsctkggssysgwsrcgcwgcykctgcsckactgctgycgccagaagacgtgttcctgccgtctmwacgaactgttgcacggagctggcaaccacgccgsgggcatcctcactytgggaaagcggsgacctggacccccaggcctccaaggacgsctgcagcgcytccttcaggccaacggtaaccacgcagctggcatcctgaccatgggccgccgcgcaggcgcagagctagagccatatccctgccctggtcgccgctgtccgactgcaaccgccaccgctttagcgccccggggcggatccagagtctgaacccgtcttctatccctgtcctagtcctaactttcccctctcctcgccrgtccctaggcaataaagacgtttctctgytrrwrwramwaaaaaaaaaaaaaaaaa

SEQ ID NO: 537 - DNA, 3784 bp, Rattus norvegicus
cacgagcttccatgcccttctctgcgtggccagcctgaagcccttgggagccttcaatgtggatgtggactggtcctgggtcacagcactccagccaggtgcgccttccgtgctcaactcccttctgcatcaagaccccagcaacaaccagacctgcctcctggtagccagacgcagctccaacaggaattcagcagtcctgtatcaatgtgctacatccatcattccagatgaaattggttgccagccagtagagcacatccttatgccaaagggcaggtaccagggagtgacattggtcaggaaccacaatggtgttttggtatgcattcaggtacagtcccggaagccccgcagccttaactcggagctcaccggtgcctgcagcctacttacccccaacttggacctccaggcgcaagcctacttctctgaccttgaaggagtcctggatctgggtgcatctgtgaactctggtgactactacggaagcaaaggaggcagcacaggggaggagacgaaatcagccaggagactccgacgacaggcagtggaggaggaagacgaggaggaagctggcaccgaaatcgctattgttctggatggctcaggaagcattgaaccctcagacttccagaaggccaaagatttcatctctacgatgatgaggaacttctatgaaaagtgttttgagtgcaactttgccctggtgcagtatgggggcgtgatccagactgagtttgatcttctagacagccgggacatcaacgcctcccttgccaaagttcagagcatcgttcaagtgaaggaagtcactaagaccgcctcagccatgcagcatgtcctagataatatcttcattccaagtcgtggctccagaaagaaagcattgaaggttatggtggtgcttactgatggtgacatatttagggaccctctcaaccttacgactgtcatcagttcctcaaagatgcagggtgttgtgcgctttgccattggggtaggcaatgcattcgagaataataacacttacagagaactgaagctgattgcctcagaccctaaagcggcccacactttcaaggtgaccaactactcggctctggatgggctgctgagcaagctacagcagaggatcatccacatggaaggcacagttggagacacccttcaatatcaactcgcacagactggcttcagtgctcagatcctggacaaggggcaggtgttgcttggcactgtgggggcctttaactggtctgggggcgcgctgctctacaacacacagaatggtcggggccgcttcctaaaccagacagccaaggaggacttcagggccgcacagtacagctacctcggttattcagttgcagcgctacacaaggcccatggtgtctcctacgtggcaggggctccaaggcacaagctccgtggggctgtgtttgagctccagaaggaggacggagaggaaaccttcatgcgacggatagaaggagagcagatggggtcctattttggctctgtgctgtgccctgtggatatcaacatggatggaatcacagattttctgctggtggcagctccattttaccacatccgtggagaagaaggcagagtctatgtgtaccgcgtgcacgagcaggatgctcccttctccttggtatacacactgagtgggtaccctgggctcaccagtagccgcttcggctttgccatggcagctgtgggggatatcaatcaagataaattcacagatgtggccattggggcccctctggagggctttggggcaggcgatggggcaagctatggcagcgtgtacatctacaatggacactcaggtggcctgcatgccagtccctcccagcagatcagagcctcctctgtggccttgggactctactactttggcatgtctgtgtctggtggtttagatttcagtggcgatgaccttgccgacatcacagttggctctcaggatgtggcagttgtgctccgctcacgacctgtggtggacctgactgtgtctatgacctttacccctgatgcgctgcccatggccttcaaggacaagatggatgtagaactgtgcttcaaagttgactcttcagctgtaccttctgaaccaggccttagagggatgtcactaaactttaccgtggatgtggatgtgaccaagcagaagcagaggctgcagtgtgcagaccggagttgttgtcaaagctgccttatgaagtggagcggaggatcctctctgtgtgaacacttcgggctcatctccacagaggaggagctttgtgaggatgactgcttctccaacatcaccatcaaggtcagttatgagttccagacatccgaggaaaggaggaaccaccccaaccccatcctggaccactacaaggaaccctctgccatcttccagctgccctatgagaaggactgcaagaacaaagtgttctgcatcgctgagatccagctgaccaccgccatctctcagcaagacctggtggtgggtatcacaaaggaggtgaccatgaacatcagcctgactaactctggggaagattcttacatgacaaacatggctctgaattatcccagaaacttacagtttaagaagatacaaaagccactctctccagatattcagtgtgatgaccccaagccagtcgcttctgtcctggtcatgaactgcaagattggtcaccccatactcaagagatcatctgtaaatgtctcagtgacttggcagctagaggagagtatctttccaaataggacagcagatatcactgtgaccatctccaattccaatgagaagtctttggccagagagacccacagccttcaattcaggcatgccttcattgcagttctttccagaccgtcagtgatgtacatgaacacgagccaaagctcttctgaccacaaagaattcttcttcaacgtgcacggggagaatcactttggagctgtattccagttgcaaatttgtgtccccatcacattacgagatttacagattataagagtgaagcatctgacaaagactcaggcccacactgagtgcacccagagtcaagagcccacgtgtggaagcgatcctgttcagaatgtggaagaatggcattcagtgatctgcgctatcacatctaataaagaaaatgtaaccgtggccgcagagatctccatgggccacactaagcagttactaagagatataagtgaactgcagatccttggtgaaatatctttmaacmmwtctctytrtraskkmctgamtkmwkrgaacmwcwgkaymmagatcacagtcatcttcctgaaggaggagaagccacactccctgcctctaatcattggcagcagtatcggmkrcctcmkgktsctsrtsrkgmttmymsccmttytgttymagtgtggctttttcaaaagaaaatataaacagctgaacttggagagcgtaakgaaggcacagctgaagtctgacagtctgctcgaagattagcccctgcttcctcacctgaaggagggagcttgaggcagtctggaagaagcccggataccccctgtcggggctccttactctctttaggacaatctagcaacatcaaacaaactgtagagtgttgttcgtagccacacattatctccacagtgtctgtgaattgtgaaaaaagggaaacttgggacatgcggtaataaataaatttaccttthywraaaaaaaaaaaaaaaaaggggatcctctagagtctcgcgaagcactagaatgttctcgaggcct

SEQ ID NO: 538 - DNA, 6335 bp, Rattus norvegicus
catttgcagcacatttttggctttccctccccctccatacattccccccctcctttttcaatttttcttcttcccgggaagtgaattgctgatgccaaggggactttaattccattaatgatgcaastggattcgtttcaggattatgttgcacgaattgaattttgaatgaaggaggttttttttttctttttgaaagaagtgttgattctttagttcgttgtacttttaattattattttatttaaatatacaatttaattgtattattctcttaaaaatattaaatctatattttatggraacttaccctcaamatatatatgtttatgggtgaaattgaagacgcttccgttaagtgaggtgactggtgtattggatgtttaattsagcrccggcattgcatgacagttgttgaataacaagtggtttatttttaaaaaccacatctttaaaattttaggttcagatagtaacagtagacatcgtaagggcatttaaaagaaaaccagcagaaatcgaagcaaacatgtctggagaagtgcgtttgaggcagttggaacagtttattttagatgggccagctcagaccaatgggcagtgcttcagtgtggagacgttactggacatactcatctgtctttatgatgaatgcaataattctccattgagaagagagaagaacattcttgaatatctagaatgggctaaaccattcacttctaaagtgaagcaaatgcgcttacatagagaagacttcgaaatattaaaggtgattggtcgaggagcttttggtgaggttgctgtagttaaactgaaaaatgcagataaagtatttgccatgaaaattctgaacaagtgggaaatgctgaaaagagctgagacagcgtgctttcgtgaagagagggatgtgttggtaaatggagacagtaagtggataaccactctgcactatgcttttcaggatgacaataacttatacctggttatggattattatgttggtggggatttacttactctgctcagcaaatttgaagatcgattgccagaagagatggctcggttttacttggctgagatggtgatagccattgactcagttcaccagctccactatgttcacagagacatcaaacctgacaatatattgatggatatgaatggacatattcgtttagcagattttggttcttgtctgaagctgatggaagatggaacggtccagtcctcagtggcagttggaactccagactacatttccccggaaatccttcaggctatggaggacgggaaaggcagatatggaccagagtgtgactggtggtccttgggagtctgcatgtatgagatgctttacggagaaacaccattctatgcggaatctctggtggagacatatggaaaaattatgaatcataaagagaggtttcagtttccaacccaagtgactsaygwgkctgaaaatgctaaagatcttattcgaagactmatttgtagcagagaacatcgacttggccagaatggaatagaagactttaagaaacatccgtttttcagtggaattgattgggataacatccgaaactgtgaagcaccttacattccagaagttagtagtccaacagacacgtcaaatttcgatgtggatgacgactgtttaaaaaactctgaaacaatgcccccaccaacacatactgcattttctggccatcatctaccatttgttgggtttacatatactagtagctgtgttctttctgatcggagctgtttaagagtcacagcaggtcccacctcactggatcttgacgtcaatgtccagaggactctagataataacttagcaactgaagcttatgaaagaagawttaaacggctagaacaggaaaagcttgaacttactagaaaacttcaagagtcaacacagactgttcaagccctgcagtattcaactgttgatggtccactaacggcaagcaaagatttagaaattaaaagtctgaaagaagagattgaaaaamwaaraaaamaagtagcrgmrgkgrmkcatttggmacmwcracwygmwgmwsctrmtkctgksrgmcgagaactagatgatgcttttaggcaaatcaaagcttttgaaaaacaaatcaaaactttgcagcaggaaagagaagagctaaataaggaactagtccaggctagtgagcgattaaaaaaccaatccaaagagctgaaagacgcacactgtcagaggaaactggccatgcaggagttcatggagatcaatgagcgactaacagaattgcacacccaaaagcagaaacttgctcgccatgtccgagataaggaagaagaggtggacctggtgatgcaaaaagctgagagcttaaggcaggagcttcgcagagcagaaagagccaagaaagagctggaggttcacactgaagctctaattgctgaagcctcaaaggaccggaagctccgagagcagagcagacattattctaaacagctggaaaatgaattggagggactgaagcaaaaacaaattagttactcaccaggaatatgcagcatagaacaccagcaagagataactaaactgaaaactgacttggaaaagaaaagtatcttttatgaagaagaaatctctaaaagagaaggaattcatgcaagtgagattaaaaatctgaagaaggagctgcatgactcagaaggccagcaacttgctctcaacaaagaaattatggttttaaaagacaaattggaaaaaaccagaagggaaagtcaaagtgaaagggaagaatttgaaaatgagttcaagcaacaatatgaacgggaaaaagtattattaactgaagagaataaaaagttaacgagtgaactcgataagctaacttcgttgtatgagagcttaagtttgcgcaaccagcacttagaagaagaggtcaaagatctagcagataagaaggaatcagttgcccactgggaagcccaaatcacagagataatccaatgggtgagtgatgagaaggacgcacggggctatcttcaggccttagcttctaaaatgactgaagaattagaagcgttaaggaattccagcctggggacacgagcgacagatatgccctggaaaatgcgtcgttttgcaaaactggacatgtcagctagactagagttgcaatctgccctggatgcagaaatcagagctaagcaggccatccaggaagagctgaataaagtcaaagcatccaacatcataacagaatgtaaactgaaagattcagagaagaagaacttggaactgttgtccgaaatcgagcagctgataaaggacactgaagagcttagatctgaaaagggtgtagagcaccgagactcacagcactctttcttggcatttttgaatacgcctaccgatgctctggatcaatttgaacgctctccgtcctgtactccagctggcaaaggcagacgtattgcagactctgctccgcttccagttcacacaccaactttaaggaaaaagggatgcccagcttcagctggttttccacctaagcgcaagactcatcagtttttcgtgaagtctttcactgcccctaccaagtgccatcagtgtacctccttgatggtcggtttgataagacagggctgttcctgcgaagtctgtgggttctcatgtcatataacttgtgtgaacaaagccccgaccacttgcccagttcctcctgagcaaactaaaggcccactcggtatagacccccagaagggagtagggacagcgtatgagggccatgtccggatccctaagccggcgggagtgaagaaagggtggcagagagcactggctgtggtctgtgacttcaaactgtttctttatgatatcgcggagggaaaagcatcgcagcccagctccgtcattagtcaagtgatcgacatgagagatgaagaattttccgtgagttcagtcttggcttctgatgttattcatgcaagtcgaaaagatattccctgtatatttagagtcacagcctcccagctctcagcacctagtgacaaatgttccatcctgatgctagccgacagcgagactgagaggagtaagtgggtgggagtgctgagtgaactccacaaggttctgaagaaaaacaagttcagagaccgctcagtgtatgtccccaaagaggcttacgacagcactctacccctcattaaaacaacgcaggccgcggcaatcatagatcatgagcgggtagctttggsrrmygmagaaggwttwtttgttgtgcatgtcactaaagatgagattattagagttggtgataataagaaaattcatcagattgaactcattccaagtgaccagcttgttgctgtgatctcaggccgaaatcgccacgtccgacttttccctatgtcagctttggatgggcgagagacggatttttataaactggcagagactaaagggtgtcaaaccatagctgctgggaaggtgcgccatggagctctgtcctgcctgtgtgtggccatgaaaagacaggtcctctgctatgaactgttccaaagcaagaccaggcacaggaagtttaaggagattcaagtcccatgtaatgtccagtggatggccatcttcagtgaacatctctgtgtgggattccagtcaggatttctcagataccccctgaatggggaaggaagtccatgcaatatgctccattcaaatgaccacacactggcattcattacacaccaaccaatggatgctatctgtgccgttgagatctccmwcrwrgagtatttgctgtgttttagcagcattgggatatacacggactgccagggccgaagatctagacagcaggaactgatgtggccagcaaatccttcctcctgttgttacaatgcaccatatctctccatttacagtgaaaatgcagttgatatctttgatgtaaactccatggaatggatacagacgcttcctctcaagaaggttcgacctttaaacactgaaggatcattaaatcttttagggttggagaccattagattaatatatttcaaaaataagatggcagaaggggatgaacttgtagttcctgaaacatcagataatagccgaaaacagatggttagaaacatcaacaacaaacggcgttactccttccgggtcccagaagaagagaggatgcagcagagaagggagatgctacgagatccagaaatgagaaataaattaatttctaacccaactaattttaaccacatagcacacatgggtcctggagatggaatacagatcctaaaagacctgcccatgaacccacggcctcaggaaagccggacagtattcagtggctccgtcagtattccctccatcaccaagtcccgccctgagccaggccgctccatgagtgccagcagtggcctgtctgcacggtcatcagcccagaatggcagtgcgctaaagagggaattctctggaggaagctacaacacgaagcgacagcccatgccctctccctcagaaggctctttgtcatcaggaggcgtggaccaaggaagtgacgcccccgtgagggactatgatggagaggactctgattctccaaggcattccacagcttccaacagctctaacctgagcagccccccaagccccgtttcaccccgaaagaccaagagcctctccttggagagcacagaccgtgggagctgggatccatgagcaggaccagtgactccaggcagggaccctgccctcccactctgacaacgcgcctggcagcagcatcaccttccacactgcctgccaccgaggattccttcacagccaggcccgcttcacccttcccccaacccccaggtagcttctgtagacagactgcgcagacgcagcgctaagagtagaccggttgtgttctcaccgtagccctcacgtagccctcacgtagcgcccagcagcctccatgagcgtcagctgactgttgccaggaaataaaccctcatgaattaaaamaawrmawawwwwwactacaataaagagtttaaataaatacatagatgtagacgttaaatactgaagtataaatagtcaaagaagcatctcttgtgttcgatgaaagatggatgcgatataagaaagatcatttaatttaaaaaaaaaaagtgttgtttcttatctgtttcccagctaagtcataatacagggtagaaaggcctcaagtgacatttataaagacacagaagtcaggtcccggtggtgtctgtcctcaagcctaggcagctgtggtcacagggaagtctaatgtctggagattactcgtgccgaattc

SEQ ID NO: 539 - DNA, 5333 bp, Rattus norvegicus
cacgggcagcgagaggccggcgcgtggggagcgggccggcgcggcaccatgtcggccaaggtgcggctcaagaagctggagcagctgctcctggacgggccgtggcgcaatgagagctccctgagcgtggagacgctgctggacgtgctggtgtgcctttacaccgagtgcagccactcggcgctgcgccgcgacaagtatgtggcggagttcctcgagtgggctaagccattcacccagctcgtgaaggacatgcagcttcatcgggaggactttgagatcatcaaagtgattggaagaggagcttttggtgaggttgctgttgtcaaaatgaagaacactgaacgaatttatgcaatgaaaattctcaacaaatgggagatgctaaagagagcagagacagcttgctttcgagaagagagggatgtgctggtgaacggtgactgccagtggatcactgcgctacactacgcctttcaagatgagaactacctgtacttggttatggattactatgtgggtggtgacttgctgaccctgctgagtaagtttgaagacaaacttccagaagacatggcgaggttctacattggcgagatggtgttggccatcgactcgatccaccagctccactatgtgcacagagacattaaacccgacaacgtccttctggatgtcaacggtcacatccgcctggctgactttggctcgtgcttgaagatgaacgatgacggcactgttcagtcttccgtggctgtgggcacacctgactacatctcaccagagatcctgcaggccatggaggatggcatgggcaaatacgggcccgagtgcgactggtggtccctgggcgtctgcatgtatgagatgctgtatggagaaacgccattttatgcagagtctctggtggagacatatggaaagatcatgaaccacgaggagcggtttcagttcccatcccacgtcactgacgtctctgaagaagcgaaagacctcatccagagactaatatgcagcagagagcgccggctcgggcagaacgggatagaggactttaagaaacatgcattctttgaaggtctaaattgggaaaatatacggaacctggaagcaccctacattcccgatgtgagcagcccttctgacacgtccaacttcgatgtggacgatgacgtgctgagaaacatcgaaatcttacctcccggctctcacacgggcttctcgggactgcacctacccttcattggctttacatttacgacagaaagctgcttttctgaccgaggctctctgaagagcatgatacagtctaacacgctaaccaaagatgaggatgtgcagcgggatttggagaacagcttgcagatcgaagcttacgagcgaaggatacgaaggctggaacaggagaagctagagctgagccggaagctgcaagagtccacccagactgtgcagtcccttcacggttccacacgggccctgggcaactcaaaccgtgacaaggaaatcaagaggctgaatgaagagcttgaacgcatgaagagtaaaatggcagattcaaacaggctcgaacgacagctcgaggataccgtgacccttcgccaggagcatgaagactccacacaacggctgaagggcctggagaagcagtaccgcctggcacggcaggagaaggaagaattgcacaagcaattggttgaagcttcagagcgattgaaatcccagaccaaagaactcaaagatgctcatcagcagcgaaaacgggccctgcaggagttttcagagctcaatgagcgcatggcagagctgaggtcacagaagcagaaggtgtcccggcagctccgtgacaaggaggaggagatggaggtggccatgcagaagattgactccatgaggcaggatatccgcaagtctgagaagtctaggaaagagctggaagctcggcttgaggacgcagtcgctgaggcctccaaggagaggaagcttcgagagcacagtgagagcttctctaagcagatggagcgcgagctcgagaccctcaaggtgaagcaaggaggccgggggccgggtgccacgttagaacatcagcaggagatctccaaaatcaggtcagagcttgagaagaaagtcttgttctatgaggaggagttggtccgccgagagcgctcccatgtgctagaagtaaagaatgtgaagaaggaggtgcacgaatctgaaagccaccagttggccctgcagaaagaggtcctgatgctgaaagataagttagaaaagtcaaaacgagaacggcacagtgagatggaggaggccataggtgccatgaaagacaagtacgaacgggagagggccatgctgttcgacgagaacaagaagttaacagcagaaaacgaaaagctctgttcctttgtggataaactaacagcccaaaacagacagctggaggacgagctgcaggacctggcctccaagaaggagtcggtcgctcactgggaggcgcagattgcagagattattcagtgggtcagcgatgagaaagatgccagaggctaccttcaagcacttgcttctaagatgaccgaagagcttgagactttgagaagctctagtttgggatccaggacactggacccactctggaaggtccgtcggagccagaagctggacatgtctgcgcggctggagttgcagtccgctctcgaggcagagatccgtgccaagcagctggttcacgaggagctgaggaaggtcaaagacaccagcctagccttcgaaagcaaactgaaggagtcagaagccaaaaacagggaattattagaagaaatgcaaagtctgaagaaaaggatggaagaaaaatttagagcagatacagggctcaaacttccagatttccaggatcctatctttgagtacttcaacactgctcctcttgcacatgacctgacttttagaactagctcagctagtgatcaggaaacacaggcttcaaagttggacttgtccccatcagtgtctgtggccacaagcacagaacagcaggaggatgcggctcgttcacagcagaggccgtctactgtgccgctgcccaacacacaggccctcgccatggctggaccaaagcccaaggcacaccagttcagcatcaagtccttccccagccccacccagtgtagccactgtacgtccttgatggttgggctgatccgacagggctatgcctgtgaggtctgcgcgttttcctgccatgtgtcctgcaaagacagcgctccccaggtgtgccccatacctcctgagcagtccaagcggcctctcggcgtagacgtgcagaggggcataggcacagcctacaagggctacgtcaaggtcccgaagcccacaggcgtgaagaaagggtggcagcgggcttacgcagtggtctgtgactgcaagctcttcctgtacgacctgccagaagggaagtccacccagcctggggtcatcgccagtcaagtcttagacctcagagatgacgagtttgctgtgagctcagtcctggcctcagatgtcatccatgctacacgccgagacatcccgtgtatattcagggtgacggcctctctcttaggttcaccttctaagaccagctcactgctcatcctgacagagaacgagaatgaaaagaggaagtgggttgggatcctggaagggctgcaggctatcctccacaagaaccggctgaggagccaggtggtgcacgtggcacaggaagcgtacgacagctcactgccgctcatcaagaccgtcctggctgccgctattgtggatggagacagaattgcggtcggcctggaagaagggctctacgtcattgagctcacccgagatgtgatcgtccgcgctgctgactgcaagaaggtataccagatcgagctggcgcccaaggagaagctcatcctcctcctctgtggccggaaccaccacgtgcacctctacccctggacctccttcgatggagcagaagctagcaactttgacatcaagctcccagaaacgaagggctgccagctcatagcaacagggacgctgaggaagmgsycgtccacctgcctgtttgtcgccgtgaagcggctggtcctttgctacgagatccagagaactaagcctttccaccggaagttcaatgagatcgtggccccgggacatgtgcagtggatggccatgttcaaggacaggctctgtgttggctacccctccgggttctctctgttgagcatccagggggacgggcagcctctagacctggtaaatcccgctgacccctcgctcgcgttcctctcacagcagtctttcgatgccctctgtgctgtagagctcaaaagtgaggagtacctgctctgcttcagccacatgggactgtacgtggaccctcaaggtcggaggtcacgcacgcaggagctcatgtggcctgcggctcctgtcgcctgtagttgcagctcctcccacgtcacggtgtacagcgaatacggggtggatgtcttcgacgtgcgcaccatggagtgggttcagaccatcggcctgcggaggataagacctctgaactctgatggtagcctcaacctgctgggctgtgagcccccatgcctcatctacttcaaaaacaagttctcaggcaccgtcctcaatgtgcccgatacctcggacaacagcaagaagcagatgctgcggacgcggagcaaacggcgcttcgtcttcaaggttccagaggaagagaggctgcagcagcggcgagagatgctcagagacccggaactgagatccaaaatgatatccaatccgaccaacttcaaccacgtggctcacatgggccctggcgatgggatgcaggtgctcatggacctgcctctgagcgtgcgcccacagcccaggaggaaaagcagggtcctgccccaacaggcctccctcggcagcctcccatccaggaacaagccctatgtctcatggccgtcctcaggtgggtctgagcctggagtgcctgtgcctctgaggagcatgtctgaccccgaccaggattttgacaaagagcctgactctgactccacgaagcactcactccgtccaacagctccaaccctagcggccccccgagccccaactcaccgcaccggagccagctccctctgaaggcctggaccagccagcctgcgacgcctgaggccgccagcatagcaccatagggccagggagccagatggccccaacatcagtgccaagactgagctgaccctccagtgttgtccaaggaaatgtagaatcagtttgtagatagataaatgaatctttaattatatgatcagttt

SEQ ID NO: 540 - DNA, 109 bp, Rattus norvegicus
cagggtgaaggtctcccaggctgcctcggacctcctggcctactgtgaagcccacgtgcgggaggatcctctcatcatccctgtgcctgcctcagaaaaccccttccgg

SEQ ID NO: 541 - DNA, 2649 bp, Rattus norvegicus
gggtgggctgcggtgggcggcggtcttgcaccccggagctcgcacgtacccagtttcctccttccggagtggctgcactcaggcacccagcgggccggcgggcgggtagcggcgcggaggtctgggcggggcgggcctcccgggctccggggacgcccacaggccctgcgaggccagagcagagcgccggcggcggggaagagcgcgagcgccggggcacggagggaaggatcatcggatggaccctgtttgacaacatgcaccaccagtggctcctgctggctgcatgcttttgggtgattttcatgttcatggtggccagcaagttcatcacgttgaccttcaaagacccggatgggtatagtgccaaacaggagtttgtgttcctgacggccatgccagaagcagagaagctaagaggagagaagcatttttctgaagtcatgaagccaactgggaagatgctttcggagagccatcctgatcagcccccggtttatctggagcggctggagctcatcagaaacgcttgcaaggaggaggctctgcggaacctctcccacaccgaggtctctaagtttgtcctggatcgaatctttgtctgtgacaagcacaagattcttttctgtcagacccccaaagtgggcaacacccagtggaagaaagtgctgatcgtcttaaatggagcattttcttctattgaagagatcccagaaaacgtggttcatgaccatgagaaaaatggccttccacgtctctcttccttcagcaaaataggaattcagaagcgattgaaaacatacttcaagttttttattgtgagggatccctttgaaagactgatctctgcctttaaggataagtttgttcacaatcctcgatttgaaccttggtacaggcacgagatagccccgggcattattaggaaataccggaagaaccggacagagacccggggtatccagtttgaagattttgtgcgctacctgggtgatccaaaccgcaggtggttagaccttcagtttggggaccatatcatccactgggtgacctacgtaaaactctgtgcaccctgtgagataaagtacagtgtgattggacaccacgagaccctggaggcagatgccccgtacatcctaaaagaagctggcattgaccacctggtgtcgtaccccactatccctcccggcatcaccatgtacaacaggaccaaggtggagcagtacttcctgggcatcagcaaacgagacatccggcgtctctatgcacgttttgaaggggacttcaagctctttgggtatcagaaaccagattttttgctaaattaaggcatcagactcctgaatattgctagttccggggatggctaggtggagatgtgagaacatgggacctctaccctgtcccatggttccgtgcatggatgatgttgggcgctgattacctgcttcactcgggtgacaaatgctctgatgactcccctccccagcctgtgtcacccccacgaaaggttaggaaagactggacgtgtgcagacaggtagacagacccagaggagcctgcttccttcaactgtcacattgtccttggtgctgtgtcagcttgcctgtagtcgggtggtgtcacccatgacctgtggactgcacagacccagcgctttcaagagagatggggatactgaacggctgcaaaggttactggggcccatgcagagtcgaatctaagccagaatgatacctcttccttccattttgacactagccacagatcagtcacttcttgagcttgaggccctgtgacactgggtggtggtaatcacasrasratctggaagctctgatctttcgggacccaggctagctcttttttcmggacctctgaccccacaagtacctgcttaattctgcagaagagatcccttctggaaagtgagggcattatcagaacatctctgacgacctagaacttggcatgggcaaggaggaaccakccggtcctgggaactctgggtgcaccgttgtctctgacacctgcttttgtcttcgacggccccaagggagcgagcagcaggggcstttccacctctctcctgaacgcacctcccctgtcytgagaggkgagagaagacawagcatttccggtggacagagacgagcgcatgccgacgtgccgtgatgacgcacaggcgtgcagtgcctgcattgcggagtccagtgctgtctgcagactgtcaagtccgttcatgtcggcagacgggatcctacggtcctgaatytaatagtgccactgtcctsgactgaaagacscgcaagttggataatcagrtysgtmagcaataaaatcstgggtkaggccgcctccggtgatgtcgccccaggtgacaagtcacctaacgtgscabtgagkccagccccagcaagaaagccacagcagmtgtcacagytgycavccwgcagcaaagggytwttaaagatggagggacagtttytytgagtaagtcccctggcacatgmatctgcctggggttgagaggaattgtsccagtttttcctagaggtgacagccytactctcaaaaagcctttcctgaacttgtaaatgtgaaagtaaaataaaatttaaaatgtgwrmmaaaaaaaaaaaaaaaaaa

SEQ ID NO: 542 - DNA, 2038 bp, Rattus norvegicus
cgaagcagatgtgactcctgccctgggctgtgctccccatcatggctgacaccatcttcagcagtggaaatgatcagtgggtgtgccccaacgatcggcagcttgctctgagagccaagctgcagacaggctggtctgtgcacacataccagacggagaagcagaggaggactcaatgcctgagccctggagaggtggaggtcatccttcaggtcatccagagagcagagcggctggacatcctggagcagcagaggattgggcggctggtggagcggctggagacgatgcagaagaacgtgatgggcaatggtgtctcccagtgtctgctctgcggggagatgttgggattcctgggcagctcctctgtattctgcaaagactgccggaagaaagtctgcaccaagtgtgggatcgaggcttcccccggccagaagcggcccctgtggctgtgtaagatctgcagtgagcagagagaggtctggaagaggtcaggggcctggttctacaaagggctccccaagtacatcttgcccctgaaaacccctggccgggctgatgatccccacttccgacctctgcctgtggagcccacagaaccacagcctcagagtgctgaagtcagccgtgtctacacatgggcccgagggagagtggtttctagtgacagtgacagtgactcagatctcagctcctccagcctggaggacagacctatgccctctgggatcaagggcacaaaatatgacaagcctagaggggactcaggtggcagcatggagtcacccaggatggggcctgcccgaccgcccagccatctttytggcagccagagcagcctgggcagtgagacgggggcaggtgctacagatccacagggaggcaccctaccccggcctgagcccagggtatccggcaaaaggcatacctgggcaactacccattactgaggtggccggctgacctccctgggctgaggcacactctctggaggaagattcagagagagacaacagggccggcctaccggagcccctctctgaaggttcttgagggctcacaagctccctgataccttgacctgcaactcaacaagccagtgtttggggaccgagcgtgcttgcccccaccctgtagtgccttctctactatctcactcagcaccccaccttttatttattgcccctcccccatcccagtcacatctcgatttgctcgggccttgggttgggttggaaaggccttcctctatgcactgaagtttgggtgggacacacagggctttctttgtactaatgatgcgcactctaaccctcagtgtgaccctgcggagctgagcaaccccaccccacacccccacaccccccaccccccaccacattcccagtgtaagcctggagcaccaggctgtccctattcctccaaccggcgggcggcggggcggcggcggaggccagagcaaggtcctatttgccccgaggctggtccaggagctgagttaaatccagctttgaggtttccccgaagcccctattggcctctgggtttttgttctaccctgaaacacagctccccctcagacattaaaatgcttywygkkcttcagtggaaaacaaagctcccaccctgcctcatgctcgctggcccagcmtgggagtttcaaattctaaagccagagcaagcgtgaaaaatatkcaaarwacagatgyttstggaaaacccctccytgggktggggktgaggaartgtcmtatgcccttccttcmctgagwccagttsswycsttccmcaccamcatcmctcccattattattattaatartggccascaccattattarccttttgcctgttgctgctggcagaagacaaacttcactatttccctgagatgtgtarccrtcagcactawcataataaacataagaattttchccarrmmwvwmwmawhmaaagaccacaatccccacattctgacctgtgttgggatagcagtggatggattaaaatatgtagcactgaaaaaaaaaaaaaaaaa

SEQ ID NO: 543 - DNA, 6446 bp, Rattus norvegicus
gaattcggcacgagaagaatttaaaggccacctcttgtgtgtttgtggaatgctggaggaggctgctctgcctctctcttcaggatgtacgcacccatgcaggattctgtgctcaagctctgtgcctgccgcctcctgcttgacgagcttctgaggaagttcgtcttactgtccgtcacctgggaaggatggtaacagtcctctgtaatctggtagaggacatggagccagctgccttgagcggtcttttgcttctgtcgtcgtcgttgtcatcatcataaatcagcactgatggggcggagggggccgctctgcttaaggaaacgcaggcattttgtgaattagtgaaaggcttccagctcagagtaaatggaagtcgggagatcttgggaagaagtggctgtgaatgctgggctcctgcagtgctcttcttgtggggggagcatgggattatggcaaccacagaaccccagtgatgccagttctgttcaatcttttctgaaggaagcctgctgttagagcacaggaactgttgtggattacaatgtttgaaagatacgggttctcagtggtctgaaaacacggcatcatttaaccttttaaatgacaaggcttaagatctcaacactactgctgtattttctggaagccattctctaaagcaaaagtgcacatttaaaatgcaaacatggtgatcctttctccagggatttaagtgatcactttttacgtcatgaccagcttgaagaggtcgcagaccgaaaggcctgtcactgctgacagagcctctgttgtcagcacagatggcacccccaaagttcacactgatgatttctacatgcgtcgcttccggtcccaaaatggcagcttaggatcatcagtcatggctgcagtagggccccckcgaagtgaaggtcctcaccatatamcctcaacccccggagtccccaagatgggggttagggcaaraattgcagattggcctccaagaaaggaaaatgtaaaagaatctagccgttcaagccaggaaatagaaacctcaagttgccttgagagcctgtcctccaaaggcagtcctgtgagtcaggggagttctgttagcctcaattccaatgactcagccatgctgaagagcatccagaacaccctgaagaacaagacggggccagcggagagcatggactcgagattcctcatgcctgaagcctaccccagctcccccaggaaagcccttcgccgaatccgtcagcgtagcaacagtgatatcaccataagtgagcttgatgtggatagttttgatgaatgtatctccccaacctacaagtcggggccatcattgcacagggaatatggtagcacatcttcaatcgacaagcaggggacatccggagaaagcttcttcggtttgttaaagggctataaagacgacagagctgaccgaggtccaactccaaccaaactcagtgacttcctcatcactggtgggggcaagggttctggtttctccttggatgtgatcgatggacccatytcacagagagagaacctcaggctattcaaggaaagggaaaaaccactcaagcgacgttctaagtctgaaactggagactcatccatttttcgtaaattacgcaatgccaaaggtgaagaactcgggaagtcatcagaccttgaagacaacagatcagaggattctgtgaggccctggacatgtccaaagtgctttgcccactatgatgtccagagcatattgtttgacttgaatgaagccattatgaacaggcataatgtgattaagaggagaaacaccacaacgggagcttctgcagccgctgtggcgtccttagtctcgggacctttgtctcactcaaccagcttcagctctcctatgggcagcacagaggacttcaattccaaaggaagcctcggcatggaccagggagatgacaagagcaatgaactcgtcatgagctgtccgtactttcggaatgagattgggggagaaggtgagaggaaaatcagcctgtccaagtccaattctggctcattcagtgggtgtgagagcacgtcctttgagtctgccctcagctctcactgcacaaacgcaggagtggcggttctcgaagtgcccaaggagagcttgatgctgcatctagacagagtgagacggtacactgtggagcacgtggatcttggagcatactattacaggaagtgcttctaccaaaaggaacactggaactattttggggctgatgaaaacctcggtccagtggctgtgagcattcgaagggaaaaaccagaagacatgaaggaaaatggatctccctacaactaccgaataatttttagaactagtgagctcatgacactgagagggtctgtcctggaggatgccattccctccacagccaagcactcgacagccagaggattgccgctgaaagaggtgctggaacatgtgatcccagagctcaacgtgcagtgcctgcgtttggccttcaacacgcccaaagtcaccgagcagcttatgaaactggacgagcaagggctgaactatcagcagaaagtaggcatcatgtactgcaaagcaggccagagcaccgaggaggagatgtacaacacgcccaaagtcacggagcagtttatgaaactggacgagcaagggctgaattatcagcagaaagtaggcatcatgtactgcaaagcaggccagagcaccgaggaggagatgtacaataatgagtccgctggcccggcctttgaggaatttcttcagctactgggagagcgagttcgcctaaaaggatttgaaaagtatcgtgcgcagctcgacaccaaaactgactccactggaacccactctctgtacacaacctacaaagactatgagataatgttccacgtctccaccatgctgccctacacacctaacaacaagcaacagctcctgaggaagcggcacattgggaatgacattgtgacaatagttttccaggagcctggagcacaaccatttagcccgaaaaacatccgatctcactttcagcatgtttttgtcattgtccgggctcacaacccctgcactgagagtgtctgttacagtgtggcagtcaccaggtccagagatgtgccttcttttggacctcccatccctaaaggggtcaccttccccaagtcaaacgtgttcagggacttccttttggccaaagtgattaatgcagaaaacgctgctcataaatcagagaagttcagggccatggcaacaaggacccgccaggaatacctgaaagatctggcagaaaagaatgtcaccaacacacctattgacccttctggcaagtttccatttatttctctggcttctaagaagaaggaaaagtctaagccttacccaggagctgagctcagtagcatgggggccattgtgtgggcagtccgggccaaagactacaacaaggccatggaattcgactgcctccttggaatctccaatgagttcatcgtcctcattgagcaggaaacaaagagcgtggttttcaattgctcctgcagagatgtgatagggtggacttccagcgacagcagccttaagatcttctatgagcgtggagaatgcatttctgtggagagcttcatgagcagtgaagatatcaaagaaattgtcaaaaggctgcagtttgtttcaaaaggttgtgaatcagtggagatgacgctgcgaagaaatgggctaggccagcttggcttccatgtcaactatgagggcatcgtggcggatgtagaaccctatggctatgcatggcaagcaggtttgaagcagggcagccgcctggtggagatctgcaaggtggcagtggccaccctgagccatgaacagatgatcgatctcttgagaacgtcagtcacagtgaaagttgtcattatccctccccatgatgactgcacccctcggaggagttgctcagaaacctaccgcatgccagtgatggagtacaagatgaatgaaggcgtttcctatgagtacaagtttcccttccggagtaacaacaaatggcagcgtaatgccggcaagggtgcccattcgccccaggttccattgcagctgcagagccccatgatttcacgggtgaatgctgggaagggagatggaaagatgccccttccagaaagagccgccaacatccctcgaagcatctccagtgatgggcgcccactggaaaggaggctgtctcctggttcggacatctatgtgacagtctcatccatggctttggcgagatcccagtgccgtaactcccccagcaacttgtcatcgtccagcgagactggctctgggggtggcacttacagacaaaaatccatgcctgaagggtttggagtgagccgaagatccccagcttccatcgacaggcaaaacacccagtcggatattggtggcagtggaaaatccacacccagctggcagagaagtgaggacagccttgccgaccagatggagcctacatgccatctcccagcagtatctaaggtactgcctgctttccgagagagccccagtgggaggttgatgcggcaggatcccgtggttcacttgtctccaaacaagcaaggccattctgacagccactactccagccactccagcagcaacactctgtccagcaacgcctcgagtgcccacagtgacgagaagtggtacgatggagaccgcaccgagtccgacctcaacagctataactacctacagggcacatctgctgacagcggcatcgacaccgcctcatacggcctcagccatggcagcacggcctccctgggagcctccacatcctcacctcgttcagggccaggcaaagagaaggtggcacccctgtggcacagctccagtgaggtgctctccctggcagatcggaccttagagactgagggccatggcatggacaggaaaacagagtcctccctgagcctggacatccacagcaagagccaaggcggttcaagcccgctgacaagggagaacagcaccttcagcatamaygakgccacatctcacaccagtaccatgagckcccgacactctgccagcccagtggtgttctccagtgcsagaagttcacccaawgargagcttcaccccaccacgtcctcccagctcgcaccttccktctcttcskcttcctcakcttscwctggacstaggactttctatccccgccagggcgccaytagcaaatacctgattggatggraaaagccagaaggaaccattaactccgtgggatttatggatacaagaaagcgacatcagagtgatggtaatgagatagcccacactaggcttcgagcctcaaccagggaccttcgggcatccccaaagccaacttccaagtccaccattgaggaggatctaaagaaactcatcgaccttgagagcccaactcctgaatcacagaaaaacttcaagttccatggactgtcctccccacagtccccgttccccagcacccctacctcccggcgggccctgcacaggactctgtctgatgagagcatttacagcagccagagggagcatttcttcacctccagggcctcacttctagaccaagccctgcccaatgatgtctttttcagcagcacttacccatctctccccaagtcgcttccactgaggaggccatcttacacattgggaatgaagtcgctgcatggagagttctttgcttccgacagctcccttaccgacatccaggagacccggaggcagcctattcctgaccctggcctgatgcccctgcctgacactgcttcggacttggactggtccaacctagtagatgccgccaaagcmtatgaggtccagagagcctcattttttgctgctagtgatgaaaaccatcgccccttgagtgcggcctccaacagcgaccagctagaggagcaggccytggtccagatgaagtcgtacagcagcagtaaggactcctctcccactctggcttctaaagtggaccagttggaaggtatgstgaaaatgcttsgagaagatttgaagaaggaaaaggaagacaaggsccacctgcaggcagaggttgagcacttgcgggaggacaachtgaggctgcaggaggagtcccagaatgcctcggacaagytgaagaagttcacagagtgggtsttcaacaccatagacatgagctagggccagbtgaggggaaaggaggagggcaggstgytctgtatgggcaccctaaagcacccattcatgccttggaaagtattctcagagtcccagcttcccagtmtgytcatattggacagtgcacaatacaacaactgcagatcaacaatcattatctgccttttmtagaaaaraaaaaamaaaammykwrymraawtyttaaaagtaaamtrawarwwwaamwrmwwaaaaaaaaaaaaaaaaa

SEQ ID NO: 544 - DNA, 10662 bp, Rattus norvegicus
  misc_feature (3574)..(3574): n is a, c, g, or t
  misc_feature (3579)..(3579): n is a, c, g, or t
  misc_feature (3624)..(3624): n is a, c, g, or t
  misc_feature (3669)..(3669): n is a, c, g, or t
  misc_feature (3915)..(3915): n is a, c, g, or t
  misc_feature (3919)..(3920): n is a, c, g, or t
  misc_feature (3943)..(3943): n is a, c, g, or t
  misc_feature (3948)..(3948): n is a, c, g, or t
  misc_feature (3980)..(3980): n is a, c, g, or t
aattccaggggacacgatgaggtccagtctaaaggtcactgggaacctctctcaagctccccccccccctactgtgccactgttcaggattggggaagatgtgcctggagcctaaggggctctccctgtccctatagtaggactcactaaaggaacctcagcaaagcagcccattgtaagctcaatcgaataccgtgtccctggtatggagtagaggatgtggctatgacaggaactcaggggtcttaaatggcttgagtgctgggagaggcaagcagccaggcctggtctgtaagctggaagtctggcagtgctgagctggccaaccccctcaggaccctcctccttgtgcccactgaatgactcaccttggcatagacataatggtcaggggcgggcacacagcctgattcccgctgcactccaggcccccttcaatgctttccgagaagtccattgagctgggagcttgtactgcaccaagggctgacatcctggcagccagggatgaaagcagcccatggggctacccttgccgtatgcctcactggcggcagagaacaaggctctattcagcaaatgccctggagtagacaccagaagtccaagcatgggcagaggaaggcaggcgttgggggctggaggggagcagagctgtctgttttccagaagcccaagggtacagatggcgcctgggggggaactgagtggaggggatagatgggcctgagatctcaaacatcaacagcctcctccccaccaacgatgaaggtggaggttggtttcccagacctacatatcccccagagacctggtgtatgaaaattcaaaggaggtaagtctcctgagagaacggggggctcacaaatgaagccagctgtcttaccctatcaggacctacgtgcattccttctgtcctgccccctaaacacacagccagaggctcaaattgattctggagtcacaaagggggcttgaaaccccagccccccactcctgaactccaggaatgagaagatagtattggaggggttcagaggagagggctctgcacatctgttgagaatgggggtcccaggagagtgtaatttaggctgatcccggaggaagggaataggctcttcaagatcctagcatctcacaggcccacagagaagttcagagttggggcagccctggcttacaggctctaagaactggaggcagtttacccaacccagctgtgtgcatgctgtccctctctctgtctctgtctctctctctctgtctctgtctctctgtgtgtgtgtgtgtgtgctcacacacgtgtgtgtttatcacacaaatgttcatgtgtgtgtacatacatgtgttgaggccagaggtcaacctcagacactgttgacttggttgtctgagataacatttccccctgggacctgggatttgccaattagtgtgacccaggaagcctacttattttcattcctcagcactgcagttacaagtatgcactgtcaaaccaggcctttttttttttttttttttccaaaccaggccttttgtattcgctctgtggctagaacttgggtctccatgcttgacaggcaagcgatttatggactaagctgtttcctcggccctctcttgacccatttaccagaaatggggtttccttgatcaatggtgaagccaggctggtgttcccaggaaacccttgactctgggtacagtgaccttggtggggtgagaagagttctctccatatgcgatctggggcccagctccaccccctcaggctattcaatggggtgctgccaggaagtcaggggcagatccagtccagcccgtccctcaataaaggccctgacatcccaggagccagcagaagcagggcaagatggagcggagacgtatcacctctgcacgccgctcctatgcctcctccgagacgatggtcaggggccatggtcctaccagacacctgggtaccattccgcgcctctccctgtctcgaatgacgcctccactccctgccagggtagacttctccctggccggggcgctcaatgccggcttcaaagagactcgggccagcgagcgcgcggagatgatggagctcaatgaccgctttgctagctacatcgagaaggtccgcttcctggaacagcaaaacaaggcgctggcagctgagctgaaccagcttcgagccaaggagcccaccaaactggctgacgtttaccaggcagaacttcgggagctgcggctgcgtctggaccagcttactaccaacagtgcccggctggaggtggagagggacaatctcacacaggacctcggcaccctgaggcagaagtgagaaggggaataggaaaatggctagtgagcagagagactgaattgagagaggagcctggaagaagggtactgcctccccctaagragagcctcttagctgctgtgtttcaaaagggagagctgtctttgttccctaatatgawkcagaatagccaggaagagactgaaaacttcagggatcagattcccagagagagctgagcattctgggtacttaccaccaagctgagggaggactgtgtgtgggtagccagggtacaagcaggcaggtgcttcagtcactgggcactatgaatggccagagaggtttgcgtccacaaggagggctcttggtctctgaaatataagaaatgcaagaaagagcaggcaggcctggatgccgggcccagatggctgtctacgacctgcttttgaccctgctcaagtcattttgattggttgtagctgtaaaggagaggtcatgatacaatctgtcctaaaagatggtaaccgaggtcaaactctggggcgtggtgctttgctgggtggtggatattcacgtgtccctctggtgcaggaggggcactggtgtcagtgacagtgggcgcacggtggtggatgcgcctctgggaacaagagcaggtggcaccaaccccgataaggcacctcagtaatgagttaaggaggaaggctcttatctgttcacgcgtcaccaggcctctgtgtaggaacctgccattgcttactcttcctgccactctaccgatcctgtgggatccgtttgtaacartcccctccctctggaggttcggatagggacccaagagtcctcaggaaaacctaaagcctgtactgtgttccctgtcccaggctccaagatgaaaccaacctgaggctggaggcggagaacaacctggctgtgtacagacaggtcagagagatgagaggaagggtggggagggaaggcggaggcccgccaccaaacaccgcagttgtctgcttccaagatccccacaaggagggggaagacaaagttggaaattttagtagctaggaccctggggtcaaagagattctctccctgctccaggaggcggatgaagccaccttggctcgtgtggatctggagaggaaggttgagtcgctggaggaggagatccagttcttgaggaagatccatgaggaggtgaggccagggagggggagggaggggccttacgagaaactgcaggtaatagacagagacgctcacagaggnaaacngagaaaccaaatttcaggaagaaaacaaaaacaagagaaagagtnaagacagagacttagggagatgtgtccagtatttactacccgtgnaaacacacgcaggccttccgccgccatgttctaagaagcacagaaccgagtctgagtttctccttcacatcagctctcagccttatcactacctcttccacaactgtagggaccttgaggcctagagagtgaaacacacccaaagtcacacagctagaacccctctagacctgtcacagtggtatgcatctcagcctgtgagtggtagacgcggaacgtttgaactgttcaaggccaatttcwgcnacannaghaaactgaaaccagccacgcnccgcncgcgcacatctattctcttacctcagaacctngctgcaagacatattyattcatgcctggttcctgactatgcagtcctgagaggaaggcacctcaaattctacttccatgcccattagacgctttacttttactttttgacaggatatcactgtgtagctggcctggaacatgcacttcctccagtaacatctgcctcatttccgtgagccattgctataaatggcagacagaggcgtgagtctgggagagtgcagcctaggccgtagcttgagccttaataccccttcttttaccttattaggaagttcgagaactccaggagcagctggcccagcagcaggtccacgtggagatggatgtggccaagccagacctcacagcggctctgagagagattcgcactcagtacgaggcagtggccaccagtaacatgcaagaaacagaagagtggtatcggtccaaggtacctgtggggcagcttgcctcttccaggaagtcttcctgctccctcctgaagaataaaggaaggaaggaagctagggaagggtaacctatctaggtgtccagtcttgcccagagagaggagacttgcccagaaccacgcaagcattattaacttcccaaactactcttggttactgctattataagtaatatcagtaatagttaataatagctaaaggctcaccagtttgctcagtgtcacacagctcctaagtgacaaagggatagcgtttcctatcctaacccatatcatcagagagcctgctttttgatgcctctgccagcctatgccctgcattaccgaacatctactgtgtgtcacgttctttttttctttttttggagctggggaccgaacccagggccttgcacttgctaagcaagcgctctaccactgagctaagtcccaaccccgtgtgccacgttctttagtccagatgaggccagcgtttatacagactgtaggaggcagggacgatgggggatggactaggggtgggacttgtgctagacaggcagcctagagactcaggagaagagggaagggcatctcaggtggagaacaggggctgtgaggaggcctgagacagaaaagcacagagaccagaaatgtcgctgcccagggcgccaagcccagtgtgagttaatgagcctcacatgcagggacagtctgggaggatgaaggcctaagaagttcttgggctacagttgttcctcctaagggagccctgaggttcctggtttttcagtgatcatgtatatctcccagctcaggcagctctctgggctgtgccttgcgcactttccctcaatttttggtcctctctgggtttagtttgcagacctcacagacgttgcttcccgcaacgcagagctgctccgccaggccaagcacgaggctaatgactatcgccgccaactgcaggccttgacctgcgaccttgagtccttgcgcggcacggtgagcacggatcactggttggatggggcagcaagaggttgctggagggggacagggatggagggaccggggtggcataggcgaacacggaagagatcaggggttgcagcctcgaagtttctcaaaatctcccggccaagcgatcagttccatcccgcagaacgagtccttggagaggcaaatgcgcgaacaggaggagcgccacgcgcgggagtcggcgagttaccaggaggcactcgctcggctggaggaggagggccaaagcctcaaggaggagatggcccgccacctgcaggagtaccaggatctactcaacgttaagctagccctggacatcgagatcgccacctacaggaaattgctggagggcgaagaaaaccggtgagctctacctcagcccgagaattcctcttgttcctttacagtactccggagttagccttgtatccttcccacccagagtgttcagcctacgaacaatagatattcaagaaatgtctgaagaatagatgggtccaactactggtaattctcgggactgaggacttgagttattccccagattaagtggcttaccacaagcatggccaacaaaaatggaatttcccatggtctgaagggcttgttctgcctctatgaagttattgtgacttaaaaaaaaaattccatctccaaagcctccttcctggaagtattctgtgggggcagataacacagtcctgcagacacttccggctcctggagagtgttggctgctgggttgaaagttggtggtggaggctggagagatagttagggctttgggttccaacatccatcttatggcttgcaatggcttgtagtaacactccagttccaggggaacccacatctgccattgtatgtgtgtgtgtgtgtgtgtgtgtgtgtgtgtgtgtgtgtgtgtgtgtatgtatgcatgcatgtatgtatgtatgtatgtatgtatgtatcagtcattatgttgctgctttagtcccagcacttgagaggaagaggccagcagatctctgtgagtttgaggctaacctggtatatatattgaatcagcgccatatagagaggctttgtaagaaaaagttggcgaagagaaagagaggagaggagacagagaggagcagaaaggagagagagcaggagagagacagacagacagacagacacacacacgcatgcacacaggacagagagaaaatgtgtgtgtgtgtgtgaaagagagagagagtgtgtgtgtgtgtgtgtatgtgagtgtgtgtgtgtatgtgtgtgtgtgtgtgtgtgtgtgtgtgtgtgtgtgtgtgtcctggtaaagggctttgagattttcatgctggccctggaccagccctggcctggggatgtcctagggcagcctcctcatccctatccctccttttccagcatcaccattcctgtacagactttctccaacctccagatccgaggtcagtatagtggggccttgtgggaaagggtaatgaatcccctccctcctcccccaggcctgtgaactgctctcatggactgggaggcaaagagacccacgctctccttgagagcttcgtgaccctccacggagaccctagatggagtgcagaatcttagggcttatagctggtccctgcctccctctgccctgtgtccccatcccctggaaaacccaacaggtctcaactgatgccaggtctgcaagccatgaacaagctccgccttctaagtgttttgtgttcttgttttttttttttttttttctcctctctctcttaactgcttgtcactacagggggcaaaagcaccaaagaaggggaaggccacaaagtcacaagacatctcaaaaggctcacaatacaagttataccaatacaggctctcgccagattgtaaacggagtcctgccagcactccgttagacacgtgcacttcagttgtgtacttttcccggcttgccttcttcctcccaggcctcttctaagggactgtaccgtgtcctttgtccagaaccttcagtacccacgctaggtcctggctctgtgtaattaggttatactgatagagctagcctacgttaaaggttaggtcatgctaacagagctagcctatgctaacagagctagcctatgctcaaggtgaggtcatgctaacagagctagcctgtgttaaaggcagcatgtctctgggagctcaaaggagatgctctgacccctctgagcaaatgcctctgcctcaccacttttgtgtcgctaggtggtccccttggattgcagtgcctgtgggcaggctctgtgtttgattcatgtgtccccagagttctattgcttcattcagtgctgactcagcccagaggttccccctggatggctgctcttgtagtgaataaactctaggttccctgctcttcgttttacatattagtgagtggcgacacgtatattttcctctctaagggggttggatcaaattacgttttactggtatgtggcccttaaatgattcttagatatgggggaagattccatttaggaacattggccgtgcatattgcagggtgtaattgagctttagaaagttaaccatgctggccaggcaaaggtgccaaataccaggcagtcaaaggtcactagagccagataagtgacagggaaataagaatggggaaaggtccgtgcgtattaaccactaatctgcaccacgtggtatacgtcagtgagttgacactcgcatgtccaggagtagtcactatgagcccattttgtaagagaggaaactgaggctccttccttggtgcagcccttggctgtctctcagccaggtgccagaacagaaggcagagcgggctacaggacagcagcagggtgtgcccagcgctgggggacagatgggagtctccagtcacttcggaaaagtcatgcttttcgctgcctagctagttagccccgtccgtattcacgatcctgggtgcatgatggggaacttgggtgcagggcaggatgtctagtgtcccaagagcccacggagacctcctctcctcgtacctgcagaaaccagcctggacaccaaatctgtgtcagaaggccacctcaagaggaacatcgtggtaaagacggtggagatgcgggatggcgaggtgaggaaacgttccagtggccccggggagttcttgaggctgtactggagaaagcctggtactagctcactgaaggtccttattaactaccaggagagctctggtagaagggatgggccttgaatgtaattctccttttccagctctttcatgggtggcgtgctaagggcaacctgtatatggaggccaccatctttctggaacacttggtggagggaggctttcaaattttactcagaagaactttccataggggaattggaagaggggctagacatagaatggccgtcttcatttgttgggatgttagcagcaatggttgcccttacgtcatagtcctctacaagtggcatttcatatctcaatgtgtgatgcaatcaagccgatagtcctggaagacacatccagggcagtcaggggctcgcctcggggatgctcagcctagcaaactggatctgggattctggagcccctaactctgtgctgtgactcttccctctgcctgcaggtcattaaggagtcgaagcaggagcacaaggatgtgatgtgaggtgtgcccagctggcggcccttgccatacagtgtgagggcctaaagctccctcctcagatagtcttgtttgctaggcccaattcccatccacaccagtgctccccttccttctgtttttatgcccacggctcggtcagtgcggagtctcatggacggcacagaccaccctgcatctccaactaacaggatactcaccccaaaggggcaatcaggaggggaggacccccctccccccagctgggttagaactggaagaaagaggaaagacaggggcagggagacttaacaaatcccttccttcatccttgttgttatggaaaccgttgccagagctggaggtctctgggaactggactttgagttttcataggctgctggagcaagacaaacattcagacagaaaggaaaagttcccgaggcaaagaatctctagccagaggcctaggcatctggaagaaccctgacgatgtaggagtgggtagggcagacttgctacctggaatggccactaaggcagtcctgaagggcccccctccggagggatgaccctcgtgtatcggccccactgagcagccctgcaggttgatgccccacgagcctgtgaaaacttggttcttggcatgtggcaggctctatagcataagtggagagggaaggtgtactggagggtatagaggagggctctctggcccctaagtatggatgcggagaggggggagcccaggaaggctaccccgctcaggctgcaggggtgccatggcggaggaaccggtggagataacttggacaatggagttggaagttgtaggcaactagttacacttggctctgaatccttggaatcaaggaaatgacctgttctctcaaagacactgaaacaggagagagggacttccatccactgggcagggtacaggcgcgtctcagttgtgaaggtctattcctggttgctcagtccccaactgcgcatcaccctgggcttctcaacctggaagagtccacaaccatccttctgaggccctccatccccacaaccactagctgttgttctccaagccaagggccccattccctttmktatgcatgtacggagtatcgmctagactttaagcgtccatcctrtttgaaagtttgggaaactgacacacgttgtgttcaascagcytggtgtggagtgccttygtrttagtstaccctmtcggaagctgkttggtgggcagstgaggaagaaatggagctgaaagtgtcccctcagttgtcctttcctccccctctaaggtccctcmctttycccaggacatcgtacactcccccccttgtcacctctsctaaccttcagagcagtactgtcacctttactcactgggcagaaataaagacagtgtcagaggcttccamarardawmwrawwwrttcagaaggtggggtgaggacagacaagacccaaccttgctcgttatcaccaccgaatgtctagcgagcctaaacttccacaacaaaccctccacagcagcagctggcgttaaatccgcctccaacgacgaggtgccct

SEQ ID NO: 545 - DNA, 332 bp, Rattus norvegicus
ctcacagcgtgtattttccccacagagtctgaagcaagagcattggctaaagagaggcagaaaaaggacaatcacaacttgattgaacggagaagaagatttaacataaatgaccgcattaaggaactaggtactttgattcccaagtcaaacgatccggacatgcgttggaacaaggggaccatcctcaaggcctccgtggactacatccgaaagttgcaacgggaacagcagcgagctaaggaccttgaaaaccggcagaagaagctggagcatgctaaccgccatctgctgctcagagtgcaggagctcgagatgcaggctagagcaca

SEQ ID NO: 546 - DNA, 399 bp, Rattus norvegicus
acgagcaccaccgtccgtggtctcaatgccagcacacgctacctcttccgtgtgcgggccagtgtgcagggtctcggcgactggagcaacacagtggaagagaccacgctggggctgcagagtgcgagcccagtccaagagagccgggtggctgaagacggtctggatcagcagctggtcctggctgtggtaggctccgtctctgccacctgcctcaccatcctggctgcccttttagccctggtgtgtatccgaagaagctgcctacatcggagacataccttcacctaccagtcaggatcgggtgaagagaccatcctgcagttcagctcagggaccttgacattgacccgacggccaaagccacagcctgagcctttgagttaccctgtgctggag

SEQ ID NO: 547 - DNA, 375 bp, Rattus norvegicus
attgacgtgaagatcaagaatgccaccatcactcaataccagctcaagggcctagagccagagactacataccatgtggatatttttgctgagaacaacataggatcaagcaacccagccttttcccaagaaattaggacacttccagcccctaaagaccttggagggggaaagatgctacttatagccattcttgggtcggctggaatgacttgcatcaccgtgctattggcgtttctgattatgttgcaactgaagagagcaaatgtccaaagaagaatggcctaggccttccagaacgtgagagaagaaccagctgttcagttcaactcaggaactctggccctaaacaggaaggccaaaaacaatccggat

SEQ ID NO: 548 - DNA, 2077 bp, Rattus norvegicus
ggcacgagccccaggccgcctccggggcagcagcagcggcggcggccggggccggggcgcgggccggagacgccggagggccggcgaggacccgggagggacgatgaagcggcagaatgtgcgcacgttggctctcatcgtgtgcaccttcacctacctgctggtgggcgccgcggtgttcgacgcgctggagtcggagccggagatgatcgagcggcagcggctggagctgcggcagctggagctgcgggcgcgctacaacctcagcgagggcggctacgaggagctggagcgcgtcgtgctgcgcctcaagccgcacaaggccggcgtgcagtggcgcttcgccggctccttctacttcgccatcaccgtcatcaccacaatcggctatggtcatgcggcwcscagsacggacggaggcaaggtgttctgcatgttctacgcgctgctgggcatcccgctcacactagtcatgttccagagccwsgrkgaacgcatcaacaccttcgtgaggtacctgctgcaccgtgcgaagagggggctgggcatgcggcacgccgaggtgtccatggccaacatggtgctcatcggtttcgtgtcgtgcatcagcacgctgtgtatcggcgcmgctgccttctcctactatgagcgctgractttcttccaggcctattactactgyttcatcaccctcaccaccatcggcttcggcgactacgtggcgctgcagaaggaccaggcgctgcaaacgcagcctcagtacgtggcmttcagcttcgtatacatcctcaccggcctcacggtmatcggcgccttcctcaacctcgtggtgctgcgattcatgaccatgaacgccgaggacgagaagcgtgatgcagagcaccgtgcgmtgctcacgcacartggccaggctggcggcctgggtggcctgagctgcmtaagcggtagcctgggcgatggcgtgcgtccccgcgacccagtcacttgcgcagcggctgcaggcggcatgggcgtgggcgtgggcgtcggtggcagcggcttccgcaacgtctatgctgaaatgctgcactttcagtccatgtgctcgtgcctctggtacaagagccgcgagaagctgcagtactccatccccatgatcatcccgcgggacctctccacatccgacacgtgcgtggagcacagccactcgtcgccaggaggcggcggyygctacagcgacacgccctcacacccttgcctgtgcagcgggacgcaacgctcggccatcagctccgtgtccacgggcctgcacagcctggctaccttccgcggcctcatgaagcgcaggagctcagtgtgaaccacagccaagcctggagcacctgtgagccagcgggggtgggggacctgcctgcagaagccgcaggagttggccaggaggccccccaaagacgccttcgggccccatgggaagtccccagcccatcaccaccgccacctctactcctccccagcccctaaatctccaactgtgcgggctttcaccagccagcaggaggccgggctctgaggacccctggagcccccatcagagcccgaagaattctgagaaatgtgaaacttagggggtggggagacggggaagcagccacggggagctgctgagaagccccccagtcctcagaggccctgctgggccccagaccccttgcctcccaagggaactaatgttctaggtttttgttttctgttttggtttggttctcgtgtctctctctctctctctctctctctctctctctctctctctctctctctctctctctctctctctctctctctctctcatatctctacttatacctcccctgggctctccaaagcccaaggtgtctttgtccaggtcaccccccactcagtccctcccggctctctcatccccagccatgtctcccagccttccactaccttaatgtgtccactccccttctgttttttgcatggctatgcagttatggaagaaaaaaaaaggaaaccccagcagtccctaaagctagtccccagagggcaagatagaagaaaaaaaaaaaaaaaaaaa

SEQ ID NO: 549 - DNA, 892 bp, Rattus norvegicus
ttccccacaggtccctttgaaggtcccaattatcacattgctccaaggtgggtgtaccacctcaccagcacctggatgattcttgtggtcattgcatctgtcttcacaaatggactcgtgctggcagccaccatgaggttcaagaagctgcgtcatcctctgaactggattctagtgaacttggcagttgctgacctagcagagaccattattgccagcactatcagtgttgtgaaccaaatctatggctactttgtgctgggccaccctctgtgtgtcatagaaggctacattgtytcwctatrtggrakcamaggcctctggtccttggccatcatttcctgggagagatggctggtggtctgcaagccctttggcaatgtgagatttgatgctaaactggccactgtgggaatcgtcttctcctgggtctgggctgctgtatggacggccccaccaatctttgkttkswkyaggtamkggysttatggcctgaagacatcgtgtggtccagacgtgttcagcggtacctcgtatcctggggttcagtcttatatgatggtcctcatggtcacgtgctgcatcttcccactcagcatcatcgtgctctgctacctccaagtgtggctggycwtcykagcagtrgcmmwkcaacagaaagaatctgagtccacccagaaggctgagaaggaggtgacacgcatggtggtggtgatggtcttcgcatactgcctctgctgggggccctatactttctttgcatgctttgctactgcccatcctggctatgccttccaccctcttgtggcctccctaccatcctactttgccaaaagtgccactatctacaatcccattatctatgtctttatgaaccggcaggtaagcaaga

SEQ ID NO: 550 - DNA, 349 bp, Rattus norvegicus
ggaggtggtggtacctctgagcatggaactcatgggtaatgtggtcaaacaactcgtgcccagctgtgtgactgtgcagcgctgtggtggctgctgtcctgacgatggcctggagtgtgtgcccattgggcaacaccaagtccgaatgcagatcctcatgatccagtacccgagcagtcagctgggggagatgtccctggaagaacacagccaatgtgaatgcagaccaaaaagaagggagagtgctgtgaagccagacagggttgccataccccaccaccgtccccagccccgctctgttctgagctgggactctgccccgggagcatcctccccagctgacatcatc

SEQ ID NO: 551 - DNA, 1987 bp, Rattus norvegicus
gcgctccgtgagcagcgggggtggggatcggttcgggggaggcctgggccgtctgctggtgcgctgactccgccgccccccctttcgccgccgccgccgccgccgccccgggcatgtcgtccaactgcaccagcaccacggcggtggcggtggcgccgctcagcgccagcaaaaccaagaccaagaagaagcatttcgtgtgccagaaagtgaagctattccgggccagcgagccgattctcagcgtcctgatgtggggggtgaaccacacgatcaatgagctgagcaatgtccccgtccctgtcatgctaatgccagatgacttcaaagcttacagcaagatcaaggtggacaatcatctcttcaataaggaaaacctccccagccgcttcaagttcaaggaatactgccccatggtgttccgaaacctcagggagaggtttggcatcgatgaccaggattaccagaattcagtgacacgcagtgcgcccatcaacagtgacagccagggcaggtgcggcacacgcttcctcaccacctatgaccggcgttttgtcatcaagactgtgtcaagtgaggatgtggcagagatgcacaacatcctaaagaaataccaccagttcatagtggagtgtcacggcaataccctcttgccacagttcctgggcatgtaccgcctgaccgtggacggtgtggaaacctacatggtggtcaccaggaatgtattcagtcatcggcttactgtacatcgcaaatatgacctcaagggttccaccgttgccagagaagccagtgacaaggaaaaggccaaggacttgcccacgttcaaagacaatgacttcctcaatgaagggcagaagctacgtgtgggagaagagagtaaaaagaacttcctagaaaaactgaagcgggatgtggagttcctggcccagctgaagatcatggactacagcctcctggtgggcatccacgacgtagaccgggcagagcaggaggagacggaggtggaagaccgagcggaggaggaggagtgtgagaacgatggggtgggcggtggcctgctctgctcctacggcacgcctccagacagccccggcaacctcctgagcttcccccggttctttggcccaggagagttcgacccctccgtcgacgtctatgccatgaaaagccatgagagtgcccctaagaaggaggtctatttcatggccatcattgacatccttacaccgtatgacgctaagaagaaagctgcacatgccgccaagacagtgaaacatggggcaggggctgagatctccactgtgaacccggagcagtactcaaaacgcttcaatgagttcatgtccaacatcctgacgtagtcgtctctaccttctgccagagccagactgctggacaaggggtcggggatcgggagagggaaagggtgtatttgggctggaagggagggcggggagcagagtcggggctcatgagggctttagtaaagggactgcagcctgtgacacaaagcaactctagaaaggaagaaggagctggttgttggacacgtgtcacagcgtggcagccttacttccccagcaccctggatgcgccccttttgtccctgggttaaaacaaggtttcctcttcggtatctttgtaaccctttatgatcctaggggctggagttgactttgtgggttgatttgggtttgtttcttaaattcattgctccaggatcgctctttataacgctgtatgtcatcaccccaggcaccctccctattctggtcaggctctcagtgcccttcaactaaggccagcacaagggacgtgaacagcacttgctctgacaccatgagaggtcagacacctcagtcagcgacgttttaatctcccctcgatggactttttattttctggagtattgtgcataattccctccatgtctccaccttggatccaagtgaaacattacattggctccttcatccctcgtgcc

SEQ ID NO: 552 - DNA, 1739 bp, Rattus norvegicus
cacccagcctcgagcacccgggamytsmgscacagcgcacttgctctcgctcgaccgcgctcccgccccgcagtcctcaccaaccctacggatcctagccaccgccagcctaggagggcatcaggatgaaggcagcccgtttcgtgatgcgcagcgccagctcgctgggcaacgccggcctggtccccagggaggtcgagctgttctcccgctacagcccgtccccgctgtccatgaagcagctgctggacttcggttcagaaaatgcctgtgagagaacttctttttcttttcttcggcaagaattgcccgtcagacttgccaacatcctgaaggagattgacatcctccctgaacrcttagtgaacaccccttccgtccagctggtgaagagctggtacatccagagcctgatggatttagtggagttccacgaaaagagcccagaagaccagaaagytctatcagactttgtagacacgctggtcaaagttcgaaacagacatcataatgtggtccctacgatggcacaagggatcctggagtacaaagacaactgcaccgttgaccccgttaccaatcaaaatcttcagtattttttggaccggttttatatgaaccgcatttctactcggatgctcatgaaccagcacatcctcatattcagtgactcaaagacaggaaacccaagccacattgggagtatcgaccccaactgcgatgtggtagcagtagtcgaagatgcctttgagtgtgcaaagatgctctgcgatcagtattatctaacgtcgccagaattaaagctcacacaagtcaatggaaaatttccaggccaaccaatccacatcgtgtacgttccttcacaccttcaccacatgctctttgaactattcaagaatgccatgagggccacggtcgagcatcaagaaaaccgccctttcctgacaccagtcgaggccaccgtcgtcttgggaaaagaagatcttacaatcaagatttctgaccgaggtggcggtgttcctctgaggattactgaccgcctctttagttacacatactccactgctccaacgcctgtgatggacaattcacggaatgcccctttggctggttttggttacggcttgccgatttcccgtctctacgccaagtattttcaaggagatctgaatctctattccatgtcaggctatgggacagatgccatcatctacttaaaggctttatcatytgagtctatagaaaaactccccgtctttaacaagtcagccttcaaacattatcagatgagttctgaggctgatgactggtgtatcccaagtaaggaaccaaagaatctgtcgaaggagaaactggcagtgtgacggggatctcgcctggcacttttacgggatcaaagtgggtctacggcagtgctgcttcgtgaatgtgtgtggactcttgtttccgcaaaacaaagcaaaacaaaaccaagcaaacgctagaacagacattgatctgaggagggactgagcttggttatgtgaccgggagaagtcagggcagggcttcagtagacaacaagtgtcctggatctcatttggcaatgcagaatgactcgtgactgttccaaatactgaaaagaagtctgcctctgagttacatctttttctcaacaagtacagggtttgaggtttgcagtttcaacagatggatgttttcgggttcttgctgacatccaaatatattggtgtttagtg

SEQ ID NO: 553 - DNA, 4440 bp, Rattus norvegicus
gatcctgggagagtccgacgttcgccggctaacgcaggacaggtcactgaggtccgccaggtgtgtccgccgtttgtttcctgcccctcgccaggttcggtgtccgctgccgaggcccgaggcccttcttccgctgtcggcgcgcccccctgtctcgtttcggccccgccgggacaacgcctggagtcgcagcagccgggtgatcgcgcccgtcatcctctaccaacgtttccaggctgccctgctcgggagtgggtgagaatgaagctaaaggagatagaccgcacagcgatgcaggcgtggagccctgcccagaaccaccccatttacctggccacagggacatctgctcagcagttggacgcgacattcagtaccaacgcttcccttgagatattcgagctcgacctttccgacccgtccttggatatgaagtcctgtgctactttctcctcgtctcacaggtaccacaagttgatttggggacctcataaaatggattccaaaggagatgtttctggagttttgattgcaggtggagaaaatggaaacattattctctacgatccttctaaaattatagctggagacaaggaagttgtgattgcccaaaaggacaagcatactgggccagtgagagccttggatgtaaacatcttccagaccaatttggtggcctctggtgctaatgaatctgaaatctacatttgggatctaaacaattttgcaactccaatgacgccaggagctaaaacacagccaccagaagatatcagctgcatagcctggaacagacaggtccagcatatcttagcatcagccagtcccagtggccgggcaacggtctgggatctcaggaaaaacgagcctattatcaaagtcagcaaccacagtaactggatgcactgctctgggctggcatggcaccctgatgtcgctactcagatggtccttgcttctgaggatgatcgattaccagtggtccagatgtgggatcttcgatttgcttcctctcccctccgggttctggaaaatcatgccagggggattttggcaattgcttggagcatggcagatcctgaattgttgttaagctgtggaaaagatgctaagattctctgctctaaccctaacacgggagaggtattatatgaacttcccaccaacacacagtggtgctttgatatccagtggtgtcctcggaatcctgccgtcctgtctgccgcttccttcgatggtcgcatccgtgtctactccatcatgggagggagcatagacggcttaaggcagaaacaagttgacaagctttcgtcgtcttttgggaatcttgatccgtttggcacaggacagccgctccctccattacaaatcccacagcagacttcacagcacagcatcgtgctgcccctgaagaagccgcccaagtggatccggagacctgtgggcgcctccttctcattcggagggaagttggtgactttcgagaacgttacagggcagcctcagcagggagctgagcagccacggcggcagcccgtgttcatcagtcaggtggtgacagaaaaggacttcctcagccgctcagagcagctacagcacgtcgtcgagtctcagggctttatcagttactgccagaaaaagatcgatgcgtcccagactgacttcgagaagaatgtgtggtccttcttgaaggtaaagtttgaggaggattctcgtgggaaataccttgagcttcttggatatagaagagaagatctgggagagaagattgctttggccttgaacagagtggacggatccgatgtggctcttaaggactctgaccgcgtagcgcagagtgatggggaggagagccctgccgaggaagggcagctcctgggagagcgcattaaagaggaaaaacaggagtgtgactttctgccctcggctggcggtgggacctttaacatctccgtcagtggggatattgatggtttaattacccgggctttgctgaccggcaattttgagagcgcagttgacctttgtttacacgataaccgaatggctgatgccatcatattagccatcgcaggtgggcaggagctcttggctcaaacgcagaagaaatactttgcaaaatcccaaagcaagattaccaggcttatcactgcggtggtgatgaagaactggaaggagattgttgaatcctgtgatcttaaaaattggagagaggctttagctgcggtcctcacttatgctaagccagatgagttctccgccctgtgtgatctcttgggagccaggcttgaaagtgaaggagacagcctcctgcggactcaggcctgcctctgctatatctgtgccgggaatgtagagagattagttgcttgttggaccaaagctcaagatggtagcaaccccttgtctctccaggatctgattgagaaagttgtcatcctccgaaaagctgtacagctcacgcaagccctggacacgaacactgtcggggctcttctggccgagaagatgagtcagtatgccaacttgttggcagcccagggcagcattgccgcggccttggcgtttctgcctgacaacaccaaccagccagatatcgtgcagctgcgtgacagactctgcagagctcaaggcaggtctgtgccggggcaggagtcctctaggagctcctacgaggggcagccgctgcccaagggcgggcccgggccgtttgctggtcacccgcaggtgtccagagttcaaagtcagcaatattatccccaggttagaattgcccctactgtcactacctggagtgacagaactcccactgccctccccagccatccacctgcagcctgtccctctgacacacagggagggaatcctccacctccaggtttcataatgcatggcaacgttgttccaaatagccctgccccactgccgacgtctccaggccacatgcacagccagccaccaccttatccgcagccgcagccttaccagccagcccagcagtattccttgggaacaggggggtcagcagtttatcgacctcaacagcctgttgctcctcctgcttctaagcgttaccctaacgccccatacgtatctcctgtcgcttcctactccgggcagcctcatatgtacacagcacagccagcctcctcccctacctccagctctgctcctcttccccctcccccttcctctggagcgtccttccagcatggcggaccaggagctccaccgtcatcttcagcttatgcactgcctcctggaacaacaggtacaccgcctgctgccagtgagctgcctgcgtcccagagaacaggtcctcagaatggttggaatgatcctcccgctttgaacagagtaccgaagaagaagaagctgcctgagaacttcatgcctcctgtccccattacgtcaccaatcatgaaccctgggggagatccccagccacaggggctgcagcaacagccttcagcttcagggccacggtcaagccacgcctccttcccgcagccgcacctagccggcggccagcccttccacgggatccagcagcctcttgctcaaacaggcatgccaccgtctttctcgaagcccaacactgaaggggcccccggcgctcccattgggaacaccatccagcatgtgcaggctctgccaacagaaaaaattaccaagaagcctattccagacgagcacctcattctaaagactacgtttgaggaccttatccagcgctgcctctcctcagctacagacccccaaaccaagaggaagctggacgacgccagcaaacgcctggagtgtctgtacgacaaacttagggaccagacactttctccaacaatcatcagcggtctccacagcattgcgaggagcattgagacgaggaactactctgaagggttgaccgtccacactcacatcgtcagcaccagcaacttcagtgagacctcagccttcatgccagtcctcaaggttgtgctcagccagsccagtaagctgggcgtctgagacagctgccatgacctcsgactccgccacttctccaaagaaagccatgctaagactgggaccagcccctcattagcatgtttccatggcacccgccacmcaggagctttgacatttctgcaggcaaactccchtagaactgcttgaaccccccstcccaccccgcccgtgctttcctttgttttaatcccctcgcccattatgattttcccattctgcaaatagtgtctttcstggattacacatagtgtggtttcctgagggattctgacaaaatgtggtttttaaaacttkggtgtactttttaggaaaattgcatctggctgtgtataaaacagacctaaaatagatttctttaatgtcttccctaccttcttcacgttsatcagattaaagttgtaatcccwwmwwaaaaaaaaaaaaaaaaaa

SEQ ID NO: 554 - DNA, 1804 bp, Rattus norvegicus
ggcacgagcttcaattgccttttgtctccggttctgggacctttgtcttctgacccacaggcttggcttcacccttgtcttctcctttgtggtgaagagcagccttccccaggctcccctttgccacggctgtgccttctctgcaccctgacttcgagcatggaaggggaaggggttcaacccccggatgagaatctggaaaatggatcaaggccaaggttcaagtggaagaaggtgctaaggctggtggtctctgggattaaggcagcagggctgctcctgtgcgtcgtctatgtctgcctgcaattctcttcatctccggcgaaggactctccaatccaaagactcagagcaccagttaccggatgtgaggggggaagactattcattggcacatccaagaatgagtatgaaaccatggaggtgcagaacaattcggtcatcatcaactgcgatgggctttatctcatccacctgaagggctcctttttccaggaggtcaagatcaaccttcatttccggaaggatcgcagtccaatctttgtgccaatgctgaacaatggtcaaagggttgttttcactgtggtgacctctttggcttttaaagacgaagtttacttgactgtaaatgcttctgatactctctgtgaacacctccagataaatgatggggaactgattattgtccagctaactcctaatggatactgtgctcctgaaagaccttatagcagcactgtgaaccaagtaccactgtgaattccactctgagggtggacaggacacaggttctttcttgcgagagatgagtccatcctgctcaactccatgacatgtgatggaatgcagatcccaccccacttcctcactcagggatatttaagtcgtgtcttacataacagttgacctctcattcccaggattgcctagagtctgctaagagctctacagggaatgaaaaaaataaatgtctcttcaagatgcattgtttcagttggtcagaagatcattgtaataaacatctgacactgaaaatggggcttgattattatcttctagaattttgacattgtcaaaagaaagaactaagaatgggactgtgagtctggaaagggtggtgtctaccagccagtaggagctggagtgctctattcaaggttaaggtgatagacaactgtttaggtgatgaggtgatgtatactgtgagcttctcccattatctctcttctttcctggcctccaaatatacataatagaaaacgtccttcaaagagctatctaggatgataccaccgagtactgcatcagtgatgtaaagaaaaccagtagagctttgtttgttatacagagcataggagagattttaccccaacagttatttttataatctaggataatagtgaactgaatgtcgcaggataaaggtcaagaagggttttgacagtctaagcaagactgttttccaagttctcttttccaatattttatgtaaatctttgataatttaaaaatttttagtattttttggccattttcaatagaaaatatagctcaaactatttccagatgacttcatatccccataaggattatattgtgttacaatacagtgcgtatgtcttgaacctccagaaagtctgaaggctactaatccttatactaagtgaattcagttacatttggaattttttgtctgatagtatattttctcttatgcatctatctatacttctatgtaccctctgttttaatctgttattaaaagaagccaaataaaaatgctacataaaaaaaaaaaaaaaaa

SEQ ID NO: 555 - DNA, 2946 bp, Rattus norvegicus
ggcacgagccgggtcgtgcgcgccgagctcgggatccggctcccagtctagccccgcttcgggccgtgcgccctttgctcggcgtccggctccggggctccgcgccacccgctcccgcctgcccggccgcctggccgcctccccgtagtcagagcgcggccaccgagctgctcgcgccagccgcatccgcgccgcccctgccgatcggccctccggaggcaccgctccgggtcccccccgccactgcctggcacccaggctgcccacctcgcgacccgggtcctcgctgccgcctcgcccggccccactgttctctccacggggtctcgccagctctttctcgtcgccgccaccgccgcccccttggagcagcgggtccgccgcgggtcaccatgcccagcaaaaccaagtacaaccttgtggacgatgggcacgacttacggatccctttgcacaacgaggacgccttccagcacggcatctcttttgaggccaagtacgtgggaagcctggatgtgcccagacccaacagcagggttgagatcgtggctgccatgcgcagaatccggtatgagtttaaagccaagaatatcaagaagaagaaagtaagcatcatggtctccgtggacggtgtcaaagtgattctgaagaagaagaaaaagaaaaaggagtggacgtgggatgagagcaagatgctggtgatgcaggaccctatctacaggatcttctatgtctctcatgactcccaagacttgaaaatcttcagctatatcgctcgagatggtgccagcaatatcttcagatgcaatgtctttaaatccaagaagaagagccaagctatgagaatcgtacggacagtgggacaggcctttgaggtctgccacaagctgagcctgcagcacacacagcagaatgcagatggccaggaagatggagagagcgagaggaacagcgatggctcaggagacccaggccgccagctcactggagctgagagggtctccacagccaccgcagaggagaccgacattgacgctgtggaggtcccactccccgggaatgacattctagaattcagccgaggtgtgactgacctggatgctattgggaaggacggaggctcccacatagacacgacggtctcaccccatccacaggagcccatgctggcagcctcccctcgcatgctgctcccttcttcttcttcctcgaagccaccgggcttgggcactgggacgcccctgtccactcaccaccagatgcagctcctccagcagctcctccagcagcagcagcagcagacacaagtggctgtggctcaggttcacttgctgaaggatcagttggctgctgaggctgcggcacggctggaggcccaggcacgagtgcaccagctcctgctacagaacaaagacatgcttcagcacatctctctgctggttaagcaggtgcaggagctggaactgaagctgtcaggacagagcaccatgggctcccaggacagcttgctggagatcaccttccgttcaggtgccctgcctgtgctctgtgaatccaccactcctaagccagaggacctacactcaccactgctgggcgctggcttggctgactttgcccacccagtgggcagccccttaggtaggcgtgactgcttggtgaagctggagtgctttcgtttcctcccagccgaggataaccagccgatggcacagggtgagccgctcctaggtggcctggagctcatcaagttccgagagtcaggcatcgcctcagagtatgagtccaacacagacgaaagcgaggagcgtgacwcgwggtcgcaggaagagctgccacgcctgctcaatgtcctacagcggcaggagttgggtgacagtttggatgatgagatcgccgtgtaggtgcagggcaaggagctggtgaaggtggcagcatgatgccaagggggtcaagtctgcctgtccccggctggggaagcccaggggaaagcaccgctgagaaaaacacccagggctgagagtgtagggtttcagaagagggttgggattttgctttggaaggtaaagcagggaagaaaatggattcctagacacaggaatcagcacctgtattctgctaatgactgaatgggacggaagcagggctttccagaacccaggaccttgggatgggtccgccttcaagaatcacagttctggaaggcctgttgctcccaccgttatagtcaggttctactcaatctgtccgtgatgtctcagtggcctacactctcctgtctctgtggtgcagatcataaatggaagccattgataccgtctcacgtactttgttttggatatcaggatgctacaagttgcctaaccctcccttaagctgtaggagaattccttccccaggccctggctgagatcagagaggttggaggatttccctcactgstgggaaattgagactctgccaykmrgtgagcatggaggtgacagcagtcacaagtcacagtgaataaactaggaatttactctaarwrrrrwrwwrrawrttgcttctgaggaagctaggagtatgaataggattgaggaccctgcagggagagcctggggagggttagcctaggggagggttagcctagagaagggttagcmtaggagtgctgatgacagttgtggcagytcatgtaggtgtgattcttcagtttggaaaccatgccccttacccatctcctgcctgcaacccagytcatataaacgaggctaagamctatcataatatccccttttcttgcctcaggggctgtgcctgcctaagstktgacagtactatgcctttgtgtaagtctcagagacccagaaccccctgccttacctmtctstacctgtcccctccactgggcagtagtggtcagtttttactcgwgmmaaaaaaawraaaaaaaaaaaaaaaaaa

SEQ ID NO: 556 - DNA, 1858 bp, Rattus norvegicus
ttctgtccctgaagagccagcttgcctcctcctggtgctccctgctccaagctatcctacaacactgagagaaagaagagacgcagtcagatgaaaccgcagtgccttttgacatgatctaacccagaagcaggagctgtccagcgctgagagacaggaaaggccatggctaaggagtggggttacgscagccacaatggycctgagcactggcatgaactttatccaattgccaaaggggacaaccagtcacccattgaactgcatactaaagacatcaggcatgatccttctctgcagccttggtcagtatcttatgatcctggctctgctaagaccatcctgaacaatgggaagacctgcagagttgtgtttgatgatacyttcgayaggtccatgctgagaggtggscctctctctggaccctaccgacttcgccarttccatcttcactggggctcctcggatgaccatggctctgagcacacagtggatggagtgaagtatgctgctgagcttcacctggttcactggaacccgaagtataacaccttcggaggaggctctgaagcagcccgatgggattgctgtggttggcatttttctgaagataggacgggagaaaggcgagttccarattctccttgatgccctggacaaaattaagactaagggcaaggaggctccttttaatcacttcgacccatcgtgcctgttccctgcttgccgggactattggacctaccatggctccttcaccacgccaccctgcgaggagtgcattgtgtggctgctactgaaagagcccatgacagtgagctcagaccagatggccaasstgcgcagcctgttcgccagtgcagagaatgagcccccggtgcctctggtggggaattggcgccctcctcagccrmkmrrgggcagggtggtgagggcctycttcaagtaaggctctggacgtgccctcttcggaaaggaattcyrkccckgaagagccagcttgcctsctyctggtgctccctgctccaagctatcctacaacmytgagagaaagaagagacgcagtcagatgaaaccgcagtgccttttgrcaygakstaacccagaagcatgaatttcacacstaacctttttaataactaccttttctaaaaaaattagtatttctagtataaattcagtgaagaagaartagatggaaaartaacgacagtgacagtggcytattaagcatattaagtttctcagaatstcagcactcctgttttcaggctgagttactgacaagtgatgggtccatgctatgtatgtggstatgraggcatgtgcccacyttaccacatttgattgmaagmayrrsykargatcactgtagatttcagaaggtgaatacataatgtttacctcaaatrrhacsakcgmtactctatcactttttaaaaatytgcmtaytaccaamkkcgcmwggttttaaattaccgataaacacacacccataaggccaggtcttttaaattttttgatccagcatttaaatttyttcttcataaagatggttttctttgcccaatytagggtcatywatttttyatttcmcyactttaatctttgcatscctattaaaaacaaagcaaamcaamcmaacaaawaamaaaamccmwawwaaaaaaaaaaaaaaaagctgtctctggkgtcttttgagttggaagttggaatgactggttcctgagacaggaaggagggaatgccascactgaagctgagagtttgtactgatcgcagaagcaataaagacgggatggwaatgaaaaaaaaaaaaaaaaaaaaaacctttgcggccgcaagcttattcccttta

SEQ ID NO: 557 - DNA, 1108 bp, Rattus norvegicus
ttgcttttaataacactgaaccccatcagagccagaagcaggtgcccgctgcagtttttgacacatgccactttccctacagctggaggccttgggttccatttacagtactggggtggggggataaggcctagtaaaaccctctcctcaaagatgcccttgagggtcggcggcgacggcgacatggagagcggggcctatggcgcggccaacgcgggcggctccttcgacctgcggcgctatgtgtcccagcctcaggtggtgacacgcctcgtgagcatggtcttggccttgatcgtattctcctgcatcttcggcgagggctacatcaaccttcactcatctgaccagctacactgtgtgttcaaccggaacgaagatgcctgccgctacggcagtgccattggggtgctggccttcctggcctcagccttcttccttgtggtggatgcgtttttctctcagataagcaatgccactgaccgcaagtatctggtcattggtgacctgctcttctcagctctctggaccttcctgtggtttgtcggtttctgctttctgaccaaccagtgggcagccaccaaacctgatgacgtgttggtgggagcagactcagcccgggctgccatcaccttcagtttcttctccatcttctcctggggtgtgctggcctccctggcctaccagcgttacaaggctggagtggatgccttcattcagaactatgtggaccccacgccggatcccaccacagcctacgcctcctaccctagtgcctcggtggaaaactaccagcagccgcccttcacccagaatgtggagactactgagggctaccagcctcccccagtgtactgagcagccagggacaaagaggcaggagggtgcttggtggggctgcccctccaccctggacttctctcaaggtttgctgtccagaactgtagtcccttggctgttacagttgacagcccgagtccatgcctttctgcaccccagcagccagagcacacctgaagtgcccatgcccagaggggcttcaccgccacccgcctgaccctcaagggcatctttgaggagagggttttactaggccttatccccccac

SEQ ID NO: 558 - DNA, 3309 bp, Rattus norvegicus
ctcgaggatctacaagatccatccacagcaccaggaagagtatactaaaaaagaaagtaaaaatagcttcagagtggacgtggagaccagaccataattcaggcctggtgggaaattaaaatgatacagccctgtgtagagctgtctgatgtcttagcagtgaacactagaatttcctcatgagctagcagccctagttgcaggacttgagatcacttcctgagaagaacctgcatgtggcactaatggcagctctattcaaagtagccacaaggtgaaaacagccctgcagatgctgcaaaaccatgggagacagagccatagctctgtgaagttccctgggtcactaaggggcatcacagtagagctctctgcttctccatagaatatgtctgcctatgacttcgggtgcatcagaggggatgttgttaggaggtagatgttcaccttccttcaagtccctggggtggttgtcagtctcagtctcatttgagcaagtcagaagacagagtgtctggaaatggaacaagaactgcactgcacatgctcagagacagcaggatggctcatctggccgacttggttctatgtgtgaggaggaggggcaggttcaggaacttcccctgagccttggaagcagaagcagcaaatcgctttggaagagagtctggtatcctatagaaagtgtccagacttttgctttgagtctaattctagaaatgtaggcttctttgaaacttgcttccttttgtaaaatcatttggactccttagagtcaagtatatttcctcacaactccttctacgctcacattgtgtgattctgcccaagaaaaggctcacaagcccttctgttcaggacaacaaaagagcatgttttaatgatgattactcaattattactgttctcccaagtaaatcattgccaggaactgctatgtgaggacacgccctcttgagggggcagatttctcactgtctcacacttcctctgctgtgttaggagagcrmaktckgcassagctgtcttgccttggtctgcacttctcccatggctcctkcagrcdktccascctcycttcctctskgtstktgyctgytsctggcctctggctttgskcakgcaggcargctgctggtrgtgcccatggayggsagccactggttcaccatgcagatgrttgtggagaarctsmktcmcaraggscatgaggtggtggtrgtyrtyccagaggtsagttggcasmtgggaaarycrytgaattttacsgtgaaaacgtaytcagttyytmacactcwggargatttaaayyrssasttcaagttttttrytsaywmycartggaaaactcaasaagwrrgcgrwgttcttcctctactgamkmryycwgscmarggtttcttcgaattactgttttcacactgtagragtttgtttaaggacaagaagttagtggagtacttgaagcagagttcgtttgatgctgtgtttctggatccttttgatgtgtgtggcttaaytsttgccaagtacttttctctcccgtcmgtggtcttcagcrggggratattttgycactaycttgawgarggykcccagtgccccagtcctccttcwtatgtycccagavbtmtctyraaaytcacagayaccatgactttcaaggaragagtgtggaaccwtctytcctacatgrrggagcrtgcattytgycccwrytttttcaaaactgcyrymgamattgcctctgaagttctccagaccccggtgactatgasagacctcttcagcccagtgtccrtttggwtgttwcgmacwgacttyrygytggarttmcccagacctrtgatgcccaayrtgrtcyacattggwgggatcaactgccaccarrggaagccastttccaaggaatttgaagcctatgtcaacgcctccggagaacatggcatcgtggttttctctttgggatccatggtctcagagattccagagaagaaagcgatggaaattgctgaggctttgggcagaattcctcagacggtcctgtggcgctacaccggaactagaccatcgaaccttgcaaagaacactattcttgtcaaatggctaccccaaaacgatctgcttggtcatccaaaggctcgggcgttcatcacacactccggttcccatggtatttatgaaggaatatgcaatggggttccaatggtgatgatgccttggaaaacgcccttaaaactgtcatcaataacaagagttacaaggagaacatcatgcgcctctccagccttcacaaggaccgtcctatccttgtttggtcatcagatggacaacgccaagcgcatgcaaactcggggagctggggtgaccctgaatgtcctggaaatgactgccgatgatgagcctctggacctggctgtgttctgggtggagtacgtgatgaggcacaagggggcgccacacctgcgccccgccgcccacgacctcacctggtaccagtaccactccttggacgtgattggctttctcctggccatcgtgttcacggtggtcttcattgtctataaaagttgtgcctatggctgccggaaatgctttgggggaaagggtcgagtgaagaaatcacacaaatccaagacccactgagaagtggcaggaagtgaaggagaagtattagtcccttatccaatcagttgaaacttggrmacragkgtkawwtccayrtygcwtywmtymsggmmmkmmytcascakmyaytatacammcagaacawtttyttttytttttytttttttyggagctggggaccgaacccagaacattttttttttaaataaaaacaatctaattgctggccacacccatcagggaagatactggaatatgtgatctgtttctccagtatcttcagtytggacaatgactgccatctgttggtaacttacagaaagtttagtgttctgttctgccttcagtgacagcaccacagtttcccttactcctgtcagctaatggcttcctcccctggattctcagaccartgtggccttcccagtgttagtcattcctcactgtgctcatgttttgtgggtggcacggcctttgagctttgggagaaaasaagatgaggctgtgacactggtggccctgtgtttgagataataattattgcttgtctctgaatttgatgaaaactgaagtacattytaaagaaagtatgtcttctattgtgttcccaaaccaagaacttgtcmwyrwrttcatataaattgkwttattacttttaaaaaaaaaaaaaaaaaactcgag

SEQ ID NO: 559 - DNA, 1858 bp, Rattus norvegicus
cccgcsgcgtctagagcggcgcccagtgcaggatgttgcaggagacggcggcggtgtcgttggcggtagcgggcggaggagcggtgacggctgaggcgcccgcgggcgggataaaatggcggatttcgaggagttgaggaatatggtttctagttttagggtttctgaatyacargtgttactgggctttgctggacggaataaaagtgggcgcaagcatgacctcctgatgagggcgttgcatttaytgaagagtggctgcarccctgcggttcakattaaaattcgagaattatacagacgccgatacccacggacacttgaaggactttctgatctatccacaatcaaatcttcagttttcagtttggatggtagctcatcaccagtagagcctgacttggccgtggctgggatccactcgttgccttctacttccattgcacctcattcaccgtcatctcctgtcgcttctgtgctgcttcaagacactaagcccacgtttgagatkcagcaaccatctcctcccattcctcctgtccawcmtgacgysymgtkaaaaacgctgcccttctatgacgtccttgatgttctcatcaagcccacaagtttagttcaaagcagtattcagcggtttcaagagaagttttttatttttgctttgacaccccagcaagttagagagatatgcatttcaagggattttttgccaggtggcaggagagactacacagtccaagtccagctgcgactttgcttggcagagaccagttgccctcaagaagataactatcccaatagtttgtgtataaaagtaaatgggaaactctttcctttgcctggctatgcaccaccacctaaaaatgggatcgaacagaagcgtcctggacgccccctgaatattacatctttagtgagattgtcttcagctgtgccaaatcagatttctatttcttgggcatctgaaattggaaagaattactccatgtctgtgtatcttgtacgacagcttacatcagccatgttattacagagattaaaaatgaaaggtattagaaatcctgatcattccaragcactcattaaagaaaaacttactgcagatcctgatagtgaaattgctacaactagtcttcgagtgtccttgatgtgccctttaggaaaaatgaggctgacaatcccgtgccgcgcagtgacgtgtacacatctgcagtgctttgatgctgccctgtatcttcagatgaatgagaarragcccacctggatttgtcctgtttgtgacaaaaaggctgcctatgagagtctgatactagatgggctttttatggaaattctcaatgactgttctgatgtggatgagatcaaattccaggaagatggttcctggtgccccatgagacctaagaaagaagctatgaaagtaaccagccagccctgtacaaaagtagaaagttcaagtgtctttagtaaaccttgttcagtgactgtagccagtgatgcaagcaagaagaagattgatgttattgatctaacaatagagagctcttctgatgaagaggaagaccctcccgccaaaaggaaatgcatctttatgtcagaaacacaaagcagtccaaccaaaggggttctcatgtatcagccatcttctgtaagggtgcccagtgtgacttcagttgatcctgctgctattccaccttcattaacagactactcagtaccattccaccacacgccagtgtcgagcatgtcatcagatttgccaggagaacaaagaagaaatgatattaataacgaagtgcagcttggaacatcttctgatactgtgcaacagtgaatgcaaaataaaacakaatttgta

SEQ ID NO: 560 - DNA, 962 bp, Rattus norvegicus
atctaatgattagtttatgcccacaggcaaaatttgagatttcagcaagtacctggtactgtcaacaactctgtgatgttttctgaaccaccactgatgcttgatttggagagcttccttcctctcagcctgtggaggtacagtagggtgactgcacaactggtcactagagggagctgtggactcactgaggaagctgctgccatttcctcagaaagtgaacgcagagagctctgatttggagttcacagtagggtattagctgtggaaccagatatagtgttggctcaggagactcagaacagggcaggcatggtcagtcatatctgcaagcccactttgcatcagcacaggcagcttaaactatagycttggcaatctaaaaccatttaaagctaggagaagggaggaaagcaactgcctcagagaaaagcatgaagggaatttcccacgcaccgccctatttattcaggacagmcmtctctccttccactaagcaggctgaggataaaggcagaagkgggcagacagcagtgtatactcaggaggacagagagcctgtgggagtaagcaatcactgacctctcagaacctgacatcacaggtaatgagatgaaaggaggaragagaaaggaggagctgcttcttgttttctcaccaagggccccagcatcttgagaagaaggatgtgtaacattgcattccctgactctgcctggggccccaccctgctctcttgggttgctgtctttctcctgggaacaagtaagtactgggtgctggcaggattgatcctgaactcctctgcttcggctgctgctgtggctgctgttgcatagacctactctttctctagctgctcacccctgtctccttcctccacagatccagcaaattctggggtggtccagtctccaagacacataattaaagaaaagggaggaaggtccattctgaaatgc

SEQ ID NO: 561 - DNA, 1142 bp, Rattus norvegicus
ctgaatatactaattagtgtttatttccctgcaacactgaaatgacagattttttctgttgtggttttctttgggttttgtctgtttgtttttgaaaagtggtggtcctttcaaactgttctgcttaccataggcaaaaattgatatttaggtagataaacaggtactggcaaactctgtgaagttttctgacctatcccaggtgcctgattttgagagttcccacctctcttcagtcagtagaggtacaatccagtgactgcacggctggtcattagggggctctgctggtccactgtgtgagctgtgggcagaggtaaacaagatggttatgagttttgctctgtagcctacagaaaggtgttagctgtggamccagaaagagttttggctcaggaagcacctggctgggagatgtggtcaatcatctatgcacacacacacactgtgggtcascatagggagcgtgawttgaagatttgaaactgtagctttggcaatccaaaggcctctgaagtkaggagaagagaagraagcamggctcagagaaaagcacggcttccycatacccagccctatttattctcatcagccatcttcccttctactgagcaggcggagactaaaaaggaaargcttgagactaggtgcactagtacagagagcctatgggagtarccayataacaggtcactgacctcagaacctgacatcacaggcaatgagataaaaggaggcaagagaaaggaggrgctgrctmstgctctctccccaargagatcagtatcctgagaagaaggatgtcaaacactgccctctctaactctgcctggattaccagyctgctgtcttgggttgcygtctttctcctgggwacaagtaagtmctkagtgctggcagggstgatcctgagctccaytgttgctgctgctgcttctgcatggatctactctttctctagacccttactcggtgtccttcttccccaggttcagcacattctggggttgtccagtctccaagacacataattaaagaaaagggaggaaggtccattctraaatgtattcccatctctgaacataacaatgtggcctggtaccaacagactcatgggcaggaactaaagttcctcatccagc

SEQ ID NO: 562 - DNA, 3018 bp, Rattus norvegicus
ctggagctttgagccacctctcaaaggaataatcggtagcagcattcagactgtcacgtggttcccaaaaggagggcttaggtccaaaacacccacccccattggatactctttgggtcccaaaattccattgcaaatcatccctaagttacaaccatccatccatacaaagcagcacagagcaaagcaaagggtttgtgcggttcccctccattatatctgccttatagcccaccctccaaaaacgtttagatagattccaggccgggaaaccacctcttcaggaccccgagggtaggatcagaaacgagacacagtttcaagaaactctgctcagacggaagggacaggagaggcctttccgtgtgcccaggatctcagcagaaaaacaaaagagaagattaggcaatgtagtattatttgagaccaggcttgaatgcccctgagtaagagagggaccaggaatacaggcatcccagcgggacggtaacccagagcagaccctgacccctctcgttcacagttgctaaccttgctcccttccaccacctcctgggggatcagccaagaatccccttttaccttggctaggccaatccccaacccactcccctaggcaaacactggctcatagactcaatcaagaacagttctctcagctactgggcccggtcagtggcagcttccggtagacgccgtgaagcgcgaccccggtctctgctccgtgtcatgtcctacggtcccttagacatgtatcggaatccgggccgtcggrgccwccsggacttcarcagcatcatccagacrtgcagyggcaacatccagcggatcagccaagccactgctcagataaagaatttgatgagccaacttggaactaagcaggactcaagcaaactccaggaaaatttgcaacagttccagcactccacaaatcagcttgccaaggagacaaatgagttgctgaaggagttagggtccttgcccctacccttgtctgcatcagagcagcgccaacagaagcttcagaaggagcggctcatgaatgacttctcgtcggccttgaacaatttccaggttgtgcagagaaaggtatctgagaaggagaaagaaagcatcgcgagagcrmgggctggatcccgtctttctgcagaagacaggcaaagagaagagcagctcgtctcatttgacagccatgaggagtggaaccagatgcagagccaggaggaagaggcggccatcactgagcaagacctggaacttattaaagagagggaaacggcgattcagcagctggaggctgacattktggatgtcaatcagatctttaaagacttagctatgatgatccacgaccaaggtgatctgattgatagcatagaagccaatgtggaaagctcagaggtgcatgtggaaagagcctctgatcagctacagagagctgcttactatcagaaaaaatctcgcaagaagatgtgtatcctcgtgcttgtcctctcagtgattgttacagtcttggtagttgttatctgggttgcttctaagtgaagtgtggttgcctcagagccttctcctgctgagttgttttcgagggcaagtgtttgatggagtcttgccagaacaaactgaccacagaagagagtgtgtaccacagtgtcctgtgataatttagctagaaactaactactaactagtccttggaattagtgaccatggaggcagtatttatcaaytacawmtaktccttksaattmktsamsaysgarkmaktatktrtcaatttwtgcatatatgctcttcatttctcaaagaacgaattaacttatgtgtattttcctttctcttgtattttgattgccctttattgcaagtgtttattgacagtcccactgtggatattctttgtgacaggtgacactacatcatagtactgtctttttgtatatacacaaactatacctttttatgcatatctgagataaatttccttctggagccagcctatcagagtctgagaagctgtacaatatgccagcaatttttattatttaacgttttgctttgagtttctgaggggtctgttctctgttttgcaaggttttggcactataaataactggggagtaagaacactgcacccatgacttcagaggaaatgagaaaaacttgtcagagtgggcccgctgccagggtttgtgggaaagtctgggtttgggttaactgaccttattgtctgcgggtgttgtttacgcagtccatcctcgcacactaagccatcccgctcctggtttagagaggatcagttcattaccattgttctaatcaatcaggtctctctcccacctgtctgcatagaagggggattcgctcagcccagcatgactttggagagcagatgaggactgtttggaatgattgagtccctctcgtcctcgtgtggctttcattctgatgaatgataaacgctgctgtcaaaggctgatccaggcccttggaagggttgcctggctttgatggcaagattttgaaatttagactgaagtgcggtttaaaactcggtctgtgaacctattgataaagcaaagcaaaggttcactttgtaaataacactggtttagtgatgacagaattagcctaatttatgaacaagagacaaactctgtgtagttttagataaaaacagttttaataaaaggtttctgtcttgtatataaatgttgtctactgccctttttcacagacctagaacagtcagagagcgtgtaattggtttgggctctcagataaatgtggattgagscsggaaatgtcascagcacatccttggctsacgtaraggatctgsctgctgtggcaatatctgwgtttgttccttctatccctcatgctgtcmcttrmwgctgtcccacactaatgtgaccatggagaagcaagcaaatgcataggtttcyycgmrcygttgcaccatccctactcaacmcaataaacgtttaaaarctrwaaaaaaaaaaaaaaaaa

SEQ ID NO: 563 - DNA, 1246 bp, Rattus norvegicus
attttgggcgagcccagcycsgtccgtggtagcaggccatggcgatgggcagcggcggcggcgcgggctctgagcaggaagacaccgtgctgttccggcgtggcaccggccagagtgatgattctgacatttgggatgatacagcattgataaaagcttacgataaagccgtggcytcctttaagcatgctctaaagaacggtgacatgtgtgaaacttcagataagccaraaggcacagctagaagaaaacctgctaagaagaataaaaaccaaaagaagaatgccacagctccattgaaacagtggaaagctggtgacaaatgctctgccgtttggtcggaagatggctgcgtttacccagctaccatcacgtcagttgaccttaagagagaaacctgtgtcgtggtttatactggatatggaaacaaagaggagcaaaacctatctgatctgctttccccgacctgtgaagtagctaacaatacagaacagaacactcaggagaatgaaagccaagtttccacagacgacagtgaacactcctccagatcgctcagaagtaaagcacacagcaagtccaaagctgctccatggacctcgtttctccctccacctcccccggtgcccggggcgggattaggaccaggaaagccaggtctaaggttcartggsccaccgccgccgccacctccccmtcccccgttcttgccgtgttggatgcctccgttccyytcaggaccaccaataattcctccmccccctcccatatctcccgactgtctggatgacacggatgctctgggcagtatgctaatctcttggyacatgagtggttaccacactggttactatatgggtttcmgacaaawtraaaarrarrraaaraartgctcacatacaaattaagaagttcagctctctcccaaggagatggtwtgttggtgtccctggtcgataagaacagargtmtcctcgtcacctttrtggamtctwggctaagtggtgtmatcatcagggtctccctgtcccgggagtccatcytgagtcagcagcagggcatgcatagagcagcagttggaggaaccgatcaatcgatcgatcagtggcagtgtgagtgcatggaagtcagccaaactgtgactgagcacaaacggacaattgcaattttcttagaatgtcaagatttgtattaatgcctttaaaattaaataaaacccttttttgwwamaaaaaaaaaaaaaaaa

SEQ ID NO: 564 - DNA, 996 bp, Rattus norvegicus
gacccgggtttcatgtccctcgacgagtatggctccagccctggtgacctgagagccttcagtagccacaggagcaacacacctgagtccatcgcggagaccccgccagccagggacggcagtgggggcgagctctatgggtatatgagcatggataggcccctgagccactgtggccgcccttaccgtaggtcctctggggatggggcccaggatctggacagaggactgaggaagaggacttactccctaaccacgcctgcccggcagcggcaggttcctcagccttcctctgcctctctagacgaatacactctcatgcgggccaccttctctggcagttcaggtcgcctctgcccatccctccctgcgtcctctcccaaagtggcctacaacccttacccagaggactatggagacattgagattggttctcacaagagttccagcagtaacctgggggcagatgatggctacatgcccatgacccctggggcagccctcaggagtggtggccccaatagctgcaagagcgatgactacatgcccatgagccccaccagcgtgtctgcccctaagcagatcctgcaaccacgttcggcagcggccttgcccccctctggagcagccgtgccagcacccccttcgggggcgggcaggactttcccagtgaacggaggcggctacaaagccagctccccagcggagagctccccagaagatagcgggtacatgcgaatgtggtgtggctccaagctgtccatggagaacccagaccctaagctgctccccaatggggactacctcaacatgtcccccagtgaggcaggcaccgcagggaccccacctgacttcttctcagcagctttgcgtccaggcggtgaggccctcaaaggcgtccctggccactgctacagctctttgccccgctcttacaaggctccctgtacttgcggtggtggagacaacgaccagtatgtgctcatgagctcccct

SEQ ID NO: 565 - DNA, 1849 bp, Rattus norvegicus
gtcatggcttttgggattctgaattatttccgcgatgcctggaacatcttcgactttgtgactgttctgggcagcatcacagacatcctcgtcaccgagtttgggaatcccaataacttcatcaacctgagctttctccgcctcttccgtgctgcccgactcatcaaactcctccgccagggttacaccatccgcattctcctctggactttcgtgcagtctttcaaggtgtttggcaacatcggcattgatggggaagatgaggacagcgatgaggatgagttccaaatcacggagcacaataacttccggaccttcttccaagctctcatgcttctcttccggagcgccacaggggaagcgtggcacaacatcatgctgtcctgcctcagcgggaagccatgcgacaagaactccgggatccaaaaaccagagtgtggcaacgagttcgcctatttttactttgtctcgttcatcttcctttgctcatttctgaggctcttgcggatggacctacccgtagcggatgacaacaccgttcacttcaactccaccttgatggctctgatccgaaccgccctggatatcaaaatcgcaaagggtggagctgacaagcagcaaatggacgcagagctccgcaaggaaatgatggccatttggcccaacctgtctcagaagaccttggatctgctggtcacacctcacaagtccacggacctgacagtgggtaagatctacgcagccatgatgatcatggagtactaccggcagagcaaggccaagaagctgcaggccatgcgagaggagcagaaccggacaccactcatgttccagcgcatggagcctccatcgccaacacaggagggaggacccagccaaaacgcccttccctccactcagctggaccccggaggaggcctgatggctcaagaaagcagcatgaaggagagcccgtcctgggtgacccagcgggcacaggagatgttccagaagactggtacctggagcccagagcgagggccacccatcgacatgcctaacagccagcccaactcccagtctgtggagatgagagaaatgggaactgatggctactcagacagcgaacactacctccccatggaaggacagaccagggccgcctccatgccccgcctcccagcagagaaccagaggagaaggggccggccacgtggaaataacctcagtaccatctctgataccagccccatgaagcgctcagcctccgtgctgggacccaaagcccggcgactggatgactactcactagagcgggtaccacctgaggagaaccaaaggtaccaccaacgccgccgggaccgtggccaccgcacctctgagcgctctctgggccgatacactgatgtggacacaggcctggggacagatctgagcatgaccacccaatcgggtgacctgccctccaaagatcgggaccaggaccggggccggcccaaggaccggaagcatcggccacaccaccaccaccaccatcatcaccatcatcccccggccccggaccgggagcgctacgcacaggagcggccggacaccggccgggcgcgggcccgggagcagcgctggtcccgctcgcccagcgagggtcgggagcacgcgacacacagacagkagcagtagttccgtcagtggaagcccagccccctctacgtccggcaccagcacgccgcggcgcggccgcaagcttattccctttagtgagggttaattttagcttggcactggccgtcgttttacaacgtcgtgactgggaaaaccctggcgttacccaacttaatcgccttgcagcacatccccctttcgccagctg

SEQ ID NO: 566 - DNA, 851 bp, Rattus norvegicus
caactcacgcttgccctgmwcrarsytgatkcakytsyssrmysrytgrttctssaggctgttcatcaacagattctcagcaacaagttcctcattgtacgaatgagagaattgctgtggaagccggaggactgccggaggttttaccgagagcatgaaggtcgttttttctatcagaggctggtggagttcatgacaagtgggccaatccgagcctacatccttgcccacaaagatgccatccaactttggaggacactgatgggacccaccagagtgtttcgagcacsccatatagccccagattcaattcgtgggagtttgggcctcactgacamccgaaataccacccatggstcagactctgtggtttccgccagcagagagatcgcagccttcttcccggacttcagtgaacagcgctggtacsaggaggaggagccccagctgcsctgtggtcmtgtgcahtacagcccagaggaaggcatccactgcgcagctgaaacaggaggccccaaaccagcttagtaaagtcctgtcggtccmtgaggactatgcagtgtgcagcctttcthttrgggtcaggaaggccgtctgaagacactgtctytgatggaccccaccacstgccggaaggtytmgcagaccacagttctghtacggcagcccagatctatytacctyttytatgagtattcacrgaggtccaggaaggaggtgatgcctccttcctcgagaaagagcytgcctgttgaccagtcaggaaaacgcagtgcctgcctgtgtaaccagcatccacmtggcttccttaataaacttcgtgctrycmaawrmaaaaaaaaaaaaaaaaa

SEQ ID NO: 567 - DNA, 557 bp, Rattus norvegicus
ctcggggattccaggacgtctgcaccccgggacgctgcggccaatgcgaacgacttcttcgccaagcgcaagagaactgcgcaggagaacaaggcgtcgaacgacggtcctccagggtgtcccctccaaacgtggctcctggggtgggcgcggtggagcagaaaccccggcaaacgtctgagatgagttagtttagaggctaaccggcacgagaagacttgctgggcatctgggcagcggacgatggacgacctctgggcttcgctgggcacctttcgttcatgtagcaggaacggagatggttgagtagagcagcccacggttttggtggaaatctgaaaactgtgcaatgtattgagaacactctgtaccattgtgcaaggagtacgctggtcccaaggccgatacgtcatcgtcatcaaaactgctagcgtctgactgggctaatccggcgactactaccagttgcctggcttcagcactctgagagtaattcgctagtgtaaagctttaaatcatttatgtaaaatgtttaaagtaaaaagtaaaaaaaaaaa

SEQ ID NO: 568 - DNA, 677 bp, Rattus norvegicus
cagtctctacagatgaatgaatcggaactacccagctctctagacccctcacaggaagaacccacaggggggaaggctgctgccctatacccacatcatccaccagaggctgatccccggattctggagtccctcatgcagatgctgatgatgggtttcgatgatgaaggcggcctcctcaccaggctcctatccaccaagaattacgacatcgctgctgctctggacacgatccagcaatcgaagcaccctccatgatagtgctgttggcaagccccaccccccctcttgtcttgtatgtgcatcacgtagagcacgagggcttctaatgataggcccatggtctgtgcattcttgtagaatcttcagggtggaatgtgtgatgcctttcttggcaataggaaagtgcatggaggaagttttgaatgtgcatatgctgacgcctgagaccagaccacggtacccgtggctgagctgagcttcccttgcttcccctaggcctggcctctgcgagggactgcagcacacactgcactcccacctgcttctgcccgcagcattgcaccagcagtcccgaattcctgcccgacaacccgcgtttcctttattaaaattgattgatacaactgctagttatttctaacaaataaagccattatgttaagaggggactgtcc

SEQ ID NO: 569 - DNA, 817 bp, Rattus norvegicus
cagcagggcactgggtacccagcactgagcagatcaattcctggagctgagaatggcctgcaagcatctgcccttcctggctttggcgggggtactgctggcttacctctgcagccagtcagaagcagcaagcaactttgactgctgcctcacgtacacaaagaacgtgtatcatcatgcgagaaattttgtgggtttcacaacacagatggccgacgaagcttgtgacattaatgctatcatctttcacctgaagtcgaaaagatccgtgtgcgctgacccaaagcagatctgggtgaaaaggattttgcacctcctcagcctaagaaccaagaagatgtaaaaacggatgcttttctgggatggaattggacacagcccaaggaggaaatgatcacagctggggttggaggtttcacctgcacatcactgcacagacctgatttgtgtcccagtggtcttgtccaatggatgaagttgattcatattgcatcatagtgtgtcatatttaagctcatattagagttaagttgtatttkgtgttatttatagatccgaattttctatgtttagctatttaatgttaatttcccacaatctatgargggcgcttagtaraaggttcaatattatgtttaaggcagtaagtttatatggcccttcttggaaacaataagctattgtaaaaatatttaatgttttctgtgtgcttaattgtttcttaaattgatacgatttacttataaaacagaaaggaattataagaatatattgaaaawaaaaraamtgaaaggcaaaaaaaaaaaaaaaaaaaaaa

SEQ ID NO: 570 - DNA, 2478 bp, Rattus norvegicus
agagacatcctcaaccaatcagaagaacaaaatgggagagcctgagaaaagggctggaacccacgggatcagatgctttgccaagataaaggtgtttctgttggcgttaacatgggcatatgcgtccaaagcactatcagcaacttacatgaattccatgctcacacaaatagagaggcgattcaatatttccacatctatagttgggcttatcaatgggagctttgaggtaggaaacctcttgttgattatattcgtgagttattttggacggaaacggcacagacctatcatgattggcattggatgtgcagtcatgggcctaggatgcttcataatctcactacctcatttcctcatgggccgatacgaatatgaaacaacaatttcacctacaagcaacttgtcctcaaacagcttcttgtgtatggagaaccgaacacagaccttaaagccaacacaagacccagcagagtgtgtgaaagaaatgaaatcattaatgtggatatatgtactggtaggaaacattatacgtggaattggtgaaactcccatcatgcctttgggtatttcctacatagaagactttgccaaatcagaaaactctcccttttacattgggattttagaagttggaaagataactggcccaatagctgcaatttggttgggatctttctgtgcaaccatttatgtagacatggggtctgtgaatacagatgacctgaccataactcccacagatacacgctgtgttggtgcttggtggatcggctttttggtctgtgcaggattgaatatcttgatcagcatcccctttttcttctttcccaaaacattcccaaaggaaggaccagaggatatggccaatgaaactaaaaatgacgaaggagataaacacagagaaaaagccaaagaagaaaaaaggggaatcacaaaagatttctttcttttcatgaagagcctctcctgcaatcctatttacatgctttgcgtccttacaagtgtgctccaggtaaatggatttgtcagtatttttactttcaagcctaaatacctggaacatcattatggaaaatccagttcagaggcaatcttcctcatgggtctttataccttaccttcagtatgtgttggatatttaattagtggctttattatgaagaagttcaagattactctcaagaaagcagcattcatatcgtactgcctaggcatgtccgagtgccttctgtccctctgtaactttatgctaacctgtgataacgtcccaattgctggcttaactacttcttatgaaggaattcagcagtcttttgatatggagaatacggtcctggccgactgcaacacaaggtgcagctgcttaacaaaaacatgggatccagtgtgtggagacaatggcctagcatacataacaccttgccttgcaggctgtgagaagtcagttggatcaggaatcaacatggtgcttcaggattgcagctgcattcagtcatcaggaaactcgtctgcagtcctcgggctgtgtaacaagggtcctgattgtgccaacaagctacagtacttcttaatcataacggtgttttgttccttcttctactcattatcactcatacctgggtacatgatttttctgaggtgtatgaagtctgaagaaaagtcacttggaattggactacaggcattttgcatgagaatattgggtggcattctggcacccatttactttggagttttgatagacagaacctgtttacattggggaactcagaaatgcggtgagcctggggcatgcaggacgtatgaaataaatagcttcaggagcatttaccttggattgcctgcagctctaagaggatcaagctatctgcctgccttcttcattctaagacttatgaggaaattccagttccccggggacatcaactctccagtaactgatcatgtggagatgatgctcacagagaaggaaagcgagcacacagatgtgcacagaagtcctcaggtcgagaatgatggagaactgaaaacgaagctgtaatgagttttctactgccctgttcaaggccatgaacagaatgcacacttcccttcctcggaatcccgagagatacaataggaaccttctctttaaggacctcaatgattatttttctcactataaaaataattgctgatatcactttcagaacttcagggtgatatttaagatttccccgggaaagacttttatggtgacccccacactacactttaaagcttccttcattttcacataacattttctcttaactcaatcaagggaagtatgtgtttcccacacagcttcaaatgagtttaaaactttcctattccagaaacactatttaatttcactgaatttaaatttccatactgggggtaattagaactgaaaatatgccccctggttgtgtcatactgaaataaattgttcaaattcattctttctatgtg

SEQ ID NO: 571 - DNA, 471 bp, Rattus norvegicus
  misc_feature (2)..(4): n is a, c, g, or t
  misc_feature (6)..(6): n is a, c, g, or t
  misc_feature (8)..(8): n is a, c, g, or t
  misc_feature (17)..(17): n is a, c, g, or t
  misc_feature (34)..(34): n is a, c, g, or t
  misc_feature (36)..(36): n is a, c, g, or t
  misc_feature (47)..(47): n is a, c, g, or t
  misc_feature (108)..(108): n is a, c, g, or t
  misc_feature (114)..(114): n is a, c, g, or t
  misc_feature (189)..(189): n is a, c, g, or t
  misc_feature (212)..(212): n is a, c, g, or t
  misc_feature (226)..(226): n is a, c, g, or t
  misc_feature (229)..(229): n is a, c, g, or t
  misc_feature (237)..(237): n is a, c, g, or t
  misc_feature (275)..(275): n is a, c, g, or t
  misc_feature (296)..(297): n is a, c, g, or t
  misc_feature (299)..(299): n is a, c, g, or t
  misc_feature (334)..(334): n is a, c, g, or t
  misc_feature (337)..(337): n is a, c, g, or t
  misc_feature (353)..(353): n is a, c, g, or t
  misc_feature (356)..(356): n is a, c, g, or t
  misc_feature (359)..(359): n is a, c, g, or t
  misc_feature (362)..(362): n is a, c, g, or t
  misc_feature (380)..(381): n is a, c, g, or t
  misc_feature (385)..(385): n is a, c, g, or t
  misc_feature (391)..(391): n is a, c, g, or t
  misc_feature (397)..(397): n is a, c, g, or t
  misc_feature (407)..(407): n is a, c, g, or t
  misc_feature (415)..(415): n is a, c, g, or t
  misc_feature (422)..(423): n is a, c, g, or t
  misc_feature (429)..(430): n is a, c, g, or t
  misc_feature (434)..(434): n is a, c, g, or t
  misc_feature (436)..(436): n is a, c, g, or t
  misc_feature (438)..(440): n is a, c, g, or t
  misc_feature (445)..(445): n is a, c, g, or t
  misc_feature (447)..(447): n is a, c, g, or t
  misc_feature (454)..(455): n is a, c, g, or t
  misc_feature (457)..(460): n is a, c, g, or t
  misc_feature (464)..(464): n is a, c, g, or t
  misc_feature (468)..(469): n is a, c, g, or t
cnnngnantcggcctcnagatgcatgctcgaccncnccgtcagtgtnctctaaagagccatgatcatggcactgcactccagcctggacaatggagcaagaccctgtnaatctntgtatctatctatctatctatctatctatctatctatctatctatctgttttgttcattcaaatatatatatgtntttaatatatatatgtttttgantatatatatatggnttngaaatggnaccaaattgctacccttactttcctccattggttaagnggtaggctttttaattctccnnantggaccctttaatctggccacaaccaaaggggggnctnttggtgttggtggggntanttnaanccttaggggttttccctnntccncctttngggggnacaattgggngggccccntaaaaanngggggnncccnangnnnggggnanccaaggnntnnnngggnaaannaa

SEQ ID NO: 572 - DNA, 156 bp, Rattus norvegicus
gtccttctagtttcgaaattgcatcttacagctctttggaaagaaagttgatgatagctctgaactttccagcacctccaaaacagaagtctcatctgtctcttcagtgtcacctgcataaagtttgcctccaacctgttgcatctaccaaagctt

SEQ ID NO: 573 - DNA, 432 bp, Rattus norvegicus
caattagaaatcaagtttttggagcaagtagatcagttctatgatgacaactttcctatggaaatccggcatctgctggcccagtggattgagactcaagactgggaagtagcttctaacaatgaaactatggcaacaattctccttcaaaacttattaatacaattggatgaacagttaggtcgggtttccaaagagaaaaacctgctattgattcacaatctaaagagaattaggaaagttcttcagggaaagtttcacggaaatccaatgcatgtagctgtggtcatttcaaattgcttaagggaagagaggagaatactggctgcggccaacatgcctatccagggacctctggagaaatctttacagagctcttcagtttcagaaagacagaggaatgtggaacacaaagtggctgccattaaaaac

SEQ ID NO: 574 - DNA, 4539 bp, Rattus norvegicus
atgtcctatgcccccttcagagatgtacggggaccccctatgcaccgaacccaatacgttcattccccgtatgaccgtcccggttggaacccccggttctgcatcatctctgggaaccagctgctcatgctggatgaggatgagatacacccccttctgatccgcgaccggaggagcgagtccagccgaaacaaactgctgagacgcaccgtctctgtgccagtggaggggcggccccacggcgagcatgaataccacttgggtcgctcgaggaggaagagtgtccccggggggaaacagtacagcatggaagccgcccccgctgcgcccttccggccctcgcaaggcttcctgagccggaggctaaaaagctccatcaaacgtacaaagtcacaacccaaacttgaccggaccagcagctttcgacagatcctgcctcgcttccgaagtgctgaccatgaccgggcccggctgatgcagagcttcaaggagtctcactcccatgagtccctgctgagtcccagcagtgctgctgaggccctggagctcaacctggatgaagactccattatcaagccagtacacagctccatcctgggccaggagttctgctttgaggtaacaacatcgtctgggacaaaatgttttgcctgtcggtctgcagccgaaagggacaaatggattgagaatctacagagggctgtgaaacccaacaaggacaacagccgccgggtagataacgtgctgaaactatggatcatagaagctcgagagctgccccccaagaagcgatattactgcgagttatgcctggacgacatgctctatgcacggaccacttccaagccccgctcagcctcaggagacactgtcttttggggcgagcacttcgagtttaacaacctgcctgctgtccgggcgctgcggctgcatctgtaccgtgactcggacaaaaagcggaagaaggacaaggcaggctacgttggcctggtgactgttccagtggccaccctggctgggcgccacttcacagagcagtggtaccccgtgaccctgccaacaggaagtgggggctctgggggtatgggctcggggggaggaggggggtcagggggcggctcagggggcaaagggaaaggaggctgtcctgctgtgcggctgaaggcccgttaccagacaatgagtatcctgcccatggagctatataaggagtttgcagaatatgtgaccaaccactaccgcatgctgtgtgccgtgctggagcccgccctcaatgtcaagggcaaggaggaggtcgctagtgcactggttcacatcctgcaaagcacaggcaaggccaaggacttcctttcagacatggccatgtcagaggtagaccggttcatggagcgggaacacctcatattccgcgagaacacgctcgccactaaagccatagaagagtatatgagactgattggccagaaatacctcaaggatgccattggggagttcatccgggctctgtatgaatctgaggagaactgtgaagtagaccccatcaagtgcacagcgtccagtctggcagagcaccaggccaacctgcggatgtgctgtgagttggccctgtgcaaggtggtcaactcccattgcgtgttcccgagggagctgaaggaggtgtttgcatcatggcggctgcgctgtgcagagcggggccgggaggacattgctgacaggctgatcagcgcctcgctcttcctgcgcttcctctgcccggccatcatgtcgcccagtctgtttggactgatgcaggagtacccagatgagcagacctcacgaaccctcaccctcatcgccaaggttatccagaacctggccaacttttccaagtttacctcaaaggaggacttcctgggcttcatgaacgagtttctggagctggagtggggttctatgcagcaattcttgtatgagatatccaacctggacacactgaccaacagcagcagttttgagggctacatagacttgggccgcgagctctccacacttcacgccctgctctgggaggtgctgccccagctcagcaaggaagccctcctgaagctgggcccgctgccccggctcctcagcgacatcagcacagccctgaggaaccctaacatccaaaggcagccgagccgccagagcgagcgcgctcggtctcagcccatggtgctgcgcgggccgtcagccgagatgcagggctacatgatgcgggacctcaacagctccatcgaccttcagtccttcatggctcgaggcctcaacagctctatggacatggctcgcctcccctccccaaccaaggagaaacccccgccgccccctcccggtgggggtaaagacctgttctatgtgagccggccaccactggcccggtcctccccagcatactgcacgagcagctcggacatcacagagccggagcagaagatgctgagtgtcaacaagagtgtgtccatgctggacctgcagggcgacgggcctgggggccgccttaacagcagtagtgtttccaacctggcagctgttggggacctgttgcactcaagccaggcttcactgacagcagccttggggttgcggcctgcacctgccgggcgcctctcccaagggagtggctcttccatcacagcagccggcatgcgcctcagccagatgggtgtcactacggatggtgtccccgcccagcaactgcgcatccctctttccttccagaaccctctcttccatatggctgccgatggaccagggcccccagcaggccatggagggagcagtggccatggtccaccttcctcccatcaccaccaccaccaccatcaccatcaccgagggggagaacccccaggggacacttttgccccgttccatggctatagcaagagcgaggacctctctacaggggtccctaagccccctgcggcctccatccttcacagccacagctacagtgatgagtttggaccctctggtactgattttacccgtcggcagctctcacttcaggacaacctacagcacatgctctccccgccccagatcaccatcggtccccagaggccagctccctcagggccaggagggggcagtggtgggggcagtggtgggggcggtgggggccagccacctcccttgcagaggggcaaatctcagcagttgacagtgagtgctgcccagaaaccccggccgtccagcgggaacctattgcagtccccggaaccaagttatggtcctgcccgtccacggcaacagagcctcagcaaagagggcagcattgggggcagcgggggcagcggtggcggagggggtggggggctcaagccctccatcaccaagcagcattcccagactccatccacgctgaaccccacgatgccggcctcggagcggactgtagcctgggtgtccaatatgcctcacctgtccgctgacatcgagagtgcacacattgagcgggaagagtacaagctgaaggagtactcgaagtccatggacgagagccgactggacagggtgaaggagtacgaggaggagatccactcactgaaggaaaggctacacatgtccaaccggaagctggaagagtacgagcggaggctgctgtcccaggaagagcagaccagcaagatcctgatgcagtaccaagcccgcctggagcagagcgagaagcgcttgaggcagcagcaggtggagaaggactcccagatcaagagcatcattggcaggctgatgctggtggaggaggagctgcgccgggaccaccccgccatggctgagccgctgcctgaacccaagaagaggctgctcgacgctcagctcctcatcaggtaattctcctggttccgctttgaccacgggcggaggacactgggggaggtgactccggaccactgcaggagaggcagcttccccccttgggtccaacaaacccgcgtgtgacgctggccccaccttggaacggcctggcccccccagccccaccccccccaccccggctgcagatcacagagaacggcgagttccggaacaccgcagaccactagcccacccagcatcacagacctccttccctgtgcaccctaccccggcccacccagcgtcacagacctccttcccagtgcacccgaccctggaacatcaccaaccaccaggactggacgtcaccaagggacagcgggattgtctcccttaacgcctccttggggcacgctctgtcaaccccactgctccattccaggagggagagtgggaccctcagctgccctctcaccccaggacaccacctaccccacacagaccccttcactctggggtgctatccccatcctctgcctcacagttcccctgagcactgggggacagaccctcacccccacactgggggtgtggcacctccaaactttcaacttcagggtgatttttttagcagtaaccagagctgacaatctataacccccctctaccaccccattttggcctcccctgccccccttgttatggggaggggaccccggg

SEQ ID NO: 575 - DNA, 4774 bp, Rattus norvegicus
gggaaaagaggaaagcccatctgtgggcaatgacctttaacccatctgcccctgatcaagccccttccttcccttgggtgagggacaggcaactgatcctccctgggccataggtattcatcatcggggaggttttactgaccctcttgactatggccccctgctgaccgccagtcccagccatgggcttaaggccccccaccccgaccccgtcagggggctccggttcaggttccttgccccctccttcccaccgccagcctctccgccgccgctgctcttcctgctgctttccgggggaataccacttgggtcgctcgaggaggaagagtgtcccsggggggaaacagtacagcatggaagccgcccccgctgcgcccttccggccctcgcaaggcttcctgagccggaggctaaaaagctccatcaaacgtacaaagtcacaacccaaacttgaccggaccagcagctttcgacagatcctgcctcgcttccgaagtgctgaccatgaccgggcccggctgatgcagagcttcaaggagtctcactcccatgagtccctgctgagtcccagcagtgctgctgaggccctggagctcaacctggatgaagactccattatcaagccagtacacagctccatcctgggccaggagttctgctttgaggtaacaacatcgtctgggacaaaatgttttgcctgtcggtctgcagccgaaagggacaaatggattgagaatctacagagggctgtgaaacccaacaaggacaacagccgccgggtagataacgtgctgaaactatggatcatagaagctcgagagctgccccccaagaagcgatattactgcgagttatgcctggacgacatgctctatgcacggaccacttccaagccccgctcagcctcaggagacactgtcttttggggcgagcacttcgagtttaacaacctgcctgctgtccgggcgctgcggctgcatctgtaccgtgactcggacaaaaagcggaagaaggacaaggcaggctacgttggcctggtgactgttccagtggccaccctggctgggcgccacttcacagagcagtggtaccccgtgaccctgccaacaggaagtgggggctctgggggtatgggctcggggggaggaggggggtcagggggcggctcagggggcaaagggaaaggaggctgtcctgctgtgcggctgaaggcccgttaccagacaatgagtatcctgcccatggagctatataaggagtttgcagaatatgtgaccaaccactaccgcatgctgtgtgccgtgctggagcccgccctcaatgtcaagggcaaggaggaggtcgctagtgcactggttcacatcctgcaaagcacaggcaaggccaaggacttcctttcagacatggccatgtcagaggtagaccggttcatggagcgggaacacctcatattccgcgagaacacgctcgccactaaagccatagaagagtatatgagactgattggccagaaatacctcaaggatgccattggggagttcatccgggctctgtatgaatctgaggagaactgtgaagtagaccccatcaagtgcacagcgtccagtctggcagagcaccaggccaacctgcggatgtgctgtgagttggccctgtgcaaggtggtcaactcccattgcgtgttcccgagggagctgaaggaggtgtttgcatcatggcggctgcgctgtgcagagcggggccgggaggacattgctgacaggctgatcagcgcctcgctcttcctgcgcttcctctgcccggccatcatgtcgcccagtctgtttggactgatgcaggagtacccagatgagcagacctcacgaaccctcaccctcatcgccaaggttatccagaacctggccaacttttccaagtttacctcaaaggaggacttcctgggcttcatgaacgagtttctggagctggaatggggttctatgcagcaattcttgtatgagatatccaacctggacacactgaccaacagcagcagttttgagggctacatagacttgggccgcgagctctccacacttcacgccctgctctgggaggtgctgccccagctcagcaaggaagccctcctgaagctgggcccgctgccccggctcctcagcgacatcagcacagccctgaggaaccctaacatccaaaggcagccgagccgccagagcgagcgcgctcggtctcagcccatggtgctgcgcgggccgtcagccgaaatgcagggctacatgatgcgggacctcaacagctccatcgaccttcagtccttcatggctcgaggcctcaacagctctatggacatggctcgcctcccctccccaaccaaggagaaacccccgccgccccctcccggtgggggtaaagacctgttctatgtgagccggccaccactggcccggtcctccccagcatactgcacgagcagctcggacatcacagagccggagcagaagatgctgagtgtcaacaagagtgtgtccatgctggacctgcagggcgacgggcctgggggccgccttaacagcagtagtgtttccaacctggcagctgttggggacctgttgcactcaagccaggcttcactgacagcagccttggggttgcggcctgcacctgccgggcgcctctcccaagggagtggctcttccatcacagcagccggcatgcgcctcagccagatgggtgtcactacggatggtgtccccgcccagcaactgcgcatccctctttccttccagaaccctctcttccatatggctgccgatggaccagggcccccagcaggccatggagggagcagtggccatggtccaccttcctcccatcaccaccaccaccaccatcaccatcaccgagggggagaacccccaggggacacttttgccccgttccatggctatagcaagagcgaggacctctctacaggggtccctaagccccctgcggcctccatccttcacagccacagctacagtgatgagtttggaccctctggtactgattttacccgtcggcagctctcacttcaggacaacctacagcacatgctctccccgccccagatcaccatcggtccccagaggccagctccctcagggccaggagggggcagtggtgggggcagtggtgggggcggtgggggccagccacctcccttgcagaggggcaaatctcagcagttgacagtgagtgctgcccagaaaccccggccgtccagcgggaacctattgcagtccccggaaccaagttatggtcctgcccgtccacggcaacagagcctcagcaaagagggcagcattgggggcagcgggggcagcggtggcggagggggtggggggctcaagccctccatcaccaagcagcattcccagactccatccacgctgaaccccacgatgccggcctcggagcggactgtagcctgggtgtccaatatgcctcacctgtccgctgacatcgagagtgcacacattgagcgggaagagtacaagctgaaggagtactcgaagtccatggacgagagccgactggacagggtgaaggagtacgaggaggagatccactcactgaaggaaaggctacacatgtccaaccggaagctggaagagtacgagcggaggctgctgtcccaggaagagcagaccagcaagatcctgatgcagtaccaagcccgcctggagcagagcgagaagcgcttgaggcagcagcaggtggagaaggactcccagatcaagagcatcattggcaggctgatgctggtggaggaggagctgcgccgggaccaccccgccatggctgagccgctgcctgaacccaagaagaggctgctcgacgctcagagaggcagcttccccccttgggtccaacaaacccgcgtgtgacgctggccccaccttggaacggcctggcccccccagccccaccccccccaccccggctgcagatcacagagaacggcgagttccggaacaccgcagaccactagcccacccagcatcacagacctccttccctgtgcaccctaccccggcccacccagcgtcacagacctccttcccagtgcacccgaccctggaacatcaccaaccaccaggactggacgtcaccaagggacagcrsgakkgtctcccttaacgcctccttggggcacccatctgtcaaccccactgctccattccaggagggagagtgggaccctcagctgccctctcaccccaggacaccacctaccccacasrgassmykkswstytggggtgcymycyycatsctctgkcccctgggggaggtaggacagggctgggcttccctctcaccctccccctcacccagtctccctccctcccgccagctccacgctttttcggtgtttyctgtacatagctctctggcggaacaggggaggtaggatggatggggtctgggtgggtaaaccatgaaggggagaaacccctcctgggtacccctcttctctgactgctgccctctacccagccttgtctcttcaccccttcttgcgtttggtattgagaattcttcccasactccakactcgacctttcttttgtatgaacagctctycttcaaacttacccctytacatacacccacccagccggggccaaatttatacttatataaaagttgtaaatatgtgaaattttatcccattccctctcctctgcttccctacatcaggccttacccttgtacctcctcccctc

SEQ ID NO: 576 - DNA, 3743 bp, Rattus norvegicus
cgggatccttgtggacaaactttgatggggaatttcacacagcgctggaaaaatgccggttatgaaaggattgctggcsccrcagaacacmttyctggacactattgccacccgtttcgacggaacacatagcaacttcatcctggccaatgcccaagtggcaaaaggtttccccatagtctactgttcagatggcttctgtgagctggctgggtttgctcgaactgaagtcatgcagaagagttgcagctgcaagtttctgyttggggtggagaccaacgagcagctgatgcttcagatcgaaaagtccctggaggagaaggtagagttcaaaggagaaattatgttctacaagaagaatggggctccattttggtgcctgttggatatcgttcctataaagaatgagaaaggagatgtggtccttttcctggcctcattcaaagatataacagacacgaaagtgaagattacttcagaagataaaaaagaagacagagccaaaggaagatcaagagcagggagccacttcgactcagcccgcagacggagccgagcagtcctttatcacatctcaggacacctgcaaagaagagaaaagaacaaattgaamataaataataacgtgtttgtagataaaccggcgtttccagagtataaggtttccgatgcaaaaaagtccaagttcatcctgctgcacttcagcacttttaaagctggctgggactggctcattttgctggcaacgttttatgttgctgtgacagtcccttacaacgtgtgcttcattggcaatgaggatctgtccacaactcggagcacaacggtcagtgacatcgctgtggagattctcttcattatagatattattctaaatttccgaacaacttatgtcagcaagtctggccaagttatctttgaagcgagatccatttgcayccactacgtcaccacctggttcatcattgatctgattgctgccctgccctttgacctcctgtatgctttcaatgtcacagtggtgtccctcgtacatcttctgaagactgttcggctgctccgtcttttgcgcctcctgcagaagctggaccgttattctcagcacagcacaattgtcctcaccctgctcatgtccatgtttgctctccttgcacactggatrgcmtgyatctggtatgtcattggaaaaatggagagggaggacaacagccttctcaagtgggaagtcggttggcttcacgagctgggaaagagactggaatctccgtactacggcaacaacacgctgggcggcccgtccatccgcagtgcctatatcgcagccttgtacttcactctcagcagcctcaccagcgtgggatttgggaatgtgtccgctaacacggatgcagagaagatcttctccatctgtaccatgttgattggagccctgatgcatgccttggtatttgggaatgtgactgccatcatacagagaatgtactctagatggagcctgtaccatactagaaccaaggacctaaaggacttcatccgtgtgcatcacctgccccagcaactcaagcagaggatgcttgagtactttcagacaacttggtctgtcaacaatggaatagattcaaatgagcttttgaaagactttccagatgagctgcgctctgacatcacaatgcatctgaacaaggagatcttacagctgtccctgtttgaatgtgctagccggggctgcctcaggtctctgtctctccatattaaaacctcattctgtgccccaggagagtatctgctgcgccagggagatgcgttgcaggccatctacttcgtgtgctcaggctctatggaggttcttaaagacagcatggtgttggctattctagggaagggggatttaattggagcaaatttatcaattaaagaccaagtgatcaagaccaacgctgacgtgaaggctctgacctactgtgatctacagtgcatcatcctgaaaggtctctttgaggtgctgggcctttacccagagtacgcacacaaattcgtagaagacatccagcacgacctcacatacaaccttcgagaaggtcatgagagtgatgtaatatcaagattatcgaacaaatctacagtcccacaggcagagcccaaggggaatggaagcatcaagaagagactcccatccattgtggaagatgaggaagaggaggaagtggaggaagaggagaccacctccctttctcccatctacacaaggggatcctctgtttcacacagcaaaaagactggaagcagtaagagctatctaggtttgagcttaaagcaactgacctcaggaacagttccattccactcacctatcagagtctccagtgccaactcccctaaaaccaagcaggaagctgacccacctaaccatggcacacggaaagagaagaatctgaaagttcagctctgcagcctgggtactgctggaaccccagagctcagtccgaggattgtcgatggaattgaagatggcaacagcagtgaggaaactcagacttttgattttggctctgaacaaatcaggccagagcccaggatttccccttcccttggagaatcagagattggagctgcgtttctgttcatcaaggctgaagaaaccaagcagcagataaacaagctcaacagtgaggtcacaacattgactcaggaggtctcccagctagggaaagatatgagaagcatcatgcaacttctggaaaacatcttgtcacctcagcagccatcacaattttgttctctgcatcccacttcaatctgtccttccagagaaagtttccagactagggtgagctggagtgctcaccagccttgcctacacttgcaggcaaatggagcacatctttaccatggcaatgtcacctctgacatctggagtgtcgacccctccttggtgggcagcaaccctcaacgaactgaagctcatgagcaaagtccagtagatagtgaactgcatcattctccaaacctggcttattccccctctcactgccaggttatccaagaaggccacttgcagttcctaaggtgcatctcccctcattcagataccacactgacacctttgcagtccatctcagccactctctcatcctctgtgtgctcctcatcagaaacatccttgcacctcgttctcccaagtaggtcagaggagggcagcatcactcatggacctgtgagttctttcagtttggaaaacttaccaggatcttgggaccgagaaggaatgatgtcagcctctacagaacccttggagaactttccagtagaagttgtcacaagcacagcggatgtaaaagacagcaaagccataaacgtataatatcagcacataagggcagctttcaatgccaaatccactgctgcatgacagctctagtttgcctttgtggcttctagcaggtgtggagcctgagcaaagttaggaattctgcaggaaagagggcaaggggccagtaaaaggcagagccacctctatactgtagcaaacaatttctagatcgtagaagcataaaaccttttctgtacaggtattaacttactggtctgattgacagactttggtaacaatcctatgacccagagggtctgagcagatagaaaccccagacaaagagtttggggattagttttgtcataagtggatttttttgtgaagtgcagcaaaggttttttttcctgagtgcctggttgtcattcctgaa

SEQ ID NO: 577 - DNA, 1056 bp, Rattus norvegicus
tacaaactggtctgctactacaccaactggtcccagtaccgggaaggcaatgggagctgcttcccagacgccctcgaccattccctgtgcacccatatcatctacagctttgccaacatcagcaacaacaagctcagcacatcggagtggaatgacgtaaccctgtatggcatgctgaatactctcaagaccagaaaccccagactgaagacactgctgtctgttggaggatggagctttggctcagaaagattttccaggattgtctccaacgctaagagtcgcaagactttcgtccagtcggtagctccctttctgcggacctatggctttgatggactggatctcgcctggctctacccgggcccgaaagacaagcaacattttaccacactgatcaaggaactgaaggcggaattcacaaaggaagtccagccaggcacagagaaactcctgctcagtgctgccgtgtcagcaggaaaggtgacccttgacagtggctatgatgttgcccagatagcccaacacctagatttcattaatctcatgacctatgatttccatggaacctggcgccacaccacaggacatcacagccccctcttccgaggccagcaggacactgggcctgacagattcagcaatgtggactatggtgtggggtacatgctaaggctgggagcccccaccaacaagctagtgatgggtatccccacctttggaaagagcttcactctggcatcttctgagaatcaagtgggagctccaatctcagggtcaggattaccaggccgctacaccaaggagaaagggaccctcgcctactacgagatatgcgacttcctcagaggagctgaagtacatagaattcttggccagcaggttccctttgctaccaagggcaaccagtgggtggggtatgatgacccggagagcgtcaaaaacaaggtgaagtacctgaagaacaagcagctggcaggagccatggtgtgggcagtggatttggatgatttccggggctccttctgtgggcataacgtacacttcccgctcacc

SEQ ID NO: 578 - DNA, 9286 bp, Rattus norvegicus
ctagtcctctttctataattcccaagacagaatggagtgtatcggaaacttctgttccactggaagatgaggttctaggcaaatctgatcaagatacccttgaacagacacatctagaagcaaccatgtctcctgaagctttgagtacaatagaagtcacacagggagaaacccaggaagaaccacaaacaccaggaatcccatttcctgctctcagttctactgcagttatgaccaaggagacaacagcatttgaagaagagggggaggggtcaacatataccctctctgaagacagattgatgacagattctgaaatagtcccaagtttagaaacaactccagttggtacatcttatccaggtggtgcaatgacacagcaggaagtagaaatggatacaatggtaacacagatgtcaagcattaggccaacagtagttttaagtactgagccagaagtaagttatgaagcagaaggtagtagtccaatggaatttgcatcgactttgaagccctttgggactcaagtcacacagcttgtggaagaaacgactgaggaagggaaaaagacacccttggattatacagatttaggttcagggttatttgaacaaccgagagttactgagctcccagatttttcaatgactccaagtgatatcagtgtcttcactgccatcgacagccttcacagaaccacacccttgaggccaccttcgccattcactgaggaaccacacatctttgagaaggagcccagtgagaaaacaacaggtgacataatacttcctagagaatctgtaacacagcaccctctgacaactctcatggatatcatagccaagaaaacagaatctgatattgatcacgagtatcacatgacctcaaagcctcctgtaatgcagccaacaagaccatcagttgtggaaagaaaaacaacttccaaacctcaagagttgtctacttcaccacccccggcagggaccaaattccaccctgacataaatgtttatattattgaggtcagagaaaacaagacaggtcgaatgagtgatatggttgtaaatggtcatccaatagattcagaatctaaagaagaggaaccttgcagtgaagaaacagatccactgcatgatctgtttgctgaaattttacccgagttaccagattccttcgaaatagacatatatcacagtgaggaagatgaagatggagaggaggactgtgtaaatgcaactgatgtaacaaccactccgtcagtgcagtacatcactgggaagccacatgtcactacagtgcccaaaaacccagaagctgcagaagcgaggcgtggcctgtatgaaagtgttgcgccttctcagaatttctcaaatacttccgcaactgacacccatcagtttataccggccgaaacagaattgtcaactaccatgcaatttaccaaatccaaagaagccactgaattgttagaaatcacatggaaacccgagacctaccctgaaacaccagaacacttttcaagtggtgagcctgatgttttccctacactgccatcccatgatggtaaaaccaccaaatggtcagagttcatcacagagagcaatccaaacacagaaaatccagaacacaaacaacctaagcctatacctctgtttcctgaagagttttcaggagagggtgccattgaccaagcatcccagcaaacaatcttttccagggctacagaagtagcacttggtaaagagacagaccaaagtcctaccatatctacctctagcatacgttcaggttctgtgtcagtacatgccttggaggaagatccaattgctctaacaggaatctcacagactgatgaatccatgtctactgtggaaagctgggtagagatgacccctagccaaactgtagagttctctgggagttcttcagctcctactattgaagggtctggggaagtagaagaatatacaaataaaattttcaacacggtaactgatttgccacagagagagcctacagatacgctcatccccttggatatgagcaacatcatgatcacagaccaccacatttatactcctgcaaccaccgctcctttggattcacagctaccttctacagatgcacggcctacacaatttggaattcaaaccaccacctctgagtgggtttccagtacatcttttgaaggaaggaaaacagaggaagacaaagaaagagatacaaatgcagcccacacaggggaagtccaaccagcgacagagaggtcagatcgcttactcttaacttcagaattagaaagttcaaatgtggctgcatctagtcctttggacacctgggaaggttttgtgccagagacaacatcaacagtgtccgaaaaggaaatggcaaacacaactcctgtttttacagaaacaagtgatgtagccaatttggagacacagtcttttgagcatagtagtagcagtcagcccagggtacaggaagagctgmccactctctcaggaaagccccccttgatttytatggacctgggttcaggagatgctagtactgatatggaattcatcactgcttcttcatttacattagatttggagtccgataccaaagtcaaaaaagaattacccagtactctgtctcccagtgtggagacttcatcctcctctgagccaataggattagctccgagtactgtattggacatagaaattgtggaagttatgaatcagacatccaagaagacactgatttctgaactatcaggaaagccaacctcccaagcagaagtaagggatttatatccaggtctgggagaagattttagtggtgactccagtgaatatccaacagtgtcttctacaacaatgaaagaggaaacagtggggatgggaggctctgagaatgaacgagttaaggatacacagactttatcatctataccacctacctcagacaacatcaacccagtgcctgactcaaaaggattcggcmgtactgtggccagcaccacagccttcccttgggaagagttcatgacctcagctgagggctcaggtgaggagctgtcctcagtcaggagctctgttagtctagtgcttccactaggtgtggacattcttcctactacagagtctccatattttgatcaagagtttgaagaagcggctgcagtgacagaagcaggtaaacaatctgctttgccaatagcagtgagtggaaatactgtagatctgacagaaaacagggacatagaggtaaacagcacaatgtcagtagaccttccccagacaatggagccagccaaattatggtctaaaccagaagtcaatcctgaaaaacaagagattggaagcgaaacagtgacacaggataaagctcagggacaaaagtcttttgaatcgctccacagttctcttgcaccagaacaaacaactttggaaagccaatcacttattgaaactgaagtccaaacttcatattactctatgttaacaacaatgaaaacatacaatactaatgaggaagtggaggaggaaggcacgtccatagctcatatgtctactccaggccctggaatcaaaggcttggaatcatatcctacccatcctgaagctactgggaagtcatactctttctcagcttctgccttagtgactgaatctggaccagctagaagtgtagtcatggattcctcaactcaagaggaagaaagtataaaactcttccaaaaggacatgatactaacacataaagagtcaaattctgatctctcgttctctggcctgggatcaggagaggctttgcctcctctccctacaacatcagtgagtttgactgacatgggaaagatcaatagcacattgtatcctgagacatctcacatggaaagcttaggaacaagcatcttaggagataaccatgaaagaatgaaaaatgtgtcaaatgaagttagaacccttatttccgaaacaggcagcatttctcaagacagtacggaggcacccaatacaactttgagtgataccagaacagaagaatctacaacttcacctcttcctttcatgaagctcatggacacggaacattctccaaagcagaccctcaggtgggaagaggaaatccagacccataggccacaaactatgactggacagatgaccaatgacaattcttcagtgtcagaagctgaagcagcagcaacctctgcccctgctttcctgcctgaaacctacagtgttgaaatgaccaaagcctttgctacatcaccgtcacaaacatctgacttgtttgatgcaaattctggagaaggatctggagaagtggatggtcttgacttagtgtacacttctagaactactcaggcaagcagtcaaggagacagcatgtttgcctctcatggattcattgaaaagcatccagaggtgtcaaggaccgagactggagctactgatggatctccaacagcttcagcgatgttcctgcatcagtcagagtacaatgagagttccctgtatccaaccagcacactgccaagcacagtgacatatgagagtccctcagaaggtattgcagatggtttgcaagaccatatcagattcgaagtttctaccttgaaacctagcagaaggaaagccactgagagcgttattatagatctagacaaagaggatagtaaggacttagggttggcaattactgagagtgctattgttgaaattctccctgagctgacatcagatagaaatattattatagacattgatcacactaaacctgtatatgagtacatccctggaatacaaacagacctagattcagacataccattgggatcacatggcagtagtgaagaaagccttgaagttcaagagaagtatgaagcaactattaacctgtctccaactgaggaagcatttgacggctctggtgatgcacttcctgctggtcacactcaagcgatatacaatgagtctgtgactcccagtgatggaaagcagccagaggacataagctttagttttgcaactggaatcccagtttctagcacagagacagaattaaatactttcttccctacagtgtcaaccctgcacattcctagcaaactaaccaccgctagtccagagattgataaacccaacattgaagcaatatcactggatgatatatttgaatcaagcaccttgtctgatggccaagctattgccgatcagagtgaagtaatatcaacactaggccatttggaaaagacacaggaagagtatgaagaaaagaaatatggaggtccttcttttcagccagaattcttttcaggagtgggggaagtattcacagatgcccctgcttatgtaagtattggtaggacatactctgtagctcagcctttaacagaattccccaatgtggtaggacaatctgactccacacattacactgaagcaacatctgcagtttcctctgtgacagagctgtctcctcagacaccatcttctccctctcctgtctacatagacagtggagtctctgaattcacagaggtcccccacaaaagtgctcagccagctcctactgccgcttcatcacaaaagttgatagagggttcttttaagaaagtgcgtgctaatattgaagctaccatcaagtcgctgggtgaaaatgatcacggaacagagtctccatccatgtctcctagccctgctttagacatttcagaagacgacagtaaacctaagttactagaagacctggaaacttctcccacaaaaaccgagacttcccaagattccccaaacaaagcaaatgatcaaattccaggaaaaacagctggaatccttgctggtatcaaaacaacagagagtggaccagtcgttacagctgcagatgacatggagctaggagatgccacacagcggccacattctgcttctgctcctgcagctttcagggttgagacaagtatggtacctcagcccatcccacaggagcctgagaggccaacctttccttccctggaaattaaccatgaaacacacacatcattatttgaagaatctatattggcaacatctgagaaacaagtgtcccaaagaattcttgattacagtaaccaggcaacagtcagtactctggatctaaatactgaacactcaataccaccattttccattctggacaattctaacgaaactgctttcctgattggcattagtgaagagaccgtggaaggcacagcagtttatctaccaggacctgatctctgcaaaacaaacccatgcctcaatggaggcacctgctatcctactgagacttcctatgtgtgcacctgtgcacctggctacagtggagaccagtgtgaactggattttgatgaatgtcactctaacccttgtcggaatggagccacctgtgtggacggtctgaatacatttagatgcctctgccttccgagttatgtcggtgcactctgcgaacaagacactgagacatgcgactatggctggcacaaattccaagggcaatgctacaagtactttgctcatcgccgtacatgggatgcwrytcgrmasggagtgtcgcctgcagggtgcccacctcacaagcatcctttctcatgaggaacaaatgtttgtgaatcgtgtgggccatgattaccagtggattggcctcaatgacaagatgtttgaacatgacttccgctggactgacggcagcgcactscaatatgagaactggagacccaaccagccagacagcttcttttctgctggagaagactgcgttgtgatcatttggcatgagaatggccagtggaatgacgtcccctgcaactaccacctcaccyacasstgcaagaagggaacagttgcttgcggccaaccccctgttgtagaaaatgccaagacctttggaaagatgaaaccacgttatgaaatcaactccttgattagataccactgcaaagwtggtttcattcagcgtcaccttccaactatccggtgcctaggaaatgggagatgggcaatgcctaaaataacctgcatgaacccatctgcataccaaaggacttattctaagaaatacttaaaaaattcctcatcagtcaaggacaattctataaatacgtcaaaacatgagcatcgctggagccggaggtggcaggaaacgaggcgctgatcctaaaatggcgaacataagcttcattcatcatttcagccaaagccctgcctttccgtgcctttcctatcacctcaaggagaattagcagttggtttggattttgggactgccgtctggtcatttggggtggctgtmytcstrmmrwattttcaatgaaacatggaattttgaaaaaaaaaagcgaataaaatgaaagaaaatgagcgaagaagawaammawwwwmarcctatctaatttctttagttctctctctgcctccagtgcagactgtttcctgtacaccagcctactgtactatttaaaaaacaaaacaaaacaaaacgcaatatcagcaccgatggccatgtaaataagatgatttaatgttgattttaatcctgtatataaaataaaacgtcatacttggttcaggcatatttaatgatgattacggagctttcaaggtcttcgatcattggcttggctgctttgcttaggctggaaatggttttgtctaccctttgactgtcagcaagtttgaggacggcttttctggacaaccggcaaacagaatcttgcaggtctctgcacgcatgtcagccacgggagtcacgctgatgcctggctgataaaactctcggagctccagggtgtaactcggctttgccgtgttccttttccttcacttacacgaagcgcctgaatggaggacttttctatgacctgggacatttttttaggggtcaaattgctaattattaactcaaccaggtttcccttacaatggctttcttaacactaacgctggtaaggtatttggaatggatatagaccaagggttgtggagggtgggggaggagggttttcttaaaacaacactcgtgcaaaaaaatttttttgtacatataaccattttaatcctttataaaaattttgaatgttcatgtatgaatgctgcagctgcgaagcacacgtaaataaatgaagtaagccatacggatttaatttattggatgttatttttcccaagacctgaaatcaatgtagtatgctagtaatttttcagtgttagcttttctattttcttcacagtttgataccttataatataggtactcccttcccgtttcagtaatgtgacggatagaacgcaccaagtgtttattacggagaatggaaacgtgcttagctacccataaatggtgtttgcccattccaagcaagcgtgtaaatgtagaatagcattgctcactgttaggtggcgtgtacgtgttaaagttttgcttctctcttcccagccatttaccccttgcatttgaataatgattgctgaatcattatctagctattttaaggctcaaggttaaaactgctcrkssrmaaaggywtttaaggctcatccattcccttcacttmcaacaacttacagaaaaattacgrgtaaaatgtgaatagaaaccmgcttcaatwtgacmcaatgaaaacaagcacggaaccmtcgtgaggtktcccataagtatgggcggactttatkttttatwccaggtaaatactcaacgaagagtwgaggaagagcagactggggttggtcctatgttgactgtttctcacagaaccttcyttggcttagagggaatgactdtgctcacaagcryacgtagkgtcttaggcgasgtctttsgactaggcmgtaagttwgtcaatcctgatgtgttytagggcacagaaaatcactgtgttgacttactagggctktttactttttcattacagtgcacataatacttccctgtatttatattatdacatgtatagtgtaaaatgtgaatgactttttctttytktgaatgaaaatytaaaaaaatctttgtaactttttatatctgcttttgtttcmccaaagaaacctaaaaaytcttcttttamhwmmwwraaaaaaaamaaaaaaaamstkwgcggcckcrwgcttattccctttagtgagggttaattttagcttggcactggccgtcgttttacaacgtcgtgactgggaaaaccctggcgttacccaacttaatcgccttgcagcacatccccctttcgccagctggcgtaatagcgaagaagcccgcaccgatcgccctt

SEQ ID NO: 579 - DNA, 1448 bp, Rattus norvegicus
gaattcgcggcgcgtcgacctcaagaggcagaggcacatagagaaaccctatcttgaaaaacgggggagggagaaacaggggcagaatgaaaaagggaggaaggaagaaaggaaggaatgagaaagaaaagtggaaataagtcacgtataaaacgagagttaaagcctacgtcatggggttggggatttagctcagtggtagagcgcttgcctagcaagcgcaaggccctgggttcggtccccagctccggaaaaaaaaaaaaaaaagaaaaaaaaaaaagcctacgtcatcctgtctccacttagctctgccgggtcatctgaaaaccacgtggtctatttagctggagtttccggtgacctcgccccaccttcaaactcagtacttgtgcattggctgaagtattttgtcccttgggaggacccgtagctccagcctcccggtgtccgtagccgggaaacctggcgtccggcgttttaggctgaggtccgcgatgtcgagtgaggaagtccggcaccgggcagagtcctctgaggcccgtgcggccgcggtcagcgacatccaggagctgatgcgacgcaaggaggaaatcgaggcgcagatcaaggctaattacgacgtcctcgagagccaaaaaggaattggcatgaacgagcctctagtggactgcgagggctacccccgggcagatgtggatttgtatcaggtccgaacagcaaggcacaacatcatctgtctccagaatgatcacaaggcactgatgaagcaggtggaggaggccctacaccagctacatgctcgggacaaagagaagcaggctcgggacatggctgaagcccgagaagaggccatgaaccgtaggctggcctcggacagtcccgccctacccaaggcctttgccagagtgaacagtatcagccctggttccccagccagtattgcgggcctgcaagtggatgatgaaattgtggagttcggctctgtgaacacccaaaacttccagtctctgcagaacgtgggcwctgtggtgcagcacagcgaggggaagcccctgaatgtcatggtgatccgcagaggggagaagcaccagctcagactgactcccacccgctgggcaggaaaaggwctgytgggmtgcaatattacccctctccaaagatgactgcttcctgggagctgcaggagagcttcttcagctgggcccgcgcttggcctgggggatttcctcattctctcggctccctcaagtgtaaggatctggaagagagtggcggacgcctgagcgtcgaggtggaagagacgctttggctgcctgatgtagtctctgggttgaggcattattaaaaatgtggtttgtgcttarmwawaaaaaaaaaaaaaaaaaaaaaaaaaaaaaaaaaaaaaaaaaaaaaaaaaaaaaaaaaaaaaaaaaaaaaaaaaaaaaaaa

SEQ ID NO: 580 - DNA, 2669 bp, Rattus norvegicus
atggcaatccagttccgctcactcttccccttggccttgcctggaatgctagcactccttggctggtggtggtttttctctcgtaaaaaagatcggctcagcagcaatggcaagcaggtggggacattgaaggttggccctgccatcgaggaccgactgcccactgaagaggcctgtcctggagtcctgtctgtgacccccagtgtcacacagcctcctggaaaggaagagcagcgctctatggacaggcctctttcagatcccccagccttgccaaggacccgtcaagttcgccgaagatcagagtcctcaggcaacctccccagcattgtagacacaaggttgcaggcaggacagtgcagcgatgagaattcaaaagtggtactctccctgatgggggacgaagccaaatctattcctcttggacgtccgcttttcccaaaggatctgtccttcccctatgaagcagtggaagggtgtaagcaagagtctgccctgggcagaactcctgggagaggctggctaagccagtgtgcagcctctggagagaacgcgagagagacgggtggggcggaagggactggagatgctgtgttgggggaaagtgtacttgaggaaggcctattgccccaggagtgtgtttcagaagtagagaagagtgagtttccgatcctagctcccgggggaggcgggggagagaaggtgagaagtggcccaccacaggtagatgagcttttaaagaaggaagaatatattgttgggaagttgccaagtagctttgtggggccagttcactcggagctggttaaggatgagggtgcgctggtaccccaagtcaaaggtagccaggacagaagcctggctagagaactggacaaagacaagaccttgcctgaaaaggaccagattgagcagactgccttccagatcatctcccaggtgatcttggaagcgactgaagagatacgggccaccacagtgggcaagactgtggcacaagtgcatccaaccccgggcactcagcctcaggggcaggaggagagctgtgtcccagccagccaggaaactagcttgggacaagaaatcccagatcctgcttccaccagaacaggtgccactgccagcccttcagcaggagccccaccaccaaagacctatgtgagctgtctcagcagtcctctgtcaggccccaccaaggaccagaagccaaagaactctgcacaccacatctccctggctccctgcccaccgccagttaccccccagaggcagtctctggatggggcaagtaacccgagaggtgatgacacctttgtcacctgtacgtccaacaacagccagagtgtcctttcagttacctccttggggctgtgctcagaccctgtcagtacttcgaggcttgaagactcttgcacagagaccatctcaagctccggagacaaagctgtcaccccaccactgccagacagtactgagcccttcagcaatggggtgctgaaggaggagttgtcagacttggggaccgaggatggatggaccatggatacagaagcagatcattcaggaggttctgacgggaacagtatggattcagtggatagctgttgtgggcttacgaaacctgatagcccccagactgtccaggcaggctccaaccctaagaaggttgacctcatcatctgggagatcgaggtgccaaagcatttagttggtcgactgattggcaagcagggacggtacgtgagttttctgaagcagacgtctggtgccaagatctacatctccaccctgccttacacacagaacatccagatctgccacatagaaggctctcagcatcatgtggacaaagctctgaacttgattgggaagaagtttaaggagctgaacctcaccaatatctatgcaccaccgctgccttctctggcactgccttccctgccgatgacatcgtggctcatgctgcctgatggtatcactgtggaagtcatcgtggtcaaccaggtcaatgctgggcacctatttgtacagcaacacacacaccccaccttccacgcactgcgcagcctggaccagcagatgtacctctgttactctcagcctggaatccccaccttgcccaccccagtggaaataacggttatctgcgctgcccctggtgcggacggggcctggtggcgagcccaagtagtggcctcctatgaggagaccaatgaggtggagattcgctacgtggactatggtggatataagagggtgaaagtcgacgtgctccggcaaattaggtctgactttgtgaccctgccattccaaggagcagaagtccttctggacagtgtggttccgctgtcagatgatgatcacttttcacccgaggcagacgcagccatgagtgagatgacaggcaatacagcactgctggcccaggtgacaagctacagtgcractggccttcctctgattcagctatggagtgtggttggagatgaagtggtgttgataaaccggtcgctggtggagcggggcctggcacagtgggtagacagctgctatgccagcctttgaccgtggctcctgggctgcttcggtcttctttgcactgttgagaktgggtytrgmacccaggacagagatttaacagcagagtaacgaaaaaaaaaaaaaaaaaa

SEQ ID NO: 581 - DNA, 471 bp, Rattus norvegicus
ctcctgtgaggaatctctcatcctcaagggggaaacatgaccactttagccaacttgacgcagaccctggaggatgccttcaaaaaggttttcattacttatatggacagctggaggaggaacacaacagccgaacaacaggcgctccaggccagagtggatgccgagaacttctactacgtcatcctgtacctcatggtgatgatcggcatgttcgccttcatcgtggtggccatcctggtgagcacggtgaagtcgaagcggcgggagcactcccaggacccgtaccaccagtacatcgtggaggattggcagcagaagtataggagtcagatcttgcatctggaagactccaaggccaycatccatgakaacctgggggcgacggggttcacagtgtcaccctgataaagaacgagagtccatctgcccaggaaggggtgcttctgccgccttgaagccccacttgcc

SEQ ID NO: 582 - DNA, 1007 bp, Rattus norvegicus
ccgcctcgccgccgagactagaagcgctgcgggaagcagggacagtggagagggcgctgcgctcgggctacccaatgcgtggactatctgccgccgctgttcgtgcaatatgctggagctccagaacagctaaacggagtcgccacaccactgtttgtgctggatcgcagcgctgcctttccttatgaagaagacacaaacttggattatcacttgcatttatcttcaactgctcctatttaatcctctcgtcaaaactcaggagatctgcaggaatcctgtgactgataatgtaaaagacattacaaaactggtggcgaatcttccaaatgactatatgataaccctcaactatgtcgccgggatggatgttttgcctagtcattgttggttacgagatatggtaacacacttatcagtcagcttgactactcttctggacaagttttcaaatatttctgaaggcttgagtaattattccatcatagacaaacttgggaaaatagtggatgacctcgtggcatgtatggaagaaaatgcacctaagaatgtaaaagaatcactgaagaagccagaaactagaaactttactcctgaagaattctttagtattttcaatagatccattgatgccttcaaggacttcatggtggcatctgacactagtgattgtgtgctctcttcaacattaggtcctgagaaagattccagagtcagtgtcacaaaaccatttatgttaccccctgttgcagccagttcccttaggaatgacagcagtagcagtaataggaaagccgcaaagtcccctgaagacccgggcctacaatggacagcaatggcactgccggctctcatttcgcttgtaattggctttgcttttggagccttatactggaagaagaaacagtcaagtcttacaagggcagttgaaaatatacagattaatgaagaggataatgagataagtatgttgcaacagaaagagagagaatttcaagaggtgtaat

SEQ ID NO: 583 - DNA, 749 bp, Rattus norvegicus
gcctttccttatgaagaagacacaaacttggattatcacttgcatttatcttcaactgctcctatttaatcctctcgtcaaaactcaggagatctgcaggaatcctgtgactgataatgtaaaagacattacaaaactggtggcgaatcttccaaatgactatatgataaccctcaactatgtcgccgggatggatgttttgcctagtcattgttggttacgagatatggtaacacacttatcagtcagcttgactactcttctggacaagttttcaaatatttctgaaggcttgagtaattattccatcatagacaaacttgggaaaatagtggatgacctcgtggcatgtatggaagaaaatgcacctaagaatgtaaaagaatcactgaagaagccagaaactagaaactttactcctgaagaattctttagtattttcaatagatccattgatgccttcaaggacttcatggtggcatctgacactagtgattgtgtgctctcttcaacattaggtcctgagaaagggaaagccgcaaagccccctgaagacccgggcctacaatggacagcaatggcactgccggctctcatttcgcttgtaattggctttgcttttggagccttatactggaagaagaaacagtcaagtcttacaagggcagttgaaaatatacagattaatgaagaggataatgagataagtatgttgcaacagaaagagagagaatttcaagaggtgtaat

SEQ ID NO: 584 - DNA, 1078 bp, Rattus norvegicus
gcaagccagtgttaggaagtcgccccgtgatcgcgccgccttgggtttttctgttctttttttctctgtttatgtgcaaagctgccagcagcccatagaaacatgaccaccaatatgctccccttacacccgtactggcccaggcacctgagactggacaacttcgtgcctaatgacctcccgacttggcatatcctggttggcctattctccttctctggggtcctaattgtgatcacgtggctgttgtctagccgagkttctgttgtcccacttggaactgggcgtcgactggccctgtgctggtttgctgtgtgcacattcattcaccttgtgatcgagggctggttctctttctaccatgaaatccttctcgaagaccaagccttcttatcccaactctggaaagaatattccaagggagacagccgatatayccttagtgatggcttcatcgtctgtatggagaktgtcacagcttgtctctggggaccactcagcctatgggtggtgatcgcctttctccgtcatcaacccttccgctttgtcctacagcttgtggtgtctgtgggccagatatatggggatgtgctgtacttcctgaccgarcyccgcgatggattccagcakkgwkagswaggtcaccccctttatttctggttytacttcgttatcatgaatgccatatggttggtgataccgggcatccttgtgtttgatgccatcaagcatctcacaaacgctcagagcatgctggacaacaaagtcatgaaaattaagagcaagcataactaaagagacggagagtgagctgagacctgtctgaggaggcgctctccccgcttaccagaagactcgaatcctcctcctcctcttcctccttctcctcgaacagttttggagggtcagagmtatgggatttgccacactcaaaggsccagagtcagaaaagrtagggaacatgcggagstastsccagggmccmtagagaaagggtggaagagaagatgggaagtccctgtccaaaaccaggaaataaaacgtcttwwmstwwdwmamwraaaaaaaaaaaaaaaaa

SEQ ID NO: 585 - DNA, 918 bp, Rattus norvegicus
gcgatctgtgggtgacagtgtctgcgagagactttgccataccattttgcgggaatttggagagaaacaaccagctgcttccagtcccctccccctccgccaccatttcggacaccccgcacagactcgttttggggtaccctgtgacttccaggaagcacgcgaggtcctttggccccagctcgggcgaccacctgtcttggacgtgttgactcatctcccatgaccctgcggtgcctggagccctctgggaatggcgcggacaggacacggagccagtgggggacagcggggtcgccggaggatcagtccccggaggcggcgcgtctggcgaaggccctgcgtgagctcagtcaaacaggatggtactggggaagtatgactgttaatgaagccaaagagaaattaaaagaggcgccagaaggaactttcttgattagagatagctcccactcagactacctattaaccatatctgttaagacatcagccgggccgactaacctgcggattgagtaccaagacgggaaattcagattggattctatcatatgtgtcaagtccaagcttaagcagtttgacagcgtggttcatctgattgactactacgttcagatgtgcaaggacaaacggacaggccctgaagccccccggaatgggactgttcacctttacctgaccaaacctctgtatacatcagcaccgacgctgcagcacttctgccgactcagcattaacaagtgtaccggtaccatccggggactacctttaccaacaagactgaaagattacttggaagagtataaattccaggtataagtatttctctctctctctctctttttttttttttttaaatgaatgcctcatatagagtatcaccgaatgcagctatgtgaaagagaaccagaggccctc

SEQ ID NO: 586 - DNA, 4803 bp, Rattus norvegicus
gagaaagctctgtagtagacagagtgactacaggagaccctgggttcaaaggtggtagggtagagaggtggacctaacagaagaaaaaaagaaaaaaagaaaaagaaatgcaatctcaacgtcaacctcatgctgggccaggctcaggagtgcctgttggagaagtccatgttggacaaccggaagagcttcctagtggcccgcatcagtgcacaggtggtcgattactataaggaggcatgccgggccttggagaaccctgacactgcgtccctgctgggccgcatccagaaggactggaagaaactcgtccagatgaagatctactacttcgcggctgtggctcatctccacatggggaagcaggctgaggagcaacagaaatttggggaacgggtggcctacttccagagtgccctggacaagcttaatgaagccatcaagttggccaagggccagcccgacactgtgcaagatgcacttcgttttgctatggatgtcattgggggaaagtacaattctgccaagaaggacaatgactttatctaccatgaggctgtgccagcactggatacccttcagcctgtgaaaggagcccccttggtgaagcccttgccagtaaaccccacagacccagctgttacaggtcctgatatctttgccaagttggtacccatggctgcccatgaggcctcatcactgtacagtgaggagaaggccaagctacttcgggaaatgctggccaagattgaagataagaatgaagtcctagatcagttcatggactccatgcagcttgaccctgacacagtggacaacttggatgcctacaaccatatcccaccccagctcatggagaagtgtgcagcactcagtgtccggcctgacactgtcaagaaccttgtccagtctatgcaggtgctgtccggggtgttcacggatgtggaggcctccctgaaggacatccgggatctactggaggaagatgagctgcaagagcagaaattgcaggagaccttgggccaggctggggctggccctggcccttctgttaccaaggctgagctcggagaggtgaggcgagaatgggccaagtacacggaagtgcatgaaaaggcttccttcaccaacagtgagctgcatcgtgctatgaatctgcacgttggtaacttgcgcctgctcagtggaccactggaccaggtgcgcgctgccctacccacaccagccctcaccccagaggacaaggctgtgctgcagaacctaaagcgcatcctagccaaggtgcaggagatgcgggaccagcgcgtgtccctggaacagcagctccgagagctgatccagaaggatgacatcactgcctccctggtcaccactgaccactcagagatgaagaaactgtttgaggaacagctgaagaagtatgaccagctgaaggtgtacctggagcagaacctggctgcccaggacaatgtcctccgggcactgaccgaggccaacgtgcagtatgcagcagtgcggcgggtgcttagtgaactggaccaaaagtggaactccacactacagaccctggttgcatcctatgaagcctatgaggacctgatgaagaagtcccaggagggcaaggacttctatgcagacttggaaagcaaggtagccgccctgctggaacgggcacagtctctctgccgtgcccaagaggccgctcgccagcaactcctggacagggagctgaagaagaaggcaccaccacctcggcccacagccccaaagccattgctgtcccgccgtgaggagggagaggccgcagaggctggagaccaacccgaggagctgcgcagcctgccccctgacatgatggctggcccacggctgcctgacccattcctaggaactgctgcccctctccacttttctcctggccccttccctggttccacaggcccagcaacccactatctctcaggacccttaccacctggaacctactcaggccccactcagctgatgcagcctagggctgcagtgcccatggcccctggacctgtcctctacccagcccctgtctatacatcggagttgggccttgtacccagatcctctccccagcatggaattgtaagcagtccctatgcaggggtagggccaccccaaccaatcgtaggtcttccctctgctccaccaccccagttctcaggacctgagttagccatggacgtccggccagctaccactacagtagatagtgtccaagcccctatctctagccacatggcactacggccaggccctgccccagctcctccccagccttgctttccagtgcctcagcctgtaccccaatctgttccccagccgcagcctctgcccacaccctatacttattctatagggaccaagcagcacctcacaggccctctaccacagcatcactttcctcctgggatccctaccagttttcctgcccccaggattgggccccagcccccacctcagcttcagccccagccccagccccagccccagccccagcctccgcctcagccccagccccagccccagccccagccccagccccagccccagccccagccccaacggccagtatttgggccacaacccacacaacagccccttccattccagcatccacatctcttcccatctcaggccccagggattctcacaccaccacccccctacccttttactcctcagcctggtgttttgggacagccaccacccacccggcacacccagctctacccaggcccacctccagacactcttcccccacactcaggggctctgcctttcccgagccctgggcctcctcatcctcaccccaccctggcatatggccctgccccttcccctaggcccctgggtcctcaggcaacccctgtctccattcgaggtcccccaccagccaatcagcctgcccctagtccccacttggtgccttcacctgccccatcgccagggcctggcccagtaccttcaagacccccaacagcagagccaccaccatgtttgcgccgaggtgctgcagctgcagacctgctgtcttccagccctgagagccagcatggagggactcagcctcctgggggcgggcagcccttgctgcagcctaccaaggtagatgcagcggagcggccgacggcacaggccctgcggctaattgagcaggacccctatgaacatcctgagaggctgcagaagttgcagcaggagctggagagctttcggggccagctgggggatgcaggagcactggatgctgtctggagagagttgcaggaggcccaggaacacgatgcccgaggccgatccattgccattgcccgctgctactccctgaagaaccggcaccaggacgtcatgccgtatgacagtaaccgtgtggtgctgcgctcaggcaaagacgactacatcaatgctagctgtgtggaggggctctcgccatactgtccacccttagtggccacccagcgtccgctgcctggcacagctgcagatttctggctcatggtgcatgaacagaaagtgtccgtcattgtcatgctggtgtctgaggctgagatggaaaagcaaaaggtggcccgctacttccccattgagaggggccagcctatggtgcacggggccctgagcgtggccctgagcagtgttcgtactactgatacccatgtggagcgagtactgagcctgcagttccgggatcagagcctcaagcgctctctcgtgcacctacacttccctacttggcctgagttaggcctgccagacagccctggcaatctgctgcgcttcatccaggaggtgcacgcacattatttgcaccagcgacccctgcacacacctattgtcgyacaskgcagctcgggggtgggccgcacaggagcctttgcgttgctgtatgccgccgtgcaggaggtagaggctgggagtrggattcctgagttgcctcagctggtgaggcggatgcggcagcagaggaaacacatgctgcaggagaaactgcacctcaaggttctgccacgaggcattggtgcgacatgtggagcaggtcctgcagcgccacggcgtgccgcctcctggcaagcctgtggccagcatgagcgtcagcyagaagagccaccttcctcaggactcccaggatctggtccttggtggagacgtgcccatcagctccattcaggctaccattgccaagctcrcatccggcccctgggtggcctggattcccccgctgccagccttcccagccttgtagagcccccaggtcttccaccagctagccttccagagcccacccctgccccaccttcctcgcctccccccccctcttcccctctgcctgaacccccccagccagaggaggagccatcagtgcctgaagcccccagcttagggcctccctcgtcatccctggagctgttggcctctctgactccagaagcattttccytggacagctctttgcggggaaagcagcggatgagcaagcagaactttctgcaggctcacaacgggcagggtctcagggctgcccaacctacggatgaccccctcagcctcctggatccactctggacacttaacaagacctgagaaggctttgcctgtytggtccttacactacacctcccatccctgctgccttcagctgtgccagatggagatgcacttcaggcctcagtcaggctytgctccttcctttgcggaacctgacatttttccagccctgggctattgacataataaacttactctgtgrmmarwraaaaaaaaaaaaaaaaa

SEQ ID NO: 587 - DNA, 4584 bp, Rattus norvegicus
cctcgtgccggcaacgagagccttcgagatcttctccgcccccactaccggcgcctcttctgcggccgtggagccggagccggcctgagcggtagaggcccgtctttttcaaggacccaagcatcctcgtggacggtcgtccggcttcgcccgcccagccgcggtgctccatcagcccacgcggcgcgccctctycacgcgccaaccccgtcgggttccgtgtgcagtgtcggcggccggccctgggcccgagcccgagcagtagccggcgccatgtcggtggtgggcatagacctgggctttcagagctgctatgtcgctgtggcccgcgccggcggcattgagacgatcgctaatgagtatagcgaccgctgcacgccggcttgtgtttctttcggtcctaagaatcgttcagttggagcagcagcaaagagccaggtaatttccaatgccaagaacacagttcaagggtttaaaagatttcatgggcgtgcattctcagatccatttgtggaagcagaaaaatctaaccttgcatatgatattgtacagttgcccactggattaacgggcataaaggttacatatatggaagaagagaggaattttaccactgaacaagtgactgccatgctcttgtcaaaactgaaggagacagcagaaagtgttcttaagaagcctgttgtagactgtgttgtttcggttcctagtttctacactgatgcagaacgacggtcagtgatggatgccacacagattgctggtctcaattgcttgcggttaatgaatgaaacaactgcagttgctcttgcttatggaatctataaacaagaccttcctgccttagaagaaaaaccaagaaatgtagtttttgtagatatgggacattctgcctatcaagtttctgtatgtgcatttaatagaggaaaactgaaagttttggccacagcttttsatrcawsattgggaggcagaaaatttgatgaggtgttggtaaatcacttctgtgaagaatttggaaagaaatacaagctagacataaaatctaaagttcgtgctttattgcgactctctcaagagtgtgagaaactcaagaaattaatgagtgcgaatgcttcagacctccctttgagtattgaatgctttatgaacgatattgatgtatcgggaaccatgaatagaggcaaatttttggagatgtgtgatgatctcttagcaagagtggagccgccacttcgtagcatcttggaccaatccaagttaaagaaagaagatatttatgcagtggagatagttggtggagccacacggatccctgccgtgaaagagaagatcagcaagttctttggtaaagaactcagcacaacattaaatgcggatgaagcagtcactcgaggctgtgctctgcagtgtgcaatcttatcacctgctttcaaagtcagagaattttctatcactgatgtggtaccatatccaatatctttgaggtggaattctccagctgaagaggggtcaagtgactgtgaagtcttccccaaaaaccatgctgctcctttctccaaagtcctcaccttttatagaaaggaaccgttcactctggaggcctactatagttctcctcaggatttgccctatccagatcctgctatagctcagttttcagttcagaaagtcactccacagtctgatggctccagctcaaaagtgaaagtcaaggtccgggtaaatgtgcatggcattttcagtgtgtccagtgcggccttagtagaggtgcacaagtccgaggagagcgaggagccaatggagactgatcagaatgcaaaggaagaagagaagatgcaggtggaccaggaagaaccacatactgaagagcaacagccacagacaccagcagaaaacaaggcggagtctgaggagatggagacctctcaagctggatcaaaagataaaaagatggaccaaccacctcaagcaaagaaggcaaaagtgaagaccagcaccgtggacctgcccattgagagccagctgctgtggcagctggaccgggaaatgctcggcctgtacacagagaatgagggtaagatgatcatgcaggataaactggagaaggaacggaatgacgccaaaaatgcggtggaagagtatgtgtatgagatgagagacaaacttagtggtgaatatgagaagtttgtgagtgaagatgatcgtaataattttactttgaaattagaggatacagaaaactggctgtatgaagatggagaagatcaaccaaagcaagtttatgtagacaaattggctgagttaagaactttaggtcaacctattaagacacggttccaggaatctgaagaaagaysaaaattwttkgwrgwattrggsargsaawtccawcmgtmyaykmaastgatcasctctttcamwwryaaggaggmccagtatgaacacttggatgctgctgacatgacaaaggtagagaaaagcmccaatgaggcgatggagtggatgaatagtaagctgaacctgcagaacaaacagagccksacgrcggatccagttgtcaagacaaaagagattgaagctaaaattaaggagctgacaaatatttgcagtcctataattkcaaagcccaaacccaaagtggaaccccctaaggaggaaccaaaacatgctgagcagaatggaccagtggatgvccaaggagacaacccaggcacccaagctgctgagcacgrtgcagacacagctgtgcmttctgatggtgacaagaagcttcstgagatggacattgattgatyccaacacttgtttatattaaaacagactwttdtaaarmwwwaarwwrwmaamwwwrwwmtraaymtywrckrsmgcaagcwwatwcyskwkatttcttagtcagtttttaggggatctcggggtggggtatataggtaatatacagagcattttgacttctaaatagttagatccagagatgaagtgcactgttctctcttcattatgatcctgtttaagagcccagctagtctttctgagctcttgcctccctccttgttttaatcatgcttctacaaggtgaagtgtgtttggggaaactgagctctaacaaaagctgtgagagccactaggcaggcttttcctcaaacatgacagaagttcaaattatgcttggaaaggctgagtggagatcaccaccagcattctctgcctgtggggctgtgggactgtggggctggtgcttcctccatttctgmrsgwskgagaatggcccagcatgcattaacacaggagagcgcagagcgcagcagggcctgctctcattgccctctattcccagccctgtcttcctcttccgtccgcaagcagtataaatgccrwgkgccctctgcacttagagtgagccttagcgtatcaaggggctttgacgtggctccccgtacttcctgaaagtattcactgacactgaagcgtcagagtctagtgtaaccttaaggtaggttgtaaataacagttggctgtaggcatggtaagtytgagcagcccmtccttagtgtggtgggaaggtctgtaccctgacctgctccacggtagatggtgtatgtaaattagaggtttcgatggaacaggatgagagctcaaggttctttgkttggtatwawttgtgttaatgtgtcttgaatctgccmatctgtatgttaaaacagctgacagattgtaaagctawwgccctggrcaaststgraawwarwrwaaaaraaaacctcatcgttaactgcagccgctgtcagggtaccatatattcctggaacaagtctatggggaagagatgttctgcagacaaagggacggatgcctatggtagaggtcagagttggttacctgccttagttacaagtgttacgttctgggtctttswratyrstgatctctgtaacagagcctctgtttattcttgcttgttggaaataagcttaaaccatgcatagttagaattactatgcttcygtctacacaggaagtgctgtagctctcaagtgctmtagaggccattggttggagaggaaggaatgcatgcttatgttatgtaagcaactggactcccgctcagtacaggcctggagctccaggccgagtgcatactctgctgctttgagtgctgcaggagtgcccactggcctggctgtgaggctgatagctttttcaagtgcaggytgcaggattaarccaactmttatgcaactgactgtccttaatgatgatctcataaacatttgtgtgtgggggtgggaggrtttgsgtgtcgggatggggaatgaatttgaagtctaaagttaaagctagaaatcagatgatcagcttctgctctgtctatatagacgattggatttatgtggaggcaggccagatggcaactgatgacttgtgtgcaaacaagcatttatccaggttgcaatatccaaawtgryttgttaaaaactmtakgtcacattcttacactaagaaaaacagtaaacatgagacaaagtttaggaaaaactaatwaaagaaacctgtcttaamwwrraaaaaaaaaaaaaaaaa

SEQ ID NO: 588 - DNA, 2066 bp, Rattus norvegicus
gaaagatggatgtgggcaaacggcrrccgcaaagacytcrggactcaacgmgcaatgttggcaaatggaaggctcagggtstgagtccccggcagcgggccacgrcmgcagcacccgcagcgcccrccgtgtgagcgggcagcagcgggtmtgtcacccggagccggagtccccggccgccagcagcgtcctcgcgagccgagcgcccaggcgcgcccggagcccgcggcggcggcggcaacatggcctcggctggtaacgccgccggggccctgggcaggcaggccggcggcgggaggcgcagacggaccgggggaccgcaccgcgccgcgccggaccgggactatctgcaccggyccagctactgcgacgccgccttcgctmtggagcagatttccaaggggaaggctactggccggaaagcgccgctgtggctgagagcgaagtttcavmkmstcykawttaaactgggttgttacattcaaaarractgcggcaagtttttggktgtgggtctcctcatatttggggscttcgctgtgggattaaaggcagctaatctcgagaccaacgtggaggagctgtgggtggaagttggtggacgagtgagtcgagaattaaattatacccgccagaagataggagaagaggctatgtttaatcctcaactcatgattcagactccaaaagaagaaggcgctaatgtcctgaccacagaggccctactacaacacctggactcagcactccaggccagccgtgtgcacgtctacatgtataacaggcaatggaagttggaacatttatgctacaaatcaggggaacttatcacagagacagggtacatggatcagataatagaatacctttacccttgcttaatcattacacctttggactgcttctgggaaggggcaaagctacagtccgggacagcgtacctcctaggtaagcctcctttacggtggacaaactttgaccccttggaattcctagaagagttaaagaaaataaactaccaagtggacagttgggaggaaatgctgaataaagccgaagttggccatgggtacatggaccggccttgcctcaatccagccgacccagattgccctgccacagcccccaacaaaaattcaaccaaacctcttgatgtggcccttgttttgaacggtggatgtcaaggtttatccaggaagtatatgcattggcaggaggagttgattgtgggtggcaccgtcaagaacgccactggaaagcttgtcagcgctcatgccctgcaaaccatgttccagttaatgactcccaagcaaatgtatgaacacttcaggggctacgactatgtctctcacatcrrcygsaawgassatmgggcagcygccaysctgsarkcatggcagaggacttacgtggaggtggttcatcaaagtgttgccccaaactccactcaaaaggtgctttccttcaccaccasgaccctggacgacatcctaaaatccttctctgatgtcagtgtcatccgagtggccagtggytacctactgatgcttgcctatgcctgtttaaccatgctgcgctgggactgctccaagtcccagggtgccgtggggttggctggtgtcctgttggttgcactgtcagtggctgcaggattgggcctctgctccttgattggcatttcctttaatgctgcaacaactcaggttttgccatttcttgcccttggtgttggtgtggacgacgtctttctcctggcccatgcattcagtgaaacgggacagaataagaggattccawttgaggacaggactggggagtgcctcaagcgcacgggagccagcgtggccctcacctccatcagcaatgtcactgccttcttcatggctgcattaatccctattcctgcactgcgagcgttctccctccaggctgctgtggtggtggtattcaattttgccatggttctactcattttccctgcaattctcagcatggatttatacagacgtgaggacagaagattggatattttctgctgtttcacaagcccctgtgtcagcctcgtg

SEQ ID NO: 589 - DNA, 5646 bp, Rattus norvegicus
gggctggtttttccacactgggcaactcaaaggtgctgcagagttacttagactcttgccctctcaacaggttacctgggttcttcctgtcactatgtagctttcacctgagactctcaggtgcctctcccccaccacttatccagaagacaatatagtgacaagcccctccccacccaacccagcctgctgcaagtgactctcttctttcttttctaatattccctgccaaccttcatcttacaaataccctaagttcctccatgaaaatggagccagagcatagccatatcagaacacaagaaatgcttggatgacagaggcttggagaaagaatggctcagaatttttataaagctccctcctgtccttcttatactggtggtagctgctctttgagtctggctctctccccctcccaacccccagtggctctttccctgaggcttgcccaaagtcgatgctgaccaaacaatcattggaaccagatgatagagaacacagagaaagctcatagccaagccacctgtgaatacttgctttagtcactctgggcatgtcatggccttgatcttggcctcagcccctccatctgagaaataagcacttcatcttggaggcaccctttccactagacattctgtgaagaagtaatgggaaaccatggtccctgaaaggaaggaatatttgaaattctaggcatgcaggtccggtccacctggacctgcaagctcactgggtgagagtagagggtagctgttggagcatgacaggtgccacctatgtgcgtgatatgcaaaggcttaggggacggggaggacatctggaagcataagtcagaagactatgagctacataaacaggaggaagcaaacaaaagaactgtggaagtgaccagccgggggcctgggacgtgcttctgacctttctagaaagcacaccatcactccttctttctcccactctgactctgagtgggaaggtatggcattgaccaaagtccatgggcagaaaagagaagaaggttaataactcagaaaaactttccattgcccactttggtagtttaaaaaaaaggcccaagtctcttgggatgctggggaccagtagaggctcaatcctcacccccttatatctcttttctgggcctttcccttggctttccaagttcagagctcagactatgcctttgttgagctattccagattctcaggcccttgtgagagctgcttggctgtaaccccagcatctggagctcatattccagctaaatatctctcctgaagggtctgggaacttccaatgctgcctcagaatgggaatttccacactcttatcctactctgcctctgacctaccagctgggaaagagcatcctttgttgacagagtaaagtgagtgggagagagacaattattttcctttctttcgtttatgattcatactgtgttgcatcgtatgctaactgaagcttgcagtgccaattcactttccaatggtgacctcccaggctcaggagcctgcccacaaagccaagggcagaacatgaatcctcaccttttgacatcccttcccccagggccttttcccttggccgctcccaagccagagctcagactaggaccttgggatgctggggaccagtggaagtagcaaaggccacatgaatctgtgttttctcagttggaaataggcttcctcacatagaaaagcaatttctcaggagctcttaggtctcagattcttaagagtaatagtggcatctctcaacttgtgagtgctacagaaacccaagggacgcctcgatttcatagataacatgctcataaatgagatgtgggtttctccgaacatgagaaagcttcttggaagtagcagtgagatgctctgggtagaaatgactatgcacaactactgcctccagtcctgaaataactcacatgtctgaggggaatcgagtgagccacaaggaaaggattgagccaaactcacaacgatctggatacgagccaggaggaggtcagtgactacaagaacatgttataggcagaacaaaaggatggtcccaagaagtacagcaagttgaagaaactaacaacgatcatgagacattaaatctcatgtccagggtacatggcttctggaaccagagtgtcctagtatagtaagcaccagtcccctgtgtcacctgtgctacctgggcaattaggttcttgacaaataattatgcctggcccccagtaagctaccacaatgctgctaatagcctcttgtcctggaataaacagagtagcttgtttgataccacttactccctatcacgaatatagtagctgtagacctgctctctttcaagaatcccccctattcctttacagtcactgtctccatgactctctatgaaagatgagtcttcggcacatccctgcccatcaagaaagactgagaaggatgctatagtggaatgaggaaatcaagactctgctcagccactggcatgcctgtgagagctctgctatttttgtaaagagtctgctgaaattaaatstaaggactttcagattttatggctttgatcacactgtttctagagaaatctaaacctggaaggctgagttaagccagacattccagatggctctctcctcatagtccttggaatcaygaaggaagcagggcagagagctaccagaagtagtaaacattgatcacaggctcctagttcatcstgaccaaatcaaaaggaatgtytctccatggcccattaactgtctgttagtttgaacgtaacatggtgatagccagactggagctacctgagtcctgttccagggaatcttagggcaattacctacataacccttctggacctcaactgcctgatcttagggattaataacatctatttaccagagcractgcattgtgaagggttccaaacactcctggcacagagtaagcactgtctgggctttggatagaaatctcttctgcaccatgagctcatttataagrctttccaggtctggaattgtacaacccaaacagctcatatcaatgtcacaagctcttcggtttggcaaaatgtctgggagtcaccaaatgcagagaatgccatattcaacaaagcctgawaaccaaggactcagtggactaattggcagtcctatcccagatccaaggttaccttgagccaggggcaagctaggatatgctyccaggtatcttctcccttaggactttaggtttcttggccacttcctcttatttcagtgaaagcagatccactccattgacacttgtggtcacagtctagcacgactgctcccttccttcttttctccctccctgcgcagcttcatttgctcccagtagtggctggaaaaacaccaaattccaatccgcggtttctcccttctacttcctggaaacatccaagggctcggcacttactcagcagattcaaaccttccactytccatcrctcatcgaggatgatgctgctccttggcaccaaccaccctgcctgactccaccctctggcttacaataaaaggctgaggcagagccgctagaaatgcagagacacagacagaggccagcccagaaaccagccaactctcactgaagccagatctctcttcctccaccactatgcaggtctctgtcacgcttctgggcctgttgttcacagttgctgcctgtagcatccacgtgctgtctcagccaggtgagaccccagtttccttctccttctagcatttcaccccattttttaattgttgtgggccatcatagtgggccttacctagtaaaatacttttttttttttaccaaggtaaggagcatagagccaacccaattacaggggttgcttctggaaagcaactaggattttaatcgttagatcaaagtttagaatcgcaccttcatacagttcctgctcccctatttcctgagtatttgagaacctggttgatcaaagaagggcttgggttggttcatttttccagatagaggagaatcaggaagagacccaggatcttgatctatgtttcaccagcttccagagatagcagctcagcagaggtagttggtatcagagatactcatgattcgatatagggtttttttttgtaacctatagtaatgtactcggtaatcttctcagaccctagtaatttgacttctaactaccctcaaatgacagtccctagctttaatggcatccctctgtccaagattgtgaacttactttaagtgtgtcagagatcaccttccagctctgatgtattggcatttacatcccaatctgctgaaactgccttctcctcatggtccttttcttctctaaggtcagaagcacctttccagttctaatgtgctccctgcttctcttttattctccagatgcagttaatgccccactcacctgctgctactcattcactggcaagatgatcccaatgagtcggctggagaactacaagagaatcaccagcagcaggtgtcccaaagaagctgtagtgtgagttatacaccccagccctccctggtccaatatttttcctcgagaacaagggatggtcttcatagacttagaatcagttacatgctcagctccaatatcaagtggttcccaatggggaaactgaggccaagaagggaaagttaattctcagcagcactgtctctatggctgctgttcggggccttccatttgcatgagcttattgtagtaaacttgcagaagaggaaggtcactttgagtccccctttctacctgccctcccacctcgagccctacacagtccctccatgtatagcargwkaawcwycakctarcsgtgtcytcwmwswwkcyryagatttgtcaccaagctcaarakagagwtctgtgctgaccccaataaggaatgggtccaraagtacattagaaaactggaccagaaccaagtgagatcagaaactacagtcttywataaaattgcatcaaycmtaaggacttcagcacctttgaatgtgaacttgacccataaatctgaagctaatgcatccactctcttttccacaaccacctcaagcacttctgtagaagtgaccagtatgacagagaactagtgtgatttggaatgtgatgccttaagtaatgttaaacttatttaacttattgatattacactattcccttmcatgaatactagaawtccttaaatgcaagatgtagatccatttttttatttctctgtgaatcctggttcaacactttcaatgtatgagagatgaatgggtaaactttgtgtttgagagtccaaggtattgtttaaaatattattatggatattcctaattattaaaagaaatatattattyttgtmmamaarwmwramwwwmrrwgttttctgagggaaatggcaaagctaagagtacataagaacacacaggaggacatcacaagatgggacacatattgagggggggatgggggaatgaatgctgcactcttttgtattgagtggtctcatgtgagtgtcataaactctttgagacagggtccagtcagggatgctagtaccatagttccaatccccaggactgcttctcagacacatgctcgataaaagccccagtccttcccagtcatg

SEQ ID NO: 590 - DNA, 254 bp, Rattus norvegicus
actcactatagggctcgagcggccgcccgggcaggtctcagctgcgaccccggccccgcccccgggaccctggccatggacgatctgtttcccctcatctttccctcagagccagcccaggcttctgggccatatgtggagatcattgagcagcccaagcagcggggcatgcgtttccgttacaagtgcgagggccgctctgcaggcagtattcctggggagagaagcacagataccactaagacgcacccaat

SEQ ID NO: 591 - DNA, 930 bp, Rattus norvegicus
ctcattacggagatggttgctctcaacccagactttaaaccacctgcagattacaagcctccagcaacacgtgtgagcgataaagtaatgatcccccaagacgagtatccagaaatcaattttgtgggtctcctaattgggcccagagggaacaccctgaagaacattgagaaggaatgcaacgccaagatcatgatacggggaaagggatcagtaaaagaagggaaagttgggcgtaaagatggtcagatgttgccaggagaagatgaacctcttcatgctctagtcactgccaatacaatggagaatgtcaaaaaggcagtggaacagatcagaaacatcctgaagcagggkattgaaaccccagaggaccagaatgacctaaggaaaatgcagcttcgagagttagctcgcttgaatggcactctacgggaagatgataacaggatcttgagaccctggcagagctcagagacacgaagcattaccaacacgactgtgtgtactaagtgtggaggggctggtcacattgcctctgattgcaaatttcagaggcctggtgaccctcaatcagctcaggataaagcacggatggataaagagtatttgtcccttatggctgagctaggggaagctcctgtccctgcatctgtgggctccacctctggacctgccaccacacccctggccagtgcaccaaggcctgctgctcctgccagcaaccsaccaccaccgtctctcatgtctacaactcagagtcgcccaccctggatgaattctggtccttcagagaatcggccctaccatggcatgcatggaggtggtcctggtgggcctggaggtggcccccacagtttcccacacccattacccakcctgacaggtgggcatggtggacatcccatgcagcacaacccaaatggaccacca

SEQ ID NO: 592 - DNA, 3100 bp, Rattus norvegicus
gttcgccacgtgtggagagaagggaaaaactgagccgagagaggggggaaaaaaaccaatgctgatttcggaaagaacgaaggaacttcggtagccctggccgaaccaccgacgcaaggaaggtagcgcttccgcagagcggcagcagttctgactggaggggcgctcgctgggagagacccatcacacctaaggggacagctattgctctgggtgacgactcctaaaaagagaatcggtgcctctacctctccacgtagctctgcttcagaacggggattgcttctccagctccccctggaccatgccactgggtggaagaggaacgctgagaggctgagcgaggaaccagctaggtgacaactcagagcccaggagtaccaagtcactgtaaagcataggcaccgtgaggatgactgtggcgagcactgcggctccctcctatacaacctcagacaccaaccgggttatttccaccttttctgttgtggactatgtggtgtttggcctgttgctggttctctcccttgtcattgggctctatcatgcttgccgaggctggggccgccatactgttggtgagctgctgatggcagaccgaaaaatgggctgccttcctgtggcactgtccttgctggccaccttccagtcagccgtggcgatccttgggggaccagctgagatctaccgatttggaacccagtattggttcctggggtgctcctacttcctggggcttctgatccctgctcacatcttcatccctgtcttctaccgcctgcatcttaccagcgcctatgagtacctagagctccgcttcaataaagcagtccggatctgtgggactgtgaccttcatctttcagatggtggtctacatgggagtggctctctatgcaccgtccctggccctcaatgcagtgactggatttgatctatggctgtcagtcctggccctaggaattgtctgcaacatctacactgcactgggtgggctgaaggctgtcatctggacagatgtgttccaaacgttgatcatgttcctagggcagctggtggttatcattgtaggagcggccaaagtgggcggcttggggcatgtatgggctgtggcttcccagcatggcctcatctctgggattgagctggatcctgacccctttgtacgtcatactttctggactttggcctttggcggcgtcttcatgatgctctccttatatggagtgaatcaggctcaggtgcagcgctacctcagttcccactcagagaaggctgctgtgctctcctgctatgcagtgttcccttgccagcaagtggccctctgcatgagctgcctcattggtctggtcatgtttgcctattataagaaatatagtatgagcccccaacaagagcaagcagcccctgaccagttagtcctctattttgtgatggacctcctgaaagacatgccagggctgcccgggctcttcgttgcttgcctcttcagtggatctctcagcaccatatcctccgcattcaattcactggccactgtcacaatggaagacctgatccagccctggttccctcagttgactgaaacccgggccatcatgctctctcgaagccttgcctttgcctatgggctagtttgcctgggaatggcctatgtttcctctcatctgggatcagtgctccaggcagcactcagcatctttggcatggttggagggccactgctgggactcttctgccttgggatgttctttccgtgtgccaaccctcttggtgccattgtaggcctgttgacgggactcaccatggccttctggattggcattgggagcatagtaagcaggatgagttctgctgcagcatcccctccccttaatggatccagctccttcctgcccagcaatctaactgtcgccactgtgaccaccctgatgccttctaccctgtccaagcccacaggactgcagcagttctattccctgtcctatttatggtacagtgcgcacaactccaccacagtcattgcagtgggcctgattgtcagtctgctcactgggggaatgcggggccggtccctgaaccctggcaccatttaccctgtgttgccaaagctccttgcactcctgcccttatcctgccagaagcggctttgctggagaagccacaaccaggatatccctgtggtcaccaacctgtttccagagaagatggggaacggagcgctgcaggacagcagagacaaagagaggatggctgaagatggccttgtccatcagccatgcagccccacctacattgtccaagagacgtccctgtgacctgtgacggacctctcactgcagagcagtggccagagatactctggagtgcagagctgagtcactgcatgagttccgcagcactggggtggatgacctagctcacagcaaaggaccttgatctttaatgtttcaccgccgtgggagctgtcgcatgcaagggacagacagtttttccttatcccttgccagtcttcttttaggatcaggtttgcaaggtacagaatcacagcacacgtggggaaatatactgaggaaagggtggcttttgattaagtgaccagggttctttgggswsrakrggaacatttyttacaactcccctkgascargtttggcaggattgaccagctccagcatttagcatgaagtcctcagccctytggtgattccmtcactytcatgtcaacctgggttatytcaagccagtgtggscctgtggtcttcaggttytctgtaaractcaagtytcctctcattctacctacctctgyttgtraragggaggctttggagcgcttgggtytcagcacttagtgcatytacttggtgtatagaccytcgctctyttcaggtggtacatgaragacaggtmcatgagagagstcvccaggacctyttatgcagtgtgctatcctytaaactcctaagstaggccmccctggtgtcattytgtcatytgtgcaattyttakttcctttgggagtttcctcctcatgcattttgttcmtagggaataaaaatagccattwgmcctkaamaaaaaaaaaaaaaaaaaaaaaa

SEQ ID NO: 593 - DNA, 1893 bp, Rattus norvegicus
caatcacacaactccactcgagttagccattgaaagccaatgcaagtaaatgtcattccaaagcttaagattcattaaggtgggcctaaaagaagacagctgctgtgcagacaacgtcgaacaagcaccacttgcttgctttgcccagcatgggcgcttcggaacggagtgtgttcagagtgctgatcagggcactgacagaaaggatgttcaaacacctccgaagatggtttatcactcacatatttgggcgttcccggcaacgggcaaggctggtctctaaagaaggaagatgtaacatcgagtttggcaatgtggatgcacagtcaaggtttatattctttgtggacatctggacaactgtgctggacctgaaatggagagactcaagtgaccataggttacggattcaggtttgtgacagaacagtgcgccactgccattttcctgcttatcttccagtctattcttggagtgatcatcaattccttcatgtgtggtgccattttagccaagatctctagacccaaaaaacgtgctaaaaccattacgttcagcaagaatgcggtgatcagcaagcgtggcgggaagctctgcctcctcatccgagtggccaatcttaggaagagccttctgattggcagccacatatatggcaagcttctaaagacaaccatcactcctgaaggcgagaccatcattttggatcagaccaacatcaactttgtcgtcgacgctggcaatgaaaatttgttcttcatatccccactgacgatctaccacattattgaccacaacagccctttcttccacatggcagcagaaactctttcccaacaggactttgagctggtggtctttttagatggcacagtggaatccaccagtgcaacctgccaggtccgcacgtcatacgtcccagaggaggtgctttggggctaccgtttcgttcctattgtgtccaagaccaaggaagggaaataccgagttgattttcataacttcggtaagacagtggaagtggagacccctcactgtgccatgtgcctctataatgagaaagatgccagggccaggatgaagagaggctatgacaaccctaactttgtcttgtcagaagttgatgaaacggacgacacccagatgtagcagtggcttttccacctacaaaaagcctcccaaggacctaagggttgactgtgttcagaagcatctgacgggggtctgaaagcaggatgagaacatgcgaaatctgctagcacagtcacccctgaaccccagggctatggttctacaagacacatagctctataaggctgcatacggtgcatgcatgtgaatgaaactgtggaagccaaaggggcccacttggatcctcactatgactgtgtaagctcatatcgtgttgatggaaacaaagtcattcaaggacaaaacttaggagctttagaaagcttcaggaactagccacatttcctgtttgattctatggatgagaaagatgccatttttatcttaaagtagacttctatcaatggaaaatctgccctctgcgctgggaagtgagccagccaatcagtgacaataagagactgtcatacaaagaatcagtaaagactctaaccttctcaagctctggtgtttgaagcctttgtctgagtctgggtccatgcttcagaaggggtaaggtgacatccactgactgtacctctctgaacccaaggtacagaagaacaggaagccccaatcaacttcataatcaacccagatgctgcagcccatacagaatttggcctgaatgatttcctgtggagcattaaatggaggccaagtccactctttagatattaaatgaatattcttttgcaaaggaaaaaaaaaaaaaaaaaaaaa

SEQ ID NO: 594 - DNA, 1928 bp, Rattus norvegicus
aggcagtgcgctgagcctggggagtgaaatgcctcaggctctctgggggtatgcaaagcgcaggtgcgaccagctcgggtagcatcttcatcgagtagcagcggggcatttgtggcagcggtatccacaacaggtgtgaacaggtcccacccgactccaccctggaaagtccttttgaagaaatggccctggtgaggggcggctggctatggagacagagctccatcctccgccgctggaagcggaattggtttgctctgtggttggatggcacgctgggttactaccacgatgagacggcacaggacgaggaggaccgtgtagttatccacttcaatgtccgagacataaaggtcggccaggagtgtcaggatgtgcagcccccagagggcaggagccgagatggcctgctgacagtgaacctacgggagggttcccgcctgcacctgtgcgcagagacccgggatgatgccatagcatggaagacagccctgatggaggcaaactccaccccggccccagctggagccaccgtcccacccaggagccgtcgggtttgccctaaggtcaggtgtacgagcctctcatggaagccctgtaaggttgagaggcggatctgggtacgcgtctacagtccatatcaagactactatgaggtggtaccccccaacgcacacgaggccacgtatgtccgcagctactatgggccaccttatggtcctggtgtgacacatgtgatcgtgcgagaggatccctgctacagctctggcgcccctttggccatgggcatgcttgctggggctgccacgggtgctgcccttggctcacttatgtggtcgccttgctggttctgagccctggggctccaacctctggatgtgcacgtagaacgcaaaacccttttcttctggaccctctcctatctaccacctaaactctgtcccattttgacccctttctctscattaagtcctctaggcttggcccattcttcccaccatttatcctccacttatcctccttccctctcagagaaagctaacatctcagacacagacacagcggaacgtccatacacctactgccaggcaacctcataaatcacatgggaatttcctctagacacagcaaacataacttcatttggctttaagtgtctgaggaatggaactcacaagagagcaaacaacaaagttacagttacctgtctggcaaggataagtgggggcaagggcaaggcagacagtttaggtgcctaaaggatcacatgacagttggcttggcgttgtggcaggggttgtagtggccttagctttaggcgaaggagcttgctggataaaggcatgatggggctttttatgaagtttctggatttcaactataatgaatactttgcttgtmwagttagwactggcagaacmtacaccyttatccagaacacggcatttggcaccttttccccacttgbtagcttcchtatgatagttcagctaaccytaaggtttcctagctgtggaacaggtgagctctttgggacctctggccttacaaagttgctyccattaggaaatgcctttctgatcccaggagctcagctctgactttgactgttaacatcwraagmtttttctcttccttcactctggagggaaatggaattattttgctmtagggcctgacccaccttggcaccagcttggggaatctctcatgtgcctgtctgtaggyskcrwgcmatctttccatttgatcccattccaaactattccatcagtctgtcccaattgccaatagaaaagctaaaatcyctggctcagaggccagagtgcccactaaaattcctagcatatgtgagggcaccactggctcagctgcagacactaataaagatatgactggscscrraamaaaaaraaaaaaaaaaaaaa

SEQ ID NO: 595 - DNA, 195 bp, Rattus norvegicus
tttcgcgtctctgggaagcttccccagcgtcctcctcgtgggcagtctcggatacattggcttaaacagggctgcctggcacttgtgcccacctctgcctacgccctgtggcagcactgctgtggagttccctggcagccaggacaagcaggcttggcaatggcgcaaccctgaggacttcccggaggtgttgta

SEQ ID NO: 596 - DNA, 400 bp, Rattus norvegicus
tgacagctgctggtgaaagtccccaaggaaatgaaagggaattttgtccacagggcaaagccaactggaaaacattcgtgatatcaagcatttgcatcgctatcatcgtggtgggcactttctcaattcgttacttcaggcaaaaggcatttactctcctttctactctcaaaccccaatggtattgcagaactattccagatccagcaaatagcacttgggtaaagaagtaccccattatggaggagaagatccagccacctatggacaatctcctgatggcctggtccgctcctgaagagcctgagcccctgatcatcaatgaagtcctctaccaaatgatcccagtaggcagacaaccctattgcttcaaaagaggacaagggttccaaggttactc

SEQ ID NO: 597 - DNA, 462 bp, Rattus norvegicus
gaaggtgcccgagtgaccagtcccacatcaggcttgaggcggctaagtctcatggatcaggtatctggggtagaggccttccttcaagtcagccagccccctgatccccaccggggcgctaaggtcatccgtgcagacccgcaggggggacgtcgtcgccacagttcagagaccttctcctctaccaccactgtcaccccagtgtccccatcctttgctcacaattccaagcgccacaattcggcctctgtggaaaacgtctctctcaggaaaagcagtgaaggcaacagcatcctgggaggaagtgatgagccatccacatccccaggacaggcacagccctcggcaggtgtgcccccaggcccacaggctaggccatggaaccccggtcagcctggagctttgattggctgtcctggaggcagcagttctcccatgcgcagagagacctccgtgggtttc

SEQ ID NO: 598 - DNA, 3483 bp, Rattus norvegicus
tctgcagtatggtagattattatttatgcatttatgccagtgtggcttcattcatacagatgaaccaagctttgggatagcagtataaaattagaatcagacagctgactgctcagcaggatgccatcaactaacagagcaggcagtctaaaggaccctgaaatcgcagagctcttcttcaaagaagatccggaaaaactcttcacagatctcagagaaatcggccatgggagctttggagcagtttattttgcacgagatgtgcgtactaatgaagtggtggccatcaagaaaatgtcttatagtggaaagcagtctactgagaaatggcaggatattattaaggaagtcaagtttctacaaagaataaaacatcccaacagtatagaatacaaaggctgctatttacgtgaacacacagcatggcttgtaatggaatattgtttaggatctgcttcggatttactagaagttcataaaaagccattacaagaagtggaaatagcagcaattacacatggtgctctccagggattagcttatttacattctcataccatgatccatagagatatcaaagcaggaaatatccttctgacagaaccaggccaagtgaaacttgctgactttggatctgcttccatggcctcccctgccaattcttttgtgggaacaccatattggatggccccagaagtaattttagccatggatgaaggacaatatgatggcaaagttgatgtatggtctcttggaataacatgtattgaattagccgagaggaagcctcctttatttaatatgaatgcaatgagtgccttatatcacatagcccaaaatgaatcccctacactacagtctaatgaatggtctgattattttcgaaactttgtagattcttgcctccagaaaatccctcaagatcgccctacatcagaggaacttttaaagcacatgtttgttcttcgagagcgccctgaaacagtgttaatagatcttattcaaaggacaaaggatgcagtaagagagctggacaatctacaatatcgaaagatgaagaaactccttttccaggaggcacataatggaccagcagtagaagcacaggaagaagaggaggagcaagatcatggtggtggccggacaggaacagtaaatagtgttggaagcaatcagtctatccccagtatgtctatcagtgccagtagccaaagcagcagtgttaatagtcttccagatgcatcggatgacaagagtgagctagacatgatggagggagaccatacagtgatgtctaacagttctgtcatccacttaaaacctgaggaggaaaattaccaagaagaaggagatcctagaacaagagcatcagctccacagtctccacctcaagtgtctcgtcacaaatcacattatcgtaatagagaacactttgcaactatacgaacagcatcactggttacaagacagatgcaagaacatgagcaggactctgaacttagagaacagatgtctggttataagcggatgaggcgacagcatcagaagcagctgatgactctggaaaataaactgaaggcagaaatggacgaacatcggctcagattagacaaagatcttgaaactcagcgcaacaatttcgctgcagaaatggagaaacttattaagaaacaccaagcttctatggaaaaagaggctaaagtgatggccaacgaggagaaaaaattccaacaacacattcaggctcaacagaagaaagaactgaatagctttttggagtctcaaaaaagagaatataaacttcgaaaagagcagcttaaggaggagctgaatgaaaaccagagcacacctaaaaaagaaaagcaggaatggctttcaaagcagaaggagaatattcaacattttcaggcagaagaagaagctaatcttcttcgacgtcaaaggcagtatctagagctagaatgtcgtcgcttcaaaagaagaatgttacttggtcggcataacttggaacaggaccttgtcagggaggagttaaacaaaaggcagactcagaaggacttagaacatgcaatgttactgcgacagcatgaatccatgcaagaactggagtttcgccacctcaacactattcagaagatgcgctgtsaskwgrtcagactgcaacatcaaactgagcttactaaccagctggaatacaataagagaagggaacgggaactaagacggaaacatgtcatggaagttcgacagcagcctaagagtttgaagtctaaagaactccaaataaaaaagcagtttcaggatacctgcaaaattcaaaccagacagtacaaagcattaaggaatcacctactggagactacaccaaagagtgagcacaaagctgttctgaaaagactcaaggaggaacagactcggaagttagccatcttggctgagcagtatgatcatagcattaatgaaatgctctccacacaagctctgcgtttggatgaagcacaggaagcagaatgccaggttttgaagatgcagctacagcaggaactggagctgttgaatgcatatcagagcaaaatcaagatgcaggctgaggcccaacatgatcgagagcttcgagagctggaacaaagggtctcccttcggagagcactcttagaacagaagattgaagaagagatgttggctttgcagaatgaacgcacagaacgaatacgtagcctgctcgagcgccaggccagagaaattgaagcttttgactctgaaagcatgagattaggttttagtaacatggtcctttctaatctctcccctgaggcattcagccacagctacccaggagcttctagctggtctcacaatcctactgggggttcaggacctcactggggtcatcccatgggtggcacaccacaagcttggggtcatccgatgcaaggcggaccccaaccatggggtcacccctcagggccaatgcaaggggtacctcgaggtagcagtataggagtccgcaatagcccccaggctctgaggcggacagcttctgggggacggacggaacagggcatgagcagaagcacgagtgtcacttcacaaatatccaatgggtcacacatgtcttacacataataattgaaagtggcaattccgctggagctgtctgccaaaagaaactgcctacagacatcagcacagcagcctcctcacttgggtactaccgggtggaagctgtgcatatggtatattttattcgtctttgtaaagcgttatgttttgtgtttactaattgggatgtcatagtatttggctgccgggggtttttgtggttggctttttgtttctttgtttttaacttttggaaaaattttaaagtgggaaatagataactatttcatgtatgtggcaaaaaaaattggctttatagaaggggtattatctgaacaatataaaaataaaatgaagcaaactaaaaaaaaaaaaaaaaaa

SEQ ID NO: 599 - DNA, 5727 bp, Rattus norvegicus
ggctctgccggggttagcttgagaaactatatgcccttccaagggtaatatttgactattacacaaaggcaatgtgattgttgcataacaaaacaaaatatgttacgtggcttttctagtgaggttgataaactttcatgattggttcagtagaatgcaaaacacctaaggtttttatggcagtagttgataaagttgtggtctgcakwyywtyywktttykwtccctttttgtaaataaagctttattaggatagacatttatttacatgttatctgcagctgcttttgttaccacaggatggaacaactgccccagaagctataataagsctyrtkaaagcctatgcagrtgctgcctggtcttttggttaaaaaaaaagtgtatcatttcctgttttacattaaagatagaattaaatgagaagtctgcttgagatgttttagtttttactattattaaggtttgggtgacttaaccaaaatcataaaaaaaaaggaatactattgttttgtgaacagtgyctgtatattttaagaatatacaagggaaatgtatttaaaaagaaaagagatgaaaaaacaaaagtatacttttctaacattagaacaaaatgaaaatcccgcccatgtaacaaacttggtttcactgaggttctctctgtactaagcaaatgatgtttggaatgttacattgggacaaatggtgcccaagtgatcagacatgtaaagcagacaaatgaaactagcacacaactgtcggtttccaaggagtgttacggtcgccatcttcgcaaagccagacacaaactgcaaccataacaagccgtggtcataaaggcgaaaactgtggcagccacgttgatgttgtactggttatcgttcagtagcggcttcacaaccatcgtagtgttgcattgcaggtcatgcagggaggtggccgctgcttccaataaaaaggcgccgaagtagaagacaaagactaygaaatggtaggcaaaatccagaaagttccagttggcatcaatctgagycwcswkaccagagaggaacaaacccaggaagagaagcgaaaagaagaaagctgtcacagatacaaacatgacccatccttgcagcagaggtagaggaacattggaagaagcgaccaaaatccagacaagtcccccaagtacaatctccaggcagacgaaaagcttcccgagtaggtcctcaggatgtcagggccagccggcagggtgatccggggcgccgggaaggacacggcagggttcggggcggcgggactgccgctccgccggccgacatgctgccgctgctacgtctccgcgcaccgccgccaccgtcgccaccgcctcccgcgtcccgcctccgcctcccgggcttggccgccgccgccgccgccgccgccgccgccgctccggttcgcggggttcaggcgtgctgagcgcggaaagggtgtggctacgggccctctgccgacagagccccgccccgtcacgtgagcacaggtgagcgcgcctccgccctggcgcccgtcagggtcaccagcgcaggtgtggtgctccccagccgcagccgcctcggccatgcggctgccggacccggggcctgggctggggcccgcgccaccccctgcgcgccgcccccgctgagcccgcgccggatagggcgccgccggcaccatggtgcaaaagtcgcgcaacggtggcgtgtaccccggcaccagcggggaaaaaaagctcaaggtgggcttcgtggggctggaccccggcgcgcccgactccactcgcgacggcgcgctactcatcgcgggctccgaggcccccaagcgcggcagcgttttgagcaagccgcggacgggcggcgcgggagccgggaagcccccaaagcgcaacgccttctaccgcaagctgcagaatttcctatacaacgtgctagagcggccccgcggttgggcgttcatctaccacgcctacgtgtttcttttagtcttctcctgccttgtgctttccgtgttttccaccatcaaggagtatgagaagagttccgaaggggccctctacatcttggaaatcgtgaccatcgtggtattcggtgttgagtactttgtgagaatctgggctgcaggctgctgctgccggtatcgaggctggaggggccggctcaagtttgccaggaagccattctgtgtgatcgacatcatggtgctgattgcctccattgctgtgctggctgctggctcccagggcaatgtctttgctacgtctgcacttcggagcttgcggttcttacaaatcttacggatgatccgtatggaccggaggggcggcacctggaagctcctgggatcggtggtctacgctcacagcaaggagctggtgactgcgtggtacattggcttcctctgcctcatcctggcctcgtttctggtgtacttggcagaaaagggtgagaatgaccacttcgacacctacgcggatgcactctggtggggtctgatcaccctgacaaccattggctacggggacaagtaccctcagacctggaacgggaggctgttagcagcgacgtttaccctcattggtgtctcattcttcgctcttcctgctggcattttgggatccggctttgccctgaaagtccaagagcagcatcggcaaaaacactttgagaaacggcggaatcctgcggcaggtctgatccagtctgcctggagattctatgctactaacctctcacgcaccgacctgcactccacgtggcagtactacgagcggacagtcactgtccccatgatcagctcacaaactcaaacctatggggcctccagactcattccgcctctgaaccagctggagatgctgaggaatctcaagagcaaatctggactcaccttcaggaaggagccacagccagagccatcaccaagtcagaaggtcagtttgaaagatcgtgtcttctccagcccccgaggcgtggctgccaaggggaaggggtctccccaggcccagacggtccggcggtcccccagtgcggatcagagtctcgatgacagcccaagcaaggtgcccaagagctggagctttggtgaccgcagccgtgcacgccaggctttccgtatcaagggcgctgcatcccggcagaactcagaagaagcaagcctccctggggaggatatcgtggaggacaacaagagctgtaactgcgagtttgtgactgaagatcttacccctggcctcaaagtcagcatcagagctgtgtgtgttatgcggttcttggtatctaagcgaaagttcaaagagagtctgcgcccatatgacgtgatggatgtcatcgaacagtactcggccggacacttggatatgttgtcccgaatcaagagcctgcagtccagagtggaccagattgtggggcggggcccgacaataacggacaaggaccgcaccaaaggcccagcggagacggaactgcccgaagaccccagcatgatgggacgccttgggaaggtggaaaaacaggtcttgtccatggaaaagaagctagacttcctggtgagcatctacacacagagaatgggcatcccaccagcagagacagaggcctatttcggggccaaggagcctgagccggcaccaccctaccacagcccggaggacagccgtgaccatgcagacaagcatggctgtattattaagattgtccgctccaccagctctacgggccagaggaaatacgccgcacccccagtcatgccccctgccgagtgtcccccatccacctcgtggcagcagagccaccagcgccacggcacctcccccgtgggagaccatggctcactggtacgcatcccaccaccccctgcgcacgagcgctcactgtctgcctacagtgggggcaacagagccagtaccgagttcttgaggctggagggcaccccagcctgcaggccctctgaggcagccctgcgggatagcgacacgtccatctccatcccttcggtggaccacgaggagctggagcgttcctttagcggtttcagtatctcccagtccaaggagaacctgaatgccctggccagctgttatgcagctgtggcgccgtgcgccaaggtcaggccctacattgcagagggtgagtctgacacagactcagacctctgcacaccgtgtgggccacccccacgctctgccactggtgaaggcccctttggagatgtggcttgggcagggcctaggaagtgattctgggttgggctgctggccccatgccacacccactcttgttcagttttagagctggagttccagggcctttcttaaagtgacagagcggcatagagtagtgtgggttgtgaggatgctcatgggatctcgctctcagggtcaatgtggagtggaaatgaggcagggttccttagcacatacagtaacattttatagaagttcttttccaaccaggagagggtggttgaggccgggccctgtaggcccttgggagctccctatggcagcaaagctagccctgcctagtcttcttgggggacatattgccctgtgagtgaggagggacagcgtgatggttagcctctgtgagtgggggtgtggctgggagcaagtccgtgggaggtagtggtgaaatgaaacaggcccgtctactgctgatagccagtcctgaggcccatgggtctctcagtttagtctgggagctcaggggtatagtaagtcactggaaacggcccactctcacacctgactgcttatccctccatcccgactgcccccagtaaagcattaccagacccactgttgggtgtggctgggcaatgcccctcatccctgggtaacctagctaaagagctgccacaatcttcctccctcttccaggttatgtggatctttccatgggaaccatctttaggtccttctcctggagctgaggaaggagtgaggcctcagggaccaatctggaacttagaattgatccttagactctcttgacttccacctcttaggggaagactcaactcacagccttttctgaaagggtttcttcagcaggttctggctgcctcgtgccaggtactgtagcccagtaggtatgagtcgacacttcaaggcctctgctctttcctggtgtggcactggcctccaggctgtggccagcactttaagagaatcaccagataagcagaccagccttagccagggcacctccttgcctgctgcccacttggctatacggattcaggcagggctaaatgacatgacgtcttcaaactgccggctctctctacacgagagcatggcctttgagcctggtcaaggatccttcccaatgaagctggccatccagtcctttatccaatagtaggtccctggtctgtggcccctgggtgtttgaggaattgggaacaccttggcctctactctggtgaggaataatccctgtccatcctgtgagtgggcatcttgggccatcagcagctgactttagagggaaacatggtagatataatagagccctcggttgtggccccataatatctggcccagaggtgcctggcattaaatgataacattttggggtgggggccctaaaccctcttgccctcagttttcctggtcactgaggacaagcgctacagagcttgtgcttgggcagagctttatttacttcttccacccttttgaaatgtgtgttctggcaggggtagaggcaacttggg

SEQ ID NO: 600 - DNA, 3104 bp, Rattus norvegicus
ggcacgagtctactccacgccttctccgccagtgtactatgcgcagccaccggcgccatccgcttgtcaactttgagctgaaggagcagcaactttgacagtggccgcgggtttctaatctggcttctccttggcaacagtctcttcgaaagtcgagttaaacgaggcaagagtttcctctgagcacccttgttgccttgtttgcaacgggtcccccgccagccgagagtgggattgtgacagccagtcccctagtggaggggacttgtttttctttttctctagagacctttactagcgactggataaagcagtaccgagaaaggacgtaaatagcagagcaactgttaccaagaagacagccaccacccaaagcctgggaggaacgccgggtttcctccaggctgcgcccagtcgcaacattagggaacaatcaggtggtgttcgcaacttttcaaggtcagcctgttggatctgttatttctttcggacccttcgggtgcacagagcttggattagatttggctgggaaatgctcaggacacgaaaccttgaaggattgtagggatgtgttgaggacaccgtccttccccgactgccctgtaccctgccctcccagcagtcttcagctcccctccactagccagcggtgagtatgtgacatgtgcctaaskcwcwgcacmaagtttggcagcaggtgtcggtgctaaggtagagccaggatactaggtgcgccctcgcggagccatgccagccccgggcgcgcctctctctcgcacatcgcggctgctgctccttctgctgttcaaggtttctgtctctgctgccctgagctttgtccctgagcccaggaatggaacttgtttgggggagagctgttccccactgattccacgtcgcagcagggatgccgggggacytaggaattcagcaagagatgctctgmgagtccatrtgcccagagaaaasctggaagcagagktgagagggkcgacctcctgggacctcccaccacccaggggcgrtgacacaggtgtgattgaagaggcagcggcttctgggcccttgggacctccaaccaasccamcaggtgcctggagatggaaaggascscagggtaaagaaccatccggacaywtggggagaagggagcccacggactcccaamtmttccgtcaaacctctgagagaggagagatgagttccaagcgcgacgagattccscagggcagccaggagcacagtgtgaaaacagaacctgaacccagagatcttttytactggccaagaaaaacarramaamwmmagggttcccattacaggccttcagcggtacacgaaggaagaacccttgctcccccaggcagggcgctacctcaaaacgggtctgcagatgactgggtccctgaccaagggggtccacgccgtggaaatagcactaaccgacgcgtgagactgaagaaccccttctacccattgacccaggaatcctatggagcctatgctgtcatgtgcttatctgtggtgatctttgggaccggcatcattggtaacttggcagtgatgtgcatcgtgtgtcacaattactacatgaggagcatctccaattctctcttggccaacctcgctttctgggactttctcatcatcttcttctgcctccccttggtcatcttccatgagttgaccaagaagtggcttttggaagatttctcctgcaagatcgtgccctatatcgaggtagcttctctgggtgtcactaccttcaccttatgtgcactgtrcatagatcgcttccgggctgccaccaacgtccagatgtactatgaaatgattgaaaattgttcttccaccactgccaaacttgcagttatctgggttggcgctctgctcttggcacttccggaagttgtcctccgccagctgagtaaggaggatttgggctttagtggccaggctcctgcagaacggtgtgtcataaagatctctcccgatttaccggacaccatctatgttttggctctcacttatgatggcgcacggctctggtggtatttcggctgctacttttgtctgcccacacttttcaccatcacctgctctctagtgaccgctcggaagatccgcaaggcggagaaagccagtacycgtgggaacaagcggcagatccatctagagagccagatgaactgcacagtggtggctctgaccattttatatggattttgcatcatccccgagaatatctgcaacatcgtcactgcctacatggccacgggtgtctctcagcagaccatggacctcctcaacatcatcagccagttccttttgttcttcaagtcctgcgtcacccctgtactcctcttctgcctctgcaggcccttcagcagggccywcrwggagtgctgctgttgctgctgcgaggagtgcatccagaagtcttccactgtgaccagtgatgacaacgacaacgagtacaccacagagctggmgttgtcgcccttcagcaccatccgcagagagatgtccacctttgcctctgtggggactcactgctgwmggaacggcktggktagctcagattccttcgattttcatagcctgtgawaatttttactcsatatttttccttacaggggaacaaygcamacattttgaaaagcamgtagagggagacatattaactactctagaactgattttgcagattaatatttgtgctctgggaaaaaaaagtttctatttagttatgtaagaagaaggcagtcaacagtctcagatcatttttcctgctctggtgctaatattttattcaagagtcattgcaccttaaccatattaattgttcgatttctttctttttctttcttttgaaaacmtagtcgttgtatattgaagaaggrcctgggattttgctagttattttgtttttgmgttgtgaccgaaagtacattgtatctgaaatgatttgrttttrtcccasccatgaaacttagcaccaaataaactccccatccttmtttaacctgamtgtcaatmtacttttaaccaagactcaataaatttttaattgccttaaatacacaaaaaaaaaaaaaaaaaaa

SEQ ID NO: 601 - DNA, 2451 bp, Rattus norvegicus
ggcacgagtggaggcggacccagctgccagctgcctctcttaattccacacagtccttaggtccctcgccctcacctctctgaggcagctgtgccctgctttcctggccatgcggtggctgtggcccctggctgtctctcttgctgtcgtgttggctgtggggccgagtgaggtctctggggctgccaccttatctttgggtggtcatagagccaaggtccaggagcagcagagtcgaccccgaagaggtaccaaggatgaggggcccaaggaggtacagcactatgtacctgaggagtgggctgagtaccccaagcccatccaccctgctggcctgcagcccaccaagcctttggtggccactagccccaacccagacaaggatggggccacctcagagagtggacaagagctgaggaccaacctgaccgggacaccaagtcagaggctgcagattcagaaccccctgtatccggtgaccgagagctcctatagtgcctatgccgtcatgctcctggctctggtggtatttgctgtgggtatcgtgggcaatctgtctgtcatgtgcattgtgtggcacagctactacttgaagagtgcctggaactctatccttgccagcctggctctctgggatttcctggtcctcttcttctgcctaccaattgtcatcttcaatgagatcaccaagcagaggctacttggggatgtttcttgccgagcagtgcccttcatggaggtctcctccctgggagtcacaaccttcagtctctgtgccctgggcatagaccgattccatgtggccaccagcaccctgccaaaggtgagacccattgagagatgccaatcaatcctggctaaactggctgtcatctgggtgggctccatgatgctggctgtgcctgaactcctgctgtggcagctggcacaagagcccactcccaccatgggaactgtggactcatgtatcatgaaaccttcagctgacctgcccgaatccctctattcgctggtgatgacctaccagaatgcccgcatgtggtggtattttggttgctacttctgtctgcccatcctcttcaccgtcacctgtcagctggtgacatggcgggtgcggggcccaccgggcaggaagcctgagtgtagagcgggcagacatgagcagtgtgagagtcagcttaacagcaccgtggtgggcctgactgtggtctatgccttctgtacgctccctgaaaacatctgcaacatcgtggtggcttacctctccactgagctcacgaggcagaccctggacctcctgggcctcatcaaccagttctccacgttcttcaagggcgccatcactcccgtgctcctcctgtgcatctgcaggccgctaggccaggccttcctggattgctgctgctgttgctgctgtgaagaatgtggtggggcatcagactcctcagccactgtcagcgcggacagcaagcttaaggccgaagtgtcctcctccatctacttccacaagcccagggagtcrcccccactcctgcccctgggcaccccttgctgagcccatgggggaacaggagcaggcacagagcaggcaggggaggggggccatgccgatccatggcggtctgctgattctttcacatggtctcactttggcctctctctcatcctgctgtttagagatggacttggcttattttgtcaacgactgggcttttcaaagctccatctacaaacaatgctgttcttaccctcagagggacctgccagccttgtccttcccacttgtagatggagatctgtctagccrttagagttgcccagcatctccatctggccaccctcgagcccgggcawggccttttgcctgttctccctttggtcttaggatctgactattggctgagcccctccatcatcatgatggatcctgtgttgatgagctccaactattgttggaccmctawrawrwmrawrawmawwtctctacttctacctagctccctatcctggaccaggcacttctaggggggctcacctaaccaagcccaggattccattttttttttttttggttctttttttcggagctggggaccgaacccagggccttgcgcttcctaggtaagcgctctaccactgagctaaatccccagccccccattttttttttggttctttttttcggagctggggaccgaacccagggccttgcgcttcctaggtaagcgctctaccactgagctaaatccccagccccaggattccattttctaaagtgggtctgtcttagccctgaatgtcccttcccttttcccagaggagtctctcacttctgtcttccgttcttagaggtactgcggttgcattgcctgacccctgcctcccgttaggtgctttcctgtagaaggccattctggaaaaacaataaagtaggtacaacaaaaaaattaa

SEQ ID NO: 602 - DNA, 2181 bp, Rattus norvegicus
gaattccggttgtcctccagcacgagcwgcygcccyscgtmksctscsskttgtgcyrgggctttcagttcctcctagcatgactgagatctgaccagccgactcacgagttgcttcttgtgccaccactrcagtgctggggcctcttcatcgctccaaactacagcactgtcatggcagctgcctctacttccagccctgtgatttcacagccccagttcacagccatgaacgaacaacagtgcttctacaacgagtctatcgccttcttctataaccggagtggaaagtatctagccacagaatggaacactgtgagcaagctggtgatgggactgggcatcactgtctgcgtgttcatcatgctggccaatctaytggtcatggtggcaatttacgtcaaccgccgcttccatttccctatttattacttgatggccaacctggctgctgcagacttcttcgctggactggcctacttctacctgatgttcaacacgggacctaatacccggagactgaccgtgagcacatggcttctccggcagggcctcatcgacaccagcctgacggcttctgtggccaacctgctggccattgccatcgagaggcacatcacagttttccgaatgcagctccatacacgaatgagcaaccgacgtgtggtggtggtgattgtagtcatctggactatggccattgtgatgggtgccatacccagtgtgggctggaactgcatctgtgatatcgatcattgttccaacatggcgcccctctacagtgactcctacttagtcttctgggccattttcaacctggtgacctttgtggtcatggtggttctctacgctcacatctttggctatgttcgccagaggactatgagaatgtcccggcatagttctggacccaggaggaatcgggacaccatgatgagccttctgaagactgtggtcattgtgctgggtgcctttattgtctgctggactccgggattggtcttgctactgctcgatgtgtgttgcccgcagtgygatgtcctggcctatgagaagttcttcctcctcctggccgagttcaactckgcyaygarscccatcatctactcctaccgcgacaaagagatgagcgccaccttcaggcagatcctgtgttgccagcgcaacgagaaccccaacggccccacggaaggctctgaccgctcggcctcctccctcaaccacactattctggctggagttcacagcaatgaccactctgtggtttagaaggaagccagccgssctttgtggatytgtgaaccccaccytacccgcattgccagggcaaggtggggcgccagaggagacgaagacactcctgtacttaacactaaccaatggcagtatttgtccctagacccaagagactttaggatgaacttgcttggtagcccccatcttctcctttggaaaagagaaggggaccgtcttgcagtggaattcagaaacggactctggggagaccgtgtatgtagccttcactaactagacttaaaagattttatgtggtttggcctaagccagaaaaaaaaaaacaaatcttcmaaatcaagtacacaattcacacaggcttcccctttaaagaacaaacaacacattgcatttattaataagtatgtatatgtctgacagcatgtttgtgatcgagaagactgctaaactgacttagatgaatttttatccrcgatggaggaaarctataaattagaatgwttttywtkttttktttagaaagcaagcatgtgatgtgtgtatgcagtatgcctttctttaaagataamaggayactattytaaatcttctagggaatagaagagtbtrgwwwmrwrmrraaawmarwattcatttaggctatggaagaaacctaccagttaccttttaagtaatgagacacacatgaaaggcaaaggaatgtgagcttgtcacccaaagagtgtgtactctgcaagctttggagatgaagtgctgtagcgttgtccctgcacagtgaggatatccaagttcgttcttggtgccagagcgtcggtgggatttgttttaaagcctgtggttttccaagttataaaataatacttactatagaaaacttgaaaattgcagaactctgtgaaaaaaggaaaaaaaaaaaammmwmgtgccg

SEQ ID NO: 603 - DNA, 1734 bp, Rattus norvegicus
tctagaagagcagtcagtgctcttaaccactgagccatctctccagcccctttaccttttgttttgttttgttttttcgagacagggtttctctgtgtagccctggctgttctggaactcactttgtagaccaggctggcctcgaactcagaaatctgcctgcctctgcctcctgagtgctaggattaaaggtgtgtgccaccatgcccggctccttttttttttttaagctagttttgagttgttgttgttattgttttaaagatttatttatttattatacgtgagtaacactgtagctgtttcagacaccccagaagagggagtcagatctcattactgatgattgtgagctatcatgtggttgctggaatttgaactcacgacttcagaagagcagtcagtgctcttaactgctgagccatctctccatcccaagttggttttttttttgttgttgttgttttgttttgaggtttttagttcttgagacaagagtctcactatgtagctctggctgtccaggaactatgtagaccaggctggcctcacactcacagagatctgccttcctctgcctcttgagtgctggaattctaaccacttccaacatttttctctttctaaaggtttatttattttggatgtctggagagatggctcagccgttaggagttgttaggtgcacgtgctgttattttatttgcttgggtgtttgactgcatgtatgtctgcacaccattgcatgcccggtacccatgggagccagaagaggatgtcaaatcttttggaactggagttgtgagctgccatgtgagtgaaccaaacctggttcttccacaagagttccaagtgcttttgatcacagcaccatctcaccaggcctactctgaaaattttcatatcctttctgattttttgagtttgaaaaatgagatcagctgggcggtggtggcgcacgcctttaatcccagcatttgggaggcagaggcaggcagatttctgagttcgaggccagcctggtctacagagtgagttccagtacagccaggactacacagagaaaccctgtcttgaaaaaaaaaaaaaaaaaaaaaaaaaagaaaagaaaaaaaaatgagatcaactttagttgatctgtgagtcttctctgttcaggatgctacagatctgagttctccatccatgggaaccatcttggacagagctgagcgccctaaatgtttgacatctttctgaaaaagggcagaaggtccagcaccttcttccaaggtcagtaggggtagagatttcgtagtcaattatcacagggttctcagctggacagccaaggtcccttcctcccctctccgaggagaaaaagaggaggtagctgaagaaaagattgattctctgctcctccctttctctgcctgtttccctcacacccacctctcccccacagcagccttctcccccacagagaccgggataggacagagcggggcggagttggggattgaaggcttggaagccccacagtgccctgtatttgtaggaagccttggctgaggtagctgtgctggtttttgctggtttatgctgtccagctggcatccttttgcaggatgctggggacactggggctttggacactgcttcctgcggcagcacaaggtaagagtctacagagcggggcggggtctttacaccactcagtaagggaaaaggtgtacttgaagcagcagccaccca

SEQ ID NO: 604 - DNA, 1035 bp, Rattus norvegicus
ccggagccggacggctgccccgtgtgcgtgtggcggcagcacagccgccgagtgcgcctggggagcatcaagtcgcagatcctgagcaaactgcggctcaaggaagcgcccaacatcagccgggaggtggtgaagcagctgctgcccaaggcgccgccgctgcagcagatcctggatctgcacgacttccaaggcgacgcgctgcagcccgaggacttcttggaagaggacgagtaccacgctaccaccgagacggtcataagcatggcccaggagacggaccctgcagtgcagacagacggcagccctctgtgttgccatttccacttcagccccaaggtgatgttcacaaaggtactgaaggcccaactgtgggtgtacctccggcctgtgccccgcccagcaacagtctacctgcagatcttacgactgaagcccctaactggggaagggaccgcagggggagggggtggaggccggcgtcacatccggatccggtcactaaaaattgagctacactcacgctccggccactggcagagcatcgacttcaagcaagtgctacacagctggtttcgccagccacaaagcaactggggaatcgagatcaacgcctttgatcccagtggcacagacctggctgtcacctccctggggccaggagctgagggctgccaccccttcatggagcttcgagttctagagaacacaaagaggtcccggcggaacctaggcctagactgcgatgaacactcgagtgagtcccgctgctgccgataccctctcacagtggacttcgaggcctctggctgggactggatcatcgcacctaagcgctacaaggccaattactgctccggccagtgtgaatacatgttcatgcaaaagtatccacacacccacttggtgcaacaggccaacccacgaggctctgctgggccctgctgcacccctaccaagatgtccccaatcaacatgctctacttcaatgacaagcagcagattatctacggcaagatccctggcatggtcgtc

SEQ ID NO: 605 - DNA, 4216 bp, Rattus norvegicus
gcgagtaaacatcccccgaatggatacccgaggcgtgttcgcggcggaggccccgttttcccgggtccgccgatcccgagcctgaggcgacgcagatcggctcagagcggtggcttgggctcctgctagatttgggtctgtggtacaaatggagtttaggactcagtggactcggccctaatgagagaagccccctgtccaagatggagaagaagcggagaaagaaatgaaagcctctttttgggccaagctgtgggtgaccatgggactgaggttttctttacgttggacaagtctgtaggatggctgatcagtaaggttgcagcttttagcgaaaacagaaatccacttctgatcaaggaagagcctagtgcaatttgaatttatgcaattttatgaccatattcacttaggaccatgaagctcgtcaacatctggcttcttctgctggtggttttgctctgtgggaaaaagcatctgggtgacaggctggggaagaaagcttttgaaaaggccccatgccccagctgttcccacctgactttgaaggtggaattctcctcaactgtggtggaatatgaatatattgtggctttcaacggatacttcacagccaaagctagaaactcatttatttcaagtgctctaaaaagcagtgaagtggacaactggagaataatacctcggaacaacccatctagtgactaccctagtgattttgaggtgattcagataaaagagaagcagaaggcggggctgctcacacttgaagatcacccaaacatcaagcgggtgacaccccagcggaaagtctttcgttccctgaagtttgctgaatccgaccccattgtgccctgtaatgagacccggtggagccagaagtggcagtcatcacgtcccctgaaaagagccagtctctccctgggctctggattctggcatgcaacaggaaggcattcaagtcgacgattgctgagagccattcctcgccaggttgcccagacattgcaggcagatgtgctttggcagatgggatacacaggtgctaatgtcagggttgcygtttttgatactgggctcagtgagaagcatccacatttcaagaatgtgaaggaaagaaccaactggaccaatgagcggaccctggacgatgggctgggccatggcacattcgttgcaggtgtgattgccagcatgagagagtgccaaggatttgccccagatgcagagctgcacatcttcagggtctttaccaacaatcaggtgtcttacacgtcttggtttttggatgccttcaactatgccatcctaaagaagatkgacgttctgaaccttagcatcggygggcctgacttcatggatcacccctttgttgacaaggtatgggaattaacagcgaacaatgtaatcatggtttctgctattggcaatgatggacctctctatggcactctgaataaccctgctgatcagatggatgtgattggagtgggtggcattgactttgaagacaacatcgcccgcttctcttccaggggaatgactacctgggaactaccgggaggctatggtcgtgtgaagcctgacattgtcacctatggtgctggagtgcggggttctggtgtgaaagggggctgccgtgcactctcagggaccagtgtcgcctccccagtggttgctggggctgtcaccttgttagtaagcacagtacagaagcgggagctagtgaatcctgccagtgtgaagcaagctttgatagcatcagcccggagacttcctggtgtcaacatgtttgagcaaggccatggcaagttggatctactgcgagcctatcagatcctcagcagctataaaccgcaggcgagcctgagtcctagctacatcgacctgactgagtgtccctacatgtggccctactgctcccagcccatctactatggaggaatgccaacaattgttaatgtcaccatcctcaatggcatgggagttacaggaagaattgtggataagcctgagtggcgaccctatttaccacagaatggagacaacattgaagtggccttctcctactcctcagtgttgtggccttggtcaggttaccttgccatctccatttctgtgaccaagaaggcagcttcctgggaaggcatcgcgcagggccacatcatgatcacagtggcttccccagcagagacggaattaaaaaatggtgccgagcatacttccacagtgaagctgcccatcaaggtgaagatcattcccacccctcctcggagcaagagagtcctctgggaccagtaccacaacctccgctacccacccggctacttccccagggacaacttgcggatgaagaatgatcctttagactggaatggcgaccacgtccacaccaacttcagggacatgtaccagcatctgcgcagcatgggctactttgtggaggtgcttggtgccccattcacatgctttgacgccacgcagtacggcactctgcttatggtggacagtgaggaagagtacttccctgaggagattgctaagctgaggagggacgtggacaatggcctttcccttgtcgtcttcagtgactggtacaacacttctgttatgagaaaagtgaagttttacgatgaaaacacaaggcagtggtggatgccagatactggaggagccaacgtcccagctctaaacgagctgctgtctgtgtggaacatggggttcagtgacggcctgtatgaaggggagtttgccctggcaaaccacgacatgtactatgcatcggggtgcagcattgccaggtttccagaagatggtgtggtgatcacacagactttcaaggaccaaggattggaagtcttaaaacaagagacagcagttgtcgacaatgtccccattctggggctatatcagattccagctgaaggtggaggccggattgtgctgtatggagactccaactgcttggatgacagtcacagacagaaggactgcttttggcttctggatgcactccttcagtacacatcctatggtgtgacccctcccagcctcagccattcagggaaccggcagcgcccacccagcggggctggcttggcccctcctgaaagsaygrrrggaaaccaccttcatcgctactccaaagttcttgaggcccacttgggagacccgaaacctcggccccttccagcctgtccacacttgtcgtgggccaagccacagcctttgaatgagacggcrcccagtaatctttggaaacaccagaagctgctctccattgacctggacaaagtagtgttacccaactttcgctcaaatcgccctcaagtgagacctttgtcccctggagaaagtggtgcctgggacattcctggagggatcatgcctggccgctacaaccaggaagtaggccagaccatccctgtttttgccttccttggagccatggtggccctggccttcttcgtggyacagatcagtaaggccaasagccggccgaagcggaggaggcccakggcaaagcgtccacaacttgcacagcaggcccaccctgcaaggaccccgtcagtgtgatcatcacagtggccagacacagaagctgacaagctttgaacccctctggtggccacacagcatcagagagcatcctgggaagtgcctgtttccaaggagccctatctctggattgtggctggcttagtgtgttctgcccagacgtctatgagkwacatcctgcagtgcctcactgtgtttggctstggccgaaggtgcccagtagytcascctccggtggcatcakgcccagtgacagtkcaccaaagacacagagcctggaagggctgtcgggacatactttctacmtartgctacaaccctgaccaagcgaagacatgcwgrwtwcmggcwmkwkkcyatmktkmykgtgggagtcactttaaagacttgtgctgtctggaagcagagctgttytcttgtcagtcaagtgcagcgacatcctgaggaatcagattccgtgacctcctctttgaygagaggacacatgaactgaagggaacgtgcacagatgtgggagatgcaggtcttcgctttattttttataactatcaactgccrcmatgttttktwwtttggggtctggatttcacygwtgkwggtgaaggaaattttcaataaatatgcataacctthmaaarmwaaaaaaaaaaaaaaaaaa

SEQ ID NO: 606 - DNA, 4417 bp, Rattus norvegicus
gcccctctggtctcatctctgccacgccactgctcagaggcacagaggtaagtttggttactaacattttttgccaatataaatttttagttatatttaaagctagataattggttcctttattaaagtacaaattgagaaaaagaatatatcattaattttaaattttaatttaatattttttaaaacttagtttaatatttagtttaatattaatattggcataactgacaaaactggaacttgaattttaagagacaagagtattgtacctttgatactttaaactggagactggcatggtagcacaaggctgaaattccagcatgggtagcgctgggtatccatcacctcagggcacttagatgactgtctagtgcttaagtatgacaatattcctgttctcaggaagtttccctaagcatcactattaaaggtcggaggaatgtaagagttctaacctcaaaggctcagaaacaatgtacatatgtagacacatatacatgtacacacacatgcacatatcacaccacacacacacacacacacaaaggagacacagcggctgcactgctattctattctttcaattcttctgtaagattgtaacataaaaaggtttccatgtttcccccgcttcttgcttgctctgtgtgaatctggagacatcatggcaggagatggagttctctatgacacacatacaaaaaggccaactcaatccatgcaactctcaagaatacactatatggtgttccctgaaaatacagcttggatgatttactttaaaagcacagcacttcgggctggagagatggctcagtggttaagagcactgactgctcttcctgaggtcctgagttcaaatcccagcaaccacatggtggctcacaaccatctgtaatgaaatctgatgccctcttctggtgtgtctgaaggcagctacagtgtactcatacaataaaataaaatcttaaaaaaaaaaaaaaaaaagcacagcacttcaattcaaagacagtaacttgaatgcaaacacaagttacaggtgtctttaaatgccttaattgttttatgaaactgatgagcaaaatagaaagatttacctgtcagatctctaattttcagtgcataaaataactttatatttttcccttcctctaagaagagaataatgaaactatggcttatggcttttggatatagaataatgaactatggctcatggcttttggatatagaataatgaaactatggctcatggcttttggatatagaataatgaactatggctcatggcttttggatatagaataatgaactatggctcatggcttttgctgatgcttaccctcccaagccacccgagcccaaccggaatgtgtctgtgtctgcagttccaggataagacgaagaatagctttaccactgggctcagactagtccccttgagcacacattaactgaagttggcttttcttctgttctttaatattactgttactaattgctgttttagccaagggtacttttaattgtaatcataaaaacacttccattaagttgcttctgtcctccctttctttttagagagatgtattttctttttatttgtgaatatgcacttgtctgttcaagtgtgcaccacatgtgtgcagattgccagacgagtgtcaaaaccccttggaactggagttacagatggctgagccacctacctggagggctgggacctgaactcttgttcctctgaaaagtaggaagtactgagtgctgagccccctctctagcccgtttactgtcagtgacacccatgctgattctgtcttgaaatagctctggttgtagctgcatacattaggtactgttcctagaaactgttccacatgtgcagattatgcagcaccggtctcagcaaagtgctgaggaggctcaggcatattcagaatcagaaaacctgtgagtctttttccaaaataagcacttctgaagccccgcagccagctgtagatatagctaggagagcgccctgctagcgctgagagccctgtctcaccccagcactgtacagaatagttacggtgatacagttctacaactgaggaggtataggtaaaagggtcagaaacttaaggtcgaccttgggatacaagattttcagctggcctgagatgctcaatgtctttttaaaaagtccctcagaaataaaaccatgttagggccaggaggtggaaataccacgcctttaatcccagtgcttgggaagcagaagaaggctgatctctacaagttcaaccagcctggtctaaagagccagttccaggacagtcaaggctgttgagaaaccttgtctctaaaaaatcaaatcaaaacaaacaaaaaacaaagctgggaatgctaattttagccacattgtaggggataggccctaaggacaaagattgacaacagctgctccccaagcgtgagcagttctgagtgtcctggcactctacggcaagcaaggcaggccttgtgagaccagggacctggtttaaccaacctggttcaaatctagtcattatctaccatccctcaatccctacattttagagctagggactgaaccctggtcccatgcaatctgtgtgagagtagttaatatttatctatattcctggctcaaaccactgccatctcttagtagctgcaaaggaaggctacatctcatgataggttaaaatcgtggcagaatttcaaatagagcatctgcaaagctagtccctaactgtcttcaggtcaaacaggtctgaatactttattaggagccagcaacccttaatgaatatagactggcaacagatattctaaaccaagaaatggtcacaggcacaaaacagacttctctttttcctagaagatatgcctagctgctgagacagggaagcaataagagaggccatctacctctttagtaactgagagaccgactggaagggaaatcaaagccactgggcagaaaagctggatctgataagtcatcaagttctcctcaaaaacaaggcaagggatgagcagataaagaacataaaataccccacctgtccacctgtccacctgtctgcctgtctgtctgtctacagacctctacaaagagtgggcctgacagcgccctcccgcagaccctgtgcacagtgagactgcaaacaggaggtagaaaagattttctttctcctgacagtaaatctctccctacagcaactcacattaacccaatagcccttgaaactacaggagagacacgggcccccagccaaactccttccagtgggtcctaagagagtcttgccaaattccaagacttagacaaattaaccaaatgactgcacagagcacagcaatctttatgatatgtttctagaaggctggttcatgttcattcacaatgtcctccttctccctcagtgagcaacagtttggtagcgctgagtccatccactggaaattctcctcctgtctcaggtatcactctagctcaactcttatgaaacctctttgactctctgggcaccccaccctctccctacttgtcccatgagtctgtgcccttcagcaggcagacgtcaatgtctctggtgccagccctgttttctggagacagatgatgatgttggtgaaaaagagactctggggctctcctgggttccctcttttccaccattaaagaagatgttcttacatcagtgaaccagcccagcaggcgaaggcgctacttgtgcaagcacggctacctgagcttcatctccaccacccacataacggtggaagaaccaacccatctgactgcggcatacatgtttacatgtgtgtgcacaccacacacacacacacacacacacacacacacacacacaccacacacaccacacacacacacacacaccacacacacacacacacacacacacacacacacacacacacacatatggggtaggggtggtgggagtggggggtggtgggagggttggaatcatgtcctcctgggtctctctgctctctgtgtagccctggctgtcctggaactcgatttgtagaacaggctggcctcgaactcacagagatctgcctgcctctgcctcccaagcactgggattaaaggtgtgcaccactgcccggctgcagtgaaataactttctggatgggggtcaccacaacacgagaaactgtattaaagggttgcagcatgaggaaggtggagaagcactgctctaggggctcatagatccaggagatgtatgaaacttacacacactcacactggtgtgagccgtggtgctatcaagttagacctgagagagcccactgcagggtggcagcagccaggctgcctggtgctcactgttgtctgttttacagcggctttagctctgcagaaatg

SEQ ID NO: 607 - DNA, 1459 bp, Rattus norvegicus
gtacccagggtccccctttggccagcctgcaggacagccacttcctcaccgacgccgacatggtcatgagcttcgtcaacctagtggagcacgacaaggaattcttccaccctcgataccaccatcgagagttccggtttgatctttccaagatccccgagggagaggcggtgaccgcagccgagttcaggatctataaggactacatccgggagcggtttgacaacgagaccttccagatcacagtctatcaggtgctccaggagcactcaggcagggagtccgacctcttcttgctggacagccgtaccatctgggcttctgaggagggctggttggtatttgacatcacagccaccagcaaccactgggtggtcaaccctcggcacaacctgggtttacagctctccgtggagaccctggatgggcagagcatcaaccccaagctggcaggcctgattggacggcatggaccccagaacaagcaacccttcatggtggcyttcttcaaggccacggaggttcatctccgtagcatccggtccacggggggcaaacaacgcagccagaaccgctccaagactccaaagaaccaagaggcactgaggatggccagtgtggcagaaaacagcagcagtgaccagaggcaggcctgcaagaaacacgagcygtatgttagcttccgagaccttggctggcaggactggatcatcgcacctgaaggctatgctgcctactactgtgagggasagwgkgccttccctctgaactcctacatgaacgccaccaaccatgctatcgtccagacactggttcacttcatcaacccagacaccgtacccaagccctgctgtgcccccacccagctcaacgcgatatctgtcctctacttcgacgacagctcyaacgwmwtcctgmagaagtacagaaacatggtggtccgggcctgtggctgccactaggtcttcctgagaccctgaccttttgggaccgcattttttccagatccccaatgtctcwccacctaggtctctcactgcccaccttggcgaggagccaacagaccaagcacctctcytgagccttcccmtcacctccccagctggaagcgtgcaaggcattagaaacctgagcacaccgtggttgataagcagcayactttcattccggcacatkccgcttgagatcstacacactgcctctggaaacgactagcaggaaaaatgtcttccaagaaagaatccgttggccatgttggtccctggcgctcggaacctttgaggggtaattacaagcacctccttcggctgcagcaggaggaagggcataaccagggtgggcgcttacgtctgtgctgaaggaaaaccaagcagaagtccctgtaataaaatgtcacaataaaammaaammmwmctgawramwraaaawrrwwaggatgttacagaaaaaaaaaaaaaaa

SEQ ID NO: 608 - DNA, 888 bp, Rattus norvegicus
actcccacactgagtcagctagacagtaacaactgctcgttcgttttcgtggacaacctgaggaaaaccttgcagctggcagtccacattcccaccttcctcctcggcctggtcctcaacctcctggccatccggggcttcggtgccttcctgaagaggagacagttggaatacatggccacttctatctacatgatcaacctggcttgcttcgacttactgcttgtgctctccctcccattcaagatgatcctgccacaagtgaagtcctccccctcactggtcttctgcacatttgtggagtgcctctacttcatcagcatgtacgggagtgtcttcaccatctgcttcatcagcctggacaggctcctcgccatccagtaccctcttctggtcaatcacttccggtcccccaggaaaacctttgggatctgctgcatcatctggatgctggtatgggttggaagcatccccatctacactttccacaggggagtggagggatacaagtgcttccacaacatgtctgacagcacgtggagtgcgagagtcttcttccccctggagatctttggcttcctccttcctatgggcatcatgggcttttgttcctataggagcattcacattctactgagcattcagggggacgaccagtgggtccgaaagagagcctgcatcatctggaccattgctaccaatcttgtcgtcttcgtggtctcctttctcccagtgcacctgggtttgttcctgcagttcctggtaaggaacggctttatcttgaattgcagagtgaagcagggcatcagcttgttcctgcagttgtctctgtgtttctctaacatcaactgctgcctcgatgttttctgctattactttgccatcaaa

SEQ ID NO: 609 - DNA, 8040 bp, Rattus norvegicus
atggctcatgccgcttcccagttaaagaaaaacagggatttagaaatcaatgcggaagaagagaccgagaaaaaaaagaagcaccgtaaacggtcccgggatcgcaagaaaaagtcggatgccaatgcaagttacttgagagcagctcgggcggggcacctggaaaaggcccttgactacatcaaaaatggagtggacgtcaacatctgtaaccagaatgggttgaatgcgctccatcttgcttccaaagaaggccatgtggaagtggtctccgagctgctgcagagagaagccaacgtcgatgcagccacaaagaaaggaaacacagccttacacatcgcatccttggctggacaagcggaagtggtcaaggtcttggttacgaacggagcgaacgtcaacgcacagtctcagaatggcttcacgccgctgtatatggcggcccaggagaaccacctggaagtcgtcaggtttcttctggacaatggtgccagccaaagcctggctacagaggatggcttcacgccattggccgtggctcttcaacaaggtcacgaccaagtcgtatccctcctgctcgagaacgacacgaagggaaaagtgcgcctcccagccctccacatcgcggcccggaaagatgacaccaaagcggcagctctgctcctacagaacgacaccaatgcagacatagagtcaaagatggtggtgaatagagcaactgagagtggcttcacctcactccacatagctgcccactacgggaatatcaatgtggccacgttgctgttaaaccgagcggctgccgtggacttcaccgcacggaatgacatcactcctttgcatgttgcctcgaaacggggaaacgcaaatatggtaaagctgttgctcgaccggggtgcgaagatcgacgccaagaccagggacggtctgaccccgctgcactgcggggcgagaagtggccacgagcaggtggtagagatgttgctggacagagccgcccccatcctttcgaaaaccaagaatggactgtccccactgcacatggccacacaaggagaccatttaaactgcgtccaactcctcctccagcacaacgtgcccgtggatgacgtcaccaacgactacctgaccgccctccacgtggcggcccactgcggccattacaaagttgccaaggttcttttggataagaaagctaaccccaatgccaaagccctgaatggcttcacccctctccatatcgcctgcaaaaagaaccgaatccgagtaatggaactccttttgaagcacggtgcatctattcaagccgtaaccgagtcgggccttaccccaatccatgtcgctgccttcatgggacatgtaaatatcgtgtcacagctaatgcatcatggagcctccccaaacaccaccaacgtgagaggagaaacagcattgcatatggcggctcggtcggggcaagcagaagtggtgcggtatttggtacaagatggagctcaggtagaagcaaaagctaaggatgaccagaccccactccacatttcagcccgactcgggaaggctgacatagtgcaacaactgttacagcaaggagcgtccccgaatgcagcaacaacttccgggtacaccccccttcacctttcggccagagaggggcatgaggatgtagctgccttccttctggaccatggagcatctttatccataacaacaaagaagggattcacgcctctgcatgtggctgcaaagtatgggaagcttgaagtggcaagtctcctgctgcagaagagtgcgtctcctgatgccgctgggaagagcgggctaactccactgcatgtagcagcacattacgataatcagaaagtggcccttctgcttttggaccagggagcctcaccccacgcagctgcaaagaacggttatacgccactgcacatcgccgccaagaagaaccagatggacatagccacgtccctgctggagtacggtgctgatgcaaacccggttacccggcaagggattgcgtccgtccaccttgcagcgcaggaagggcacgtggacatggtgtcgctgctcctcagtagaaatgcgaacgtcaacttgagcaataagagcggcctcaccccactccacctggcggctcaagaagaccgagtgaacgtggctgaggtccttgtcaaccaaggggcccacgtggatgcacagacaaagatgggctacacgccgctccatgtgggctgtcactatggaaacatcaaaatagtcaattttctgctgcagcattctgcgaaagttaatgccaagacaaagaatggatacacgccactgcaccaggcagcccagcagggccacacacacatcatcaacgtcctgctccagaacaacgcttcccccaatgaactcactgtgaatgggaacacagccctggccatcgcccgacgccttggctacatctcggtggttgacaccctaaaggtcgtgacagaggaaattatgaccaccactaccatcacggagaagcacaaaatgaatgtcccagaaacaatgaatgaagtcctcgacatgtcagacgatgaagttggtaaagccagcgcccccgaaaagctcagtgatggggaatatatctcagatggtgaagaaggtgaagatgccatcacaggggacactgacaagtatctcgggccacaggacctcaaggagctgggcgatgactccctgcctgccgagggctatgtgggcttcagtctcggagcccgttctgccagccttcgctccttcagttcggataggtcctacaccctgaacagaagctcctatgcgcgggacagcatgatgatcgaggagcttctggtgccatccaaagagcagcaccttccattcacgagggagtttgactccgactccctcagacactacagttgggcagcagacacactggacaatgtgaacctggtctccagccctgtgcattctgggtttctggttagctttatggtggacgcgagagggggctccatgcgaggaagccgccaccacgggatgcggatcatcatccctccgcgcaagtgtacggcccccacccgcatcacttgccgcctggtaaagagacataaactggccaacccaccccccatggtggaaggagagggattagccagtaggctggtagaaatgggtcctgcgggggcacaatttttaggcccggtcatagtggaaatccctcattttgggtccatgagaggaaaggagagggaactcattgtcctccggagcgagaacggagagacctggaaggaacaccagtttgacagcaaaaacgaagacctctcggagctcctcaatggcatgsacgargaacttgacagcccagaagagttgggcacaaagcgcatctgcagaatcatcacgaaggatttcccccagtatttcgctgtggtttcccggattaagcaggaaagcaaccagattggtcccgaaggtgggattctgagcagcaccacggtccccctcgtccaggcgtctttcccagagggtgccttaaccaaaaggatccgtgtgggtctgcaggctcagcccgtaccagaggagactgtgaaaaagatccttggaaacaaagcaacgtttagcccaattgtcacggtggagccgaggaggaggaaattccataagccgatcaccatgaccatcccggtgcccccaccctcgggagaaggcgtgtccaatgggtacaagggggacaccacgcccagcctgcgactcctctgcagcattacaggagggacctcgccggctcagtgggaagacatcacaggcacaaccccgctgaccttcataaaggactgtgtgtctttcacaaccaatgtttcagccaggttctggctggcggactgccatcaggtgttagaaaccgtagggctagcctcgcagctgtacagagagttgatatgtgtcccctacatggccaagtttgttgtttttgccaaaacaaacgacccagtggaatcctccctaaggtgcttctgtatgacagacgacagagtggacaaaaccctggagcagcaggagaatttcgaggaggttgccagaagcaaagacatcgaggttctggaaggaaagcccatctatgttgattgctatggaaacctggctcctctgaccaaaggagggcagcagcttgtttttaacttctattctttcaaagaaaacagactgccattttccatcaaggttagagacaccagccaagagccctgcggccgtctgtctttcctgaaggagccgaaaacaacaaaaggattaccccaaacggctgtttgcaacttaaatattactctaccggcgcataaaaaggctgagaaggcagacagacgccagagcttcacatccctagccttacgtaagcgctacagctacttgactgagcccagcatgaaaacagttgaacggagttcaggaacagcaagatcccttcccactacttattcacacaagccattcttttctacaagaccataccagtcctggactacgactcccataacagtgcccgggccggccaaatcaggctccttatccagctccccctctaacacgccgtcagcgtctccgttaaaatccatatggtctgtttcaacgccttctccgatcaaatccacgctaggcgcctcaactacgtcatcagtcaaatccattagtgatgtggcgtctcctattagatctttccggacaatttcttcgccaataagaacggtggcatcgccgtctccatacaatacccaagtagcctctggtacccttgggagggtacccaccatcacagaggccacacctataaagggggtggctcccaactcaactttgtcctctcgaacttctcctgtgacgaccgcagggtctctgttggagaagtcgtccatcaccatgacaccccctgcctcccccaaagccaacatcaccatgtattcctccagcttgccatttaagtccattatcacgtcagcggcaccgctgatctcctcccctttaaagtcagtggtgtctccgaccaagtctgcagctgatgtcatctcaacagctaaagctgcgatggcatcgactctctcctcccccttaaagcagatgtctggacatgcagaagtagcgctagtcaatgggtctgtttctcctctgaagtatccttcctcttccgctttaattaacggatgcaaagccactgccacattacaggacaaaatttctacagccacaaatgctgtgagctcggtggtgagcgcggcccctgacacggtggagaaagcgctctccaccacaacagccatgcccttttccccactcaggtcttacgtttccgctgcagcgccctctgcttttcagtcccttagagctccctctgccagtgcactctacaactccctcgggccttcagtaggtgttactacctcatccgtaacttcatcgataatcacagtgccagtatactcggtaggcaatgttttggcagaaccagcattgaagaaacttccagactctaactcgctcacaaaatcggcagcggctttgctgtcgcccattaaaacattgactacggagacacgtcctcagccccatttcaatcgaacgtcatctcccgtcaagtcctctctgttcctggcatcctcggcccttaagccgtcagtaccatcttctttatcttccagtcaggagatcttaaaagatgtggccgagatgaaggaggacctcatgagaatgaccgccatactgcagacggatgtgcctgaggagaagccattccagaccgacctcccccgagaagggaggatagacgacgaagagcctttcaaaatcgttgagaaagtgaaggaagacttagtcaaagtcagtgagatactcaaaaaggacgtgtgtgtcgagagcaaagggccacccaagtccccaaagagtgacaaaggacactctccagaagatgactggacggaatttagttctgaggaaatacgagaagccaggcaggctgctgccagtcacgccccatccctgcccgagagagtacatggaaaggccaacctcaccagagtcatagactacctgaccaatgacatcgggagcagttcactgaccaacttaaagtacaagtttgaagaggctaagaaggaaggagaggagagacagaagagaattttaaagccagccatggccttgcaggagcataaactcaaaatgccgccagcctccatgagaccttccacctccgagaaggaactgtgcaagatggcggactccttttttggaacagatgccatcctagagtctcccgatgacttttctcaacatgaccaagacaaaagtcccttgtccgacagtggctttgaaacccgaagtgagaaaacaccttcagccccccaaagtgccgagagcaccggccctaagccactatttcatgaagtccccatcccccctgtcatcacagagacgagaactgaagtagtccacgtgatcaggagctacgagccctctactggggagatcccccagtcccagccagaggaccccgtgtctcccaaacctccccctacatttatggagttggaaccaaagcccaccgcccttagcattaaggaaaaagtgaaagcattccaaatgaaagccagtagcgaggaagaggaccacagtcgggttttaagcaaaggcatgcgtgtcaaagaagagactcacatcaccacaaccacgaggatggtgtatcactccccgcctggcagtgagtgtgcctccgagaggattgaggagaccatgtcagtccatgacattatgaaggcttttcagtccgggcgagacccttccaaagagctggcggggctgtttgaacacaagtcggccatgtctccggatgttgccaagtctgctgctgagacctcggcccagcacgcagagaaggacaaccaaatgaaacccaaactggagcgtattatagaggtccacatcgaaaaaggtccacagagtccttgtgagcggacggatatcaggatggcaatagtagccgatcacctgggacttagttggacagagctggcaagggaactgaatttttcagtggatgaaatcaaccaaatacgagtggaaaatcccaattctttaatttctcagagcttcatgttattaaaaaagtgggtgacgagagacgggaagaatgccacaactgatgccttaacttcggtcttaacaaaaattaaccgaatagacatagtaactctgctggaaggaccaatatttgattatgggaatatttcaggcaccagaagctttgcagatgaaaacaatgttttccatgacccagttgatggttggcagaacgagacgccaagtggaagcctagagtccccggcgcaagcgcgaagaataaccggtgggttactggaccgtctggacgacagctctgaccaggttcgggatcccattacctcatacctcacaggagaagctgggaagttcgaagcaaacggaaaccacgcagaagtcattccagaagcaaaggccaaggcctactttcctgaatcccaaaacgatatagggaaacagagcatcaaggagaacttgaaaccaaaaacacacggatgtggtcgcgctgaggaaccagtgtcgcccctcacagcctaccagaaatctctagaagaaaccagcaagcttgtcatagaagacgcacctaaaccctgtgtgcctgtcggcatgaaaaagatgaccaggactccggctgacggcaaagccaggctcaacctccaggaagaggaggggtccgccaggtcagagcctaagcagggagaaggctataaggtgaaamcaaagaaggaaatccggaatgtggagaagaaagcccactagtgacggtgacgtcagtccaggtgggaagcacacttatgtccgcagctagatttaaaagtctcgagaagtttctgagttcgtctttcctttctctttctttactgcaatctcactgggagatgaaattaaataaatcctgtcatttctttatacgaaaaaaaaaaaaaaaaa

SEQ ID NO: 610 - DNA, 4756 bp, Rattus norvegicus
ggtccgcaggaagccctcgtcatttccgccgggcggctcgtcgtcgtgccgggggctccactcccgcgcgccaggcgagcgagcgggcaagttggctgcggccgtgcgccggcgtctcttcccttccccgccgcgaccctcggcggctcgagccatgaactgaagcccctcgggacgcacaccccgggctgagccgcggacgctgcagctgcggtggcagcctgggctgggacagagccgaccccggcgcgttatcccggccggccggctggccgtcgccgctcccaccgcggccgcctccgacgctccagcctccggacggacacacaaaagccaccctctccmtgtcgcccaccccaggaggctgcggccggccactgaccccacctgagggcgcagcgggctgcggacttggctttctgtccgagctccgcgtcccacgcggcaccaaccccgccgcccatggctctgataatggaaccagtgagcaaatggtctccgagtcaagtagtggactggatgaaaggtctcgatgactgcttacagcagtatattaagaactttgagagggagmmgatcagtgsmgaccagctgctacgcattacacatcaggagctagaagatctgggagtcagccgtattggycatcaggagctgatcttggaggcagtcgaccttctgtgtgcactgaattatggcttagaaacagaaaatctaaaaaccctttctcacaagttgaatgcgtctgccaaaaatctacagaacttcataacaggaaggaggaggagcggccattatgatgggaggaccagccgaaaattaccaaatgactttttgacctcagttgtggatctgattggagcagccaagagtcttcttgcttggttggacaggtcaccatttgctgctgtgacagactattcagtcacaagaaataatgtcatacaactctgcttggagttaacaacaattgtgcaacaggattgcactgtctatgaaactgaaaataaaattcttcatgtgtgtaaaactctttctggggtctgtgaccacatcatatccctgtcgtcagatcctctggtttcacagtctgctcaccttgaagtgattcagctggcaaatatcaaaccaagtgaagggctgggtatgtatattaaatccacatatgatgggctccatgtaattacgggaaccacagaaaattcacctgcagatcggtgcaagaaaatccacgctggggatgaagtgattcaagtcaatcatcagactgtggtggggtggcagttgaaaaatttggtgaatgcactacgagaggacccgagtggtgttatcttaactttgaaaaagcgacctcagagcatgcttacctcagcaccagctttactgaaaaatatgagatggaagccccttgctctgcagcctcttatacctagaagtcccacaagcagcgttgccacgccttccagcaccatcagtacacccaccaaaagagacagttctgctctccaggatctctacatcccccctcctcctgcagaaccatacattcccagggacgaaaaaggaaaccttccttgtgaagatctcagaggacatatggtgggcaagccagttcataagggatctgaatcccccaattcatttctggaccaggaatatcgaaagaggtttaacattgttgaagaagacactgtcttatattgctatgaatatgaaaaaggacgatcaagtagtcaaggaagacgagaaagcacaccaacctatggcaagctacgacctatatctatgccagtcgaatataattgggtgggggactatgaagatccaaataagatgaagagagatagtagaagagaaaactctctacttcgatacatgagcaatgaaaaaattgctcaagaagaatacatgtttcagagaaacagcaaaaaggacacagggaagaagtcaaaaaagaagggtgataagagtactagcccaactcactactccttgctgcctagtttgcaaatggatgcattgagacaagacatcatgggcacaccagtgccagaaaccacactgtaccatacatttcagcagtcctctctgcagcacaaatcaaagaagaaaaacaaaggagctatagcaggcaagagcaaaagaagaatttcttgcaaggatcttggccgtggtgactgtgaaggatggctttggaaaaagaaagatgcaaagagctatttttcacagaaatggaagaagtactggtttgtcctaaaggatgcatccttgtactggtatattaatgaagaggatgaaaaagcagagggattcatcagtctgcctgaatttaaaatcgatagagccagtgaatgccgcaagaaatatgcattcaaggcctgccatcctaaaatcaaaagcttttatttcgctgctgagcatctcgatgacatgaacaggtggcttaatagaattaacatgctgactgcaggatatgccgaaagagagaggattaaacaagaacaagattactggagtgagagtgacaaagaagaagcagatactccatcaacaccaaaacaagacagccctccacccccatatgacacatacccacggcctccctctatgagttgtgccagtccttatgtggaagcaaaacacagccggctttcctccacagagacctctcagtctcagtcttcacatgaggaatttcgacaggaagttactgggagcagtgctgtgtcccccattcgcaagacagccagtcagcgccgctcctggcaggatttaatcgagacgccactgacaagttcaggcttacactatcttcagactctgcctctggaagattctgtcttctctgactcggcagccatctcccctgagcacaggcggcagtccactcttccaactcagaagtgccacctccaggatcattatggcccataccctttagctgagagcgagaggatgcaagtgttgaatggcaatgggggcaagcctcgaagttttactctgcctcgagatagcgggttcaaccattgctgtctgaacgcaccagttagtgcctgcgatccacaagatgacatacagccaccagaggtggaggaagaagaggaggaggaggaagaggaggcagcaggagaaaacataggcgagaaaagctaatacactgcgagagttggtagaacctctccatgccatatcggatccacttctgttggcactcaacccattggaatcacagattgataagctaatgtttagagaatttagatggaagagagtcggcacggcgcagactcaacatcaacctcttgcaagcaactaaaatggcctcgtccttgctgtttataacagaaaacagacttgtaaaaagcttagatcatcaagtgttgtggatttggggcctctaaagggatattaagaggggcaggccactcttaagaagaattcgagctttcaacaatgggactagcataagatcaaagccaatcaagatggaccacagtagccgagaactgccctttttatgggagaacagagggtaaagggtcttgcctggggaagggttctgtggcgacacctcagttgtcttctcctgacatcaggaagagagggctcagcaccaatgattagaaaatcctggctgttaaatggactcttggtgggatggcaagactcttcattgttaaggcaaagcagcggaagcaaattctgtgttaagtgtatttgcatttttcaaatttgacatgctgtattgtactaaattaagtgtaatctattaaggcaaggtgtacacaccctgctcagaaactcaatatgtttattctattattaaagcatattcaggtgtaaggcagactgctttcagtgacactaatgaaggaaatttctcatgccaggcattattagattcctcagcgaaaaatcctaactttctccttttccttggcacttacatagaagtgatgttgcttcataagctggaatgagctattctttttctgtaaaatattccaatctataggctgtggttttccatatttgaaaaagtattttgtctggatgtctttcaaattagcttcagatattatttcatactctgtaactgggcccccgtggctcaatattgcttcttttttcttctgtggtagatgtgaaatttcctttagttggatgaggtacactgtaatgattttaatgctaattaatgaatatttcatacttgtgcagtgaaaaaataatttaatattgtattatgaaatgtttttcttccwgttgctgcagtgtgtggtattgcataatatgaatacctgtaaaaaatataaattgcttaaaaataaaaatattaccagttggtaccagatctttttagatagctaaataatttgctaagtatgcttgatagcaaatrtctttctaacaaaraaaaatctatgcttctttctcacaaatgaaatytygtksygaatwmaaatcacattgatytgccttagaattgcctctgtgctctaaccattwtcatgtgtttttaagtatatctaaagattggtagttcttggtatagagaaataagtcatatttattttattggcatttaatattaatgaaattytcttgggtcatgttccctgkttaaatctgagtaaaactttatgatctgaagaattttggggggacagggggttcctcattaatgagtgtggtgactgtgtattaattttcaaataaaatcccttagtttggctttgaaaaaaaaaaaaaaaaa

SEQ ID NO: 611 - DNA, 898 bp, Rattus norvegicus
cacgatggctgagctgcggtgaggagactcgctccgcccggctgctcctcccacaacctatcggcgcggggctgctcctggcaaagaggaccagacgcgaggawkgcacascacccgmtwgggccctycaccaacagccccakctggcgacatcaattcccaccgatttaccggactwstgmyytagrmtcmaatgccaactatgtcsaggcctgcactgratgtcaagggtggtaccacctctggaaaggaagaygccaaccrsgagatgarctctctggcctactctaacctcrgggtaaaagatcgyarggyagkgaccgksctgcactaccycggggtsascgyamatggagccaaagccaatggagtgcccaytagcccstytggatcatcatcthcaacaggctctvctactgccaccccttctaccaracscmcatmcttcaacytgcwmccyaccystsacytgstgrycagtrtgcarckkcasrmgstyawtagccrgtaccaaggggctgyagygactgmtgctgctgccstggctgcaccaagccarccaggrgaggatgagcccmtgytaaactgggscactggratccaggcaggagcagggggatcacccggatcagtctstcctgytggtgcccagasccctgckmtcattgattctgacccrrtgsrtgaggagstgytgatgtctctggtggtagaattggggctagaccgmsccawtgagcttcccgagctgtggctmgggcagaatgagtttgatttcactgcagattttccctytggctgctgatgccaagtgcccytaaaaaaatgaggwawaaaagccaccagttctgttstaaataaaagttaacttgcaargrrrraaaaaaaaaaaaaaaaa

SEQ ID NO: 612 - DNA, 4111 bp, Rattus norvegicus
gatccagccgttctgcttggaacatgcgttacaaacagctagtgggcaggcagcttgtgcagaaccgggactcgcaaggacttagccatcggtcggtgtctctgtctgaccttaggagcagcggcatggattaggaacagcaatcctgtcagtttctgcagactttgttttctccttccaaaccttcagtatcggcctcatcaatgacaaaatataagctgcatctgtgtccactctctctctagactgaagccctggcaacgtcacaggagcaaccttgaggttcatttcttttagcccctattttgcctctcggccaacctcaggtggagaagacccttctcccaaggcctccagttccactcctccttcctctccttgaggggagaaggaaaaggaaagatttgtctccatgtaggggtctgaaagtcagcctgcagcattttgttcccagcaggcacacccgtggtaccatagaggtcaagcactgaagaaggtggactaggggtggaggtgaggatcctttagctcttgcttggggagtaagaggctattgggacagtcctgcttacattaaggttttgcaagctcagctggggcccactatggagagaccaagacttccactttctaggggtctcagttattcctgtgaactgacattgtgactctggggtagcctttccaaatctgtggataagtgctgaaatgagcccttggtatctggggcccaaaggtgttgtagtctgtgtggagaaactgaggcctgggaaagaaaaggattcttgcccacggtcctccacggcagtccttactgagtacctgcttttcttgagcagcattccctagagcattctagagcagcctcagctacgacctgtggggagaggggaggtgtgggaggaaagtggaggcggatccctcagggaagcaatcacagcgcctgctctgcctggctgtgcagctgttagtgggagctctctccgagcagcgggtttggcttggaccctgctcttgctgcctgtgagggtaagaatggttacttgccacttgcggccataactggaggataggaccagaaggctcccagatctttccagaaaggaactctggggagtgtctgaggtgaccttaggggcaggggtgtcccttggatggggatggtagtcctctgaagggatggagcaaaatgagttggtcttggagactggctcagtgtgagaaggctggtggaatggggaaagcccagtggggaaagaaccttccttgagggagggtcttgtgggactggggacccggaggactggccaggcagctacagaaagtttgaaaaactactcaaggggagccaacatagacatcaacttgccttgacttcaacttgcacccatagattaaatcaaaaacaacaagatcttcagccactagtccaagctgggagggtgggtatctgtaataccccgggtgagaaagatgcatggggacaggtcagtgagaaatcctagttctgtttgtattctctcctgtgtctgccctgaagagactggagaaggaactatctccctgagaagggttgggtaaagatcttggtaagacttctttggaaccagtcagctcttggggcctgtgtcccgacagaccgactgtcacagattgggcaagatgggagtcattctcaggtggatgtctggcccacgcctgactctgaaskggrcwgggkggtksagskmktsmcyragrctctctctykssakgtggakctymswacccwgragccgmsaggagccaggccagatcccctggagaagtcatgattttgggagatgcagagtcgtctgtgagaacgtcttcggggagctctctctgggaacgctcgtggctcttgtraggaaagggctgcggggcttgggtgggtggacggctgggctgcagctatggaccgagagctggcccaggcctgcatccctkctgagcctgcccaagtgtggctgctcccaccatgggctcctcggtgtacatcacggtggagctggccatcgctgtgctggccatcctgggcaacgtgctcgtgtgctgggccgtgtggatcaacagtaacctgcagaacgtcamcaacttctttgtggtatcgctggcggcggctgacattgcagtgggtgtgctcgccatccccttcgctatcaccatcagcaccggcttctgcgccgcctgccacggctgcctcttcttcgcctgttttgtcctggtcctcacgcagagttccatctttagcctcttggctatcgccatcgaccgctacatcgccatccgaattccactccggtacaatggcttggtgacaggtgtragggcgaagggcatcattgcaatttgctgggtgctgtcgtttgccattggcctgacccccatgctgggctggaacaactgcagtcagaaagacgggaactccacgaagacctrcggcgagggccgggtgacctgtctgttcgaggacgtggtgcccatgaattacatggtttactacaacttctttgcgttcgtgttamygccccttctgctcatgctggccatctacctacggatttttctggcggcccggagacagctgaagcagatggagagccagcccctgccaggggagcggactcggtccacgctgcagaaggaggtccacgctgccaagtccctggccatcatcgtcgggctctttgctctgtgctggttgccgctgcacatcatcaactgtttcaccttcttctgctccacgtgccggcacgcccctccgtggctcatgtacctgrccatcatcctctcccacagcaactccgtcgtcaaccccttcatctacgcctacaggatccgggagttccgccagaccttccggaagatcatccgaacccacgtcctgaggcggcaggaacccttccaggcagggggttccagtgcctgggccctggcagctcacagcactgagggagagcaggttagcctccgccttaatggccaccccctgggggtatgggccaacggcagtgccacccattccggacggcggcccaatggctacactctggggctggggggtggagggagtgcccaaggctctcctcgggatgtggagcttcctacccaggagcgccaggaaggccaagagcaccctggcctaaggggtcatctggtccaggctagagtaggagcttcctcatggtcttcagagtttgccccttcctgagggaaagacattttaatatttttggttggctggaccaatctcactaagggaagagaaacccaatgggcgcgtggctcccactttgaactacaaagagggggcatgaagttggagcagcatgaarcccagtaagaaargcctggggtggaggaagcgatgcttctgcttmgtgctacggggccctgtgttaggtcakggctgcagtagcatctgcaaargcagggcccagktcccctgctccagaagcgtscaaaaagctgtcttgtctctctakmrcgrdkgtggcttagaggactggcctggccygatgctagaatataggagcttcasacctcctgytgtagtacactactctccccagactgtctagggctcagggagctgctggcctaraagtggcacttggctatttctttttcaagaagwtaaaaatgtgaggaaacccwttctattttattgacttcccccytcccctgcmtgmtgggtctgtggtcratcctgmykggaacccccccaaccaaggaattgaaggtggtcttcttgggctagcccaagmtaccatgcacttagtcacagggmtatctctgaccaacaaagctggcctggaagacagcaactatgaagggaaggattccagagcatgggctcaggtcccatgagagagattagagatgtcaagccatggacckgmmcmkgggtagttcagcgmtaccctgtytgaggccctgamtactkcctttccttccagagggacwtgkttgtttgtwtgtttgtgktttttttkttccctgaggtaaamtaaaatgagccmcactgtgttttwaawwwraaaaaaaaaaamdramabtcgasrdsgrrbyckagyacccaattcgcccg

SEQ ID NO: 613 - DNA, 1077 bp, Rattus norvegicus
atggcgctcctactgtgcttcgtgctcctgtgcggtgtcgcggatttcaccagcagtttgagtatcactacacctgaacagaggatcgaaaaagctaaaggggaaactgcctatctaccctgcaagtttactcttgaacccgaagaccagggaccactggacattgaatggctgatatccccgtccgataaccagaaagtggatcaagtgatcattttgtattctggagacaaaatttatgataactactatccggatctgaaaggacgagtacactttacgagtaacgacgtcaagtctggtgacgcatcgataaatgtgaccaatctgcagttgtccgatattggcacttaccagtgcaaagtgaagaaagctcctggggttgcaaatagaaaatttctgctgacagttcttgttaagccttcaggtacaaggtgcttcgtggatggcwcsrgagagattggraatgacttcaagctaaagtgtgaacccaaagaaggttccctcccactgcagtatgaatggcagaaattgtcagattcccagaaaatgcctactccatggctagcagaaatgacttcaccggttatatctgtgaaaaatgccagttctgagtattctgggacctacagttgcacagtccaaaacagagtgggctctgatcagtgtatgctacgactagatgttgtccctccctccaacagagctggaacgatcgcgggagctgtcatagggacgctgcttgcccttgtgctcatcggggccatcctcttctgctgtcataaaaaacgcagagaagagaagtacgagaaggaagtgcatcacgacatcagggaagatgtgcctcctccgaagagtcggacatccaccgccaggagctacatcggcagcaaccattcctccctggggtccatgtccccttccaacatggaagggtattccaagacccagtataaccaagtccccagtgaagactttgaacgtgctcctcagagtccgactctggcacccgctaagktcarstrcscytamyctaagtcgaatgggagcggttcctgtgatgatcccagcacagag

SEQ ID NO: 614 - DNA, 3012 bp, Rattus norvegicus
gggctggggcctgggtcggcagctgcggcctcctctctggcccatctatttttaatgagctccccgggcttctgcagccggcagaatgcagaaaggcaggcccagtctgtggaggccagaagtcccagccctgccttgagctctggcccccctacccttctgggcatgaaagggcagctctggagccccgcagccccctggccgggcagggctctccatgcagctggtactgaagatggattcgagcccagacaatgacagctggttggaggatcagtgggaacgctggctcacccatgatatcagcctggaggagtttgaggatgaagacctttcggagatcactgatgagtgtggcatcagcctgcagtgcaaagacaccttgtctctccggcccccgcgcgccgggctactgtctgcgggtagcagcggtagcgcggggagccggctgcaggcggagatgctgcagatggacctgatcgacgcggcaagtgacactccgggcgccgaggacgacgaagaggacgacgacgagctcgctgcccaacggccaggagtggggccttccaaagccgagtctggccaggagccggcgtctcgcagccagggtcagggccagggccccggcacaggcagcggagacacctaccggcccaagaggcctaccacgctcaaccttttcccgcaggtgccgcggtctcaggacacgctgaataataactctttaggcaaaaagcacagttggcaggaccgtgtgtctcgatcatcctcccctctgaagacaggggagcagacgcctccacatgaacatatctgcctgagtgatgagctgccgccccagggcagtcctgttcccacccaggatcgtggcacttccaccgacagcccttgtcgccgtactgcagccacccagatggcacctccaagtggtccccctgccactgcacctggtggccggggccactcccatcgagatcgaatccactatcaggcagatgtgcggctcgaggcgactgaggagatctacctgaccccagtgcagaggcccccagaccctgcagaacccacctccaccttcttgccacccactgagagccggatgtctgtcagctcggatcctgaccctgccgcttactctgtaactgcagggcgaccgcacccttccatcagtgaagaggatgagggcttcgactgtctgtcatccccagagcaagctgagccaccaggtggagggtggcggggaagcctcggggagccaccaccgcctccacgggcctcactgagctcggacaccagcgcactgtcctacgactctgtcaagtacacactggtggtggatgagcatgcccagcttgagttggtgagcctgcggccatgttttggagattacagtgacgaaagcgactctgccactgtctatgacaactgtgcctctgcctcctcgccctacgagtcagccattggtgaggaatatgaggaggcccctcaaccccggcctcccacctgcctgtcagaggactccacaccggatgagcctgacgtccacttctctaagaagtttctgaatgtcttcatgagtggccgctctcgttcctccagtgccgagtcctttgggctgttctcctgtgtcatcaatggggaggagcatgagcaaacccatcgggctatattcaggtttgtgcctcggcatgaagatgaacttgagctggaagtggacgaccctctgctggtggagctgcaggcagaagactattggtatgaggcctataacatgcgcactggagcccgtggtgtctttcctgcctactatgccattgaggtcaccaaggagcctgagcacatggcagcccttgccaaaaacagcgactggattgaccagttccgggtgaagttcctgggctctgtccaggttccttatcacaagggcaatgatgtcctctgtgctgctatgcaaaagatcgccaccacccgccggctcaccgtgcactttaacccgccctccagctgtgtccttgaaatcagcgttaggggtgtcaagataggtgtcaaagctgatgaagctcaggaggccaagggaaataaatgtagccactttttccagctaaaaaacatctctttctgtgggtaccatccaaagaacaacaagtactttgggtttatcactaagcaccctgctgaccaccggtttgcctgccatgtctttgtgtctgaagattccaccaaagccctggcagagtctgtggggcgtgcatttcagcagttctacaagcaatttgtggaatatacctgtccyacagaagatatctacttggagtagcagcaacccccctctctgcagcccctcagccccaggccagtactaggacagctgactgctgacaggatgttgtactgccacgagagaatgggggagtgagggctgttggggtcggggggcaggggtttggsgagrggcagatgcagtttattgtaatatatggggttagattaatcyayggrggacagtacaggctctctcggggctggggaasggcarggctggggtgggggtcaggcatctggccacaaagggatcccctakggacmgaggcgmtgcaccatcytgggccttgtttcatactagaggccctggctttytggctcttgggtcctsccttgacaaagcccatgccmcctggaagtgtcaccttcccttgtccacctcacccagagccctgagvtcatgytgagcccaagcmcctccgaaggamtttccmgtaaggaaatggcaacatgtgacagtgaggmccctgttytcatytgtggggcctccggcagytccgacctccagcytggccagcacgctgmccctggcaagsttgtgtgttcaaagaaggrgrgggccacagcaagccctgcctgccagggaaggttccctytcagctggccccagccaactggtcactgtyttgtcacctggstwstactattaaagtgccatttcttgtywvrawwwaaaaaaaaaaaaaaaaa

SEQ ID NO: 615 - DNA, 3583 bp, Rattus norvegicus
ggcacgagcaggrcwyswgcgcgagcgcacgttgtctgagccttgctcaggatgctgtgttcactgctcctttgtggatgtctgttactgatcactggttatgctcatgacgatgactggattgacccaacagatatgcttaattatgacgctgcttcgggaaccatgagaaaatcgcaggcaaaatatggtacctcagagaagaaggaagtgaaccctggcttgtcagatgcccaggagttgtcagactgtttgcagagactggattctttaacgcacaaggttgatgattgtgaaaagaagaaaatgaaagactatgaaagtcaaagtaatcctgtttttaggagatatctaaataagattttaattgaagcgggcaagcttggacttcctgatgaagacagagtggatgtgcgttatgatgctgagatcctccttacaagacagacactgttggagatacagaagttcctcagtggagaggaatggaagccaggagccttggatgatgcactaagtgatattttaaccaattttaagtctcatgacgcagaagcatggaagtggcaatttgaagactattttggagtagatccatacaatgtgtttatggtactcttgtgtctgctctgcattgtggcgttggtggctacggagctatggacatatgttcgctggcatacgcagttgaaacgcgtttgtatcatcagttttctcgtcagtttaggatggaattggatttatctatataaggtagcttttgctcagcatcaggctaatgttgccaagatggcgccgttaaacgatgtgtgtgctaagaagatggattggactgaaaacctctgggaatggtttagaatttcatggacctataaggatgacccatgccaaaagtactatgagctcttaatcgtcaaccctatttggttggttccgccaacaaaggctctggcagttacattcactaactttgtaacggaaccattaaagtacattggaaaaggaactggtgaattcattaaagcactcatgaaggagattccggtgttacttcagatcccggtgcttgtgattctagccttggctgtcctgggcttctgctatggtgctggacagtcagttcctatgctgagacacttccgtggtcctgaaagagaacctccccgagcacttgagccagatgacagaagacgacagaaggaacttgactatagattccatggtggagcaggtgatgcagatttctcttacaggggcccagctggctccattgaacaaggcccttatgacaaaatgcatgtgtgtgagagagatgttttgagacagagacaagttaacatgagatttccctctggcaacaagagccctgaagtgctccgggcatttgatttacctgacacagaggcacaagaacatccagaagtggttcccagccataaaccatccattgtgaatacaagcctcaaagagactagtgaactcccaagagaaagcaccctggcagaatgcagccagtgtgccaaggatggctctggccaagtccccagcactgctgaaagctcacccatcgtggagaaggcccagctgaagacagactctgagtgccgcccacacagcacagaagctgcagcagcagcagcacgtgggactgatcctgtcagcagcccgtgtggctaaagaccaaggcgcagaccgaccacggctagagtcatctttgaagtctgtattgactcttctttccttacakatacgttgaaacttactacaaaactgctaactttaaattaatggttttacagaccatcagagtatctcttagctgttaggacatatcttgtattttagaacagggttttgtaaaatttacatttttaggttggtgctgtaacagacagacactactaattgaggtgatattaacaggcttctaatgttaaatgttgctatggttacattgccacatgatagctagcaatgccacaagatcccagcgaccacagcaagtcttagctgatggaggctctgagccctcgtttactaacagggtatctaatgagtgtctgctgtggctgtcacagagtacacatcacctgtgtcaatcatctgtgtttctaggtggccacctgcagagcagcgtgactttctggtcaccaggcctgtctcctggtcatacattttacattaggtctcactaagacaagcctgaggacgacctggttctctcagtacttgagtttcccacttcgtcagtgactgtgagagtggctttattctctaacgcagagtcagatgtataaagacccattttcatatttagaacttagcagttgctttgatgccgttcagtttactatattgtcctggctaaatgtagttctggttttcagagagctgtagatagaggacaagatatattaacttcttaagtcaacattttgtttgtgatttttaaagtgcagtctccattttatacttaaaaaaaagcaatttatatattttgttacaagtcccagttagcacttcctgtgcatgcaggtgtcctttgttgttgcaaccatatctatattgcaccttttattcagctgctttccaaaaatgataccactcaagaattgaatcttgaaattatcaggcaggctgcttcaacaagggcattctgaacacttggcttttgatttctttatacaaacgtatgatgctccttttttctctaccttggtatctgaaaaactaattttgtatttccatataactttgtaaatgccttttttttattttaaagattagatcctataaaaggtaggtttattggaaattgaggccattgggaagggtggggggggagaaagggcytgaacataggaaggaagaggagaagagaaaatgcctttcgtattttatcaggaaagtaaaaatttccccaaaaaccaaaaggattttgcaykargacagcagtattgcagacatgtaatgagtggatgaggggaatgagcagttcgttcactctaatcatctgtgtataaggcagttatttcagtgggctrgacccgttcaccctgactggtaaatgcactcccaaggtgggaagtgtcctttgagctccggtacaattgtgagggaaacaaacgccttctttaacagatgcacctgagaggacaggaagttstgttggcacactgattgcttttaatccagaagtgaacccwkammaaskyrcagwctcgwcywcgkatkwktcmttwsaratgcccatttggggatggaatctgctttgacagctagcaaagtgacacgctgttcttgatgacagcaattcaggggagacttgattaaaacaaggtgaaactaccaaggccagtgtattgcagaaccgagaggcagcttgtctcgagtgactagcgagaggagcgagcgttttgtcttggaggttaaagcccactgtaactggctgttaggaacagggtgggtagttgtgaaaagcactttttaaaatggaataaatgttgaatgcttacatggtcttaaccactgtaaacaccaaataaacacttatttttacattaaaaaaaaaaaaaaaaaaaaa

SEQ ID NO: 616 - DNA, 8911 bp, Rattus norvegicus
gatcctcttggtaggttaagtcagttccaattggttagccccaaacacatgcacagaggagcaaccttaagtgcatgcaacaccttctctgtctgcctctctgtctttctgtctctctgtctctgtctttatctgactctgtctctatctgtgtgtgtttaaaacagttattaaagaagagatcatgaatttgagaggggtagaggagggcacagaagtagttggaagaggaagaaggaggtgtagaaatgtaaatacagtattcaagtatgagattctcaaaaaaagttttaaaaactcaaattaaaaatgaccatttgtgtgcctgcttaaaaaaatgttcgtctgccatatgaagtcctgagtggctcatgcctggattccccagagttgaaggcaggaagatcagcagttctcacagtcattctgccacacaccaggtttcaggacgagccaagacacctgagagctgcttcaaaccaaagaatcacaagaagacggacaaacgagcaaacaaaaaacagaaaaggaaaaaaaatcgacaataggaaatgtatgaagatactacctcggaccaaaggaaagatggtctctatggcaacaagctgatcttcaggccaatgaggtagctcagcagtctaagacactttgatgtctgacccgagtttgatccttgaagtctgcattgtggagggagaaagccaactccagaaagccatgatgtgatacatataaacaagtaaataaagggggaaagatttaaagtgacaccacccctgcacacaccgatagttggtgaatactgatgcagtccttgtgttttctcgtgtcatatgttaaaactaagcacatctgacctacttttaacgccctctgatattgtcgatatggaagcttctggtggtcaagcttgctggttaaggatcaacatagacaagtgttcctacctagtagctacaggcccctggttgtacacaggacttagagagtgtgttcgtgcatacagaacatttagtatcctaattggcaaaggtaactgggtttaaaagtggtgtcctttgggatccacgaacaggcacttcgtcagtcttcaaagacaaaggctatgtaatctaggctggaactcacgagcctcttgccacttccataccttatgtgacaatttagaggttgaattaaacaatcctacccagttcaagtgctcatgtgtgcacttgagactgaagacatagcctgaggaatcaattcgagtgcaaagaaatctggaggcctaaagttagactgtgtttaggcctgggctcaccgacctggttcttgttccttcaggatatcgcgtctatcagcatttccagtgctgattctcaaacaatgcttaacgcctatcagtaaggggttctattagttatcttgttgttgctgtgctaagcgccatgagcaaggcaacttgcagaaggcgcagtttatttggtcaatgatgtaggagcccatcatgtcagggcagagacgtggagcaagcagtggggacactcaaggacaaggagccaagtgatcgcatctttaatagcaaagaccaaacagattgaactggaagtggggagaggctgtaagggctcagagaccaccccccaccaatgatgtatccccccagcaaggctgccctgccccaggacttccccaaacagcatcaccattgggaaccaagtgttcatgcctgagtctacgggggaaccttgctcattcaaatcaccatagatgcctagaaaagagatttccatagtaactcatttgattgatgatacaaatcgttacaatgaatctctgaaactacatataaacatattaaagaagtgagaagtatttcctgttttctcaagtagacctcatcatagaatggaaataaaaataatgaaggccatgctttgttacagtcgttcttaaccttcctaacgctgccaccctttaatacgatgcctaatgttgcggtgacacccagccatagaatcattccattgctacttcagaactgtaactttgctactgttgcgaattgtaacgtaagtatctgtgttttccccaaatggtatcctgtaaaaatgagtgttagttttacattcccaccagtggtgtgcaaatgttcctgtttctctcgtgcttggtagatgtcattaccttcgttgctagtagccatttgttgggatgggatacccgtggttttaatctttgctttcctgatggttactggtgatcggcatttttcatggtcccgtgggtcgtttcttggcaatactttggttggatgtcagtgtatgcggatagccacttcctcatggtgctgttcatctgtgtgttgctggggtttggagggtgttgtgctgtgtgccttgtggataccggcctcttgtcatgtacttactgtttgtattgtcacatgctccccaatccggtggcttgtttctctccctttgttgtttgttgtcctcactgaacaaaagttttatataatcccgtttgtttgctcatgcttttttgtttggtatcttgcccaaggataaactttgccatttcaatgtcaactccccacccccaccaagtgttttctgatgctcttaggcaaacccacaggggttgaaacccacatgatgaaactgtatgagaagccttctcaattgggtatgttggctggcccacgcctgtaatccttgaacttggaagtaggaagcagaagcaggaggattgagagttcaagggtgtgtgtcaccaccctgaattacaaagggaaaacaaaacaaaacaacaccaacacccaaacccccaaaccctaccactcaattctccatgttaaaagcctagcacttttagaggacatctaagttagtaacattagagtcctttctttggaaagtcagttgtgttagatggtgctttgctggggcaaacacaggaagaagtgttttcctgaggcagacacaggtgtaaggttaaggcagggaaaggaatgtttcactgaagcagacaggtgaaaggatattctgctaaagcacgcaggtaaaggggcatgtactgaaggattctttgctaaagatgcatgtattggtccgccttacattgcatagttgagctccatctgtcaggactccaacgagaaacacaccaagaaacttgtggtgtgtcgcagtttcttgtggctttcatggactcgggctgactgacagtggtgtcagctgagacagactcacctggctgaggcaagacccatggaggacatgtgctgtttggagagagtatgaatagaactcggtggccagtgacaggtgtgtgtgtgtgtgtgtgtgtgtgtgtgtgtgtgtgtgtggctgagctaggtttgtttatggagccagctgtgtaacactggttggtctggagtctttgctgagattcacttcctagagagagaggcgtagccgagaacttctcctgttggtctctcctgctgctgaggctgaggcctggctgtttctgctaggcagtgccactgctgctgattcctgtttactgtcccgactctactgaactggctgcccatatgtcgtgaagtgtttgtgggtggatggagctgtctcttcgaacctgtgaactgaacggccgatttccagacaatacagctgggagttgctccaaaggaccatttctaaacaggtccactcccctgttaccctttcctttttcctacctctctggtgggtgatgggctagaagggaggttaaggtgtctaagaaccatcattaaaaaatagactttaaaaattaaaattacagaagtctaactgggtccctcatttgtgcaaaggttccctgattatccaacaactgtcaagactggaaacctgtctttgaaccagtcacttctgtcacttcatctgctgtgtcactggtagagtttccggtgaagtagctggtgacagaattctgtgggtcaaggtgcttgctgccaagcctgaagaactgcacctaagttggattcctgggccctacgtggtggaaagggagaaagttgttcttctgacctcactctggtcaaggctgtttttgaacttttgatcctcctgccatacttggttgtatggggggctgggcatcaaactcagggctctgtgtatgttgggcacataacattactactgaactatggccccaatgggcaattcacctttcaacagaaagcgaagtgtaaacagagcatcagagttgtgttggtgattgaagtagtggcgttcaagccttgcaaggtgcatgtcgccggcacatgcgtgcaggccggaccctgcgtgctcgcctgtccttcacactcagggccatggggagactgcagggttggaattcaggtagcacaacagctagagaaggcactctgtgccaggctgtacagagaaagagcatgataaccagaaccgggagaaaacccaaactggggcagaatgaatgtatgtgcacggggctgcgatgtaggagtgggcttctctgagatattttaaaaaagaatttgatatcgacaaccacggtccctatcttctcttaagaccctggtagtttgaaggatccagagagaggcagcgagtcccctcagtgatcgccacatcccgggtaccccacacttctcccaggccagggatccccagctgttaccccatcccgggccgctccctgacttcctttctctccttccagccccagccttctctgcccgaagggaagcgcaggctggagcaagctctctcggctcatccatcagcagtggaggaggaggagaggaggggcaggaggaggagtttctaggcggccgagcccccaaggcccgcagtgcccttcccccctcgcgctgattgctgtggctgcgcgcccgaccccgcccgcgcgtgtgcgcggccgagctagggcgccgcacgggcccgatgggggtgatccaggctttcggggacgccgagcgccactttcctcctccctggcagtgagagacagtggggagaggagaaagcgggctgctgtccttccaggccactttcgctgcgcgattccgcgagctcccggcaggaggtgaaagtccccggcggggtccggatggcgcagttgcactgcggctgctgagctcgcggccgcctgcgcrcrctgggcgcggggactcgcttcggctartaactcctccacctcgcggcggacgaccggtcctggacacgctgcctgcgaggcaagttgaacagtgcasagaaggatcttaaagctacacccgacttgccacgattgccttcaatctgaagaaccaaaggctgttggagagatggcagtgacatcccaccacatgatcccggtgatggttgtcctgatgagcgcctgcctggccaccgccggtccakagcccagcacccggtgtgaactgtcaccaatcaacgcctctcacccagtccakgccttgatggagagcttcaccgttctgtctggctgtgccagcagaggcaccaccgggctgccaagggaggtccatgtcctaaacctccgaagtacagatcagggaccaggccagcggcagagagaggttaccctgcacctgaaccccattgcctcggtgcacactcaccacaaacctatcgtgttcctgctcaactccccccagcccctggtgtggcatctgaagacggagagactggccgctggtgtccccagactcttcctggtttcrgagggttctgtggtccagtttccatcaggaaacttctccttgacagcagaaacagaggaaaggaatttccctcaagaaaatgaacatctsstgcgctgggcccaaaaggaatatggagcagtgacttcgttcacygaactcaagatagcaagaaacatctatattaaagtgggagaagatcaagtgtttcctcctacgtgtaacatagggaagaatttcctctcactcaattaccttgccgagtaccttcaacccaaagccgccgaaggttgtgtcctgcccagtcarccccatgaaaaggaagtacacatcatcgagttaattacccccagctcgaacccttacagcgctttccaggtggatataatagttgacatacgacctgctcaagaggatcccgaggtggtcaaaaaccttgtcctgatcttgaagtgcaaaaagtctgtcaactgggtgatcaagtcttttgacgtcaagggaaacttgaaagtcattgctcccaacagtatcggctttggaaaagagagtgaacgatccatgacaatgaccaaattggtaagagatgacatcccttccacccaagagaatctgatgaagtgggcactggacaatggctacaggccagtgacgtcatacacaatggctcccgtggctaatagatttcatcttcggcttgagaacaacgaggagatgagagatgaggaagtccacaccattcctcctgagcttcgtatcctgctggaccctgaccacccgcccgccctggacaacccactcttcccaggagagggaagcccaaatggtggtctcccctttccattcccggatatccccaggagaggctggaaggagggcgaagataggatcccccggccaaagcagcccatcgttcccagtgttcaactgcttcctgaccaccgagaaccagaagaagtgcaagggggcgtggacatcgccctgtcagtcaaatgtgaccatgaaaagatggtcgtggctgtagacaaagactctttccagaccaatggctactcagggatggagctcaccctgttggatccttcgtgtaaagccaaaatgaatggtactcactttgttctcgagtctcccctgaatggctgtggtactcgacatcggaggtcgaccccggatggtgtggtttactataactctattgtggtgcaggctccgtcccctggggatagcagtggctggcctgatggctatgaagacttggagtcaggcgataatggatttcctggagacggggatgaaggagaaactgcccccctgagccgagctggagtggtggtgtttaactgcagcttgcggcagctgaggaatcccagtggcttccagggccagctcgatggaaatgctaccttcaacatggagctgtataacacagacctctttctggtgccctccccaggggtcttctctgtggcagagaacgagcatgtttatgttgaggtgtctgtcaccaaggctgaccaagatctgggattcgccatccaaacctgctttctctctccatactccaacccagacagaatgtctgattacaccatcatcgagaacatctgtccgaaagacgactctgtgaagttctacagctccaagagagtgcactttcccatcccgcatgctgaggtggacaagaagcgcttcagcttcctgttcaagtctgtgttcaacacctccctgctcttcctgcactgcgagttgactctgtgctccaggaagaagggctccctgaagctgccgaggtgtgtgactcctgacgacgcctgcacttctctcgatgccaccatgatctggaccatgatgcagaataagaagacattcaccaagcccctggctgtggtcctccaggtagactataaagaaaatgttcccagcactaaggattccagtccaattcctcctcctcctccacagattttccatggcctggacacgctcaccgtgatgggcattgcatttgcagcatttgtgatcggagcgctcctgacgggggccttgtggtacatctactcccacacaggggagacagcacgaaggcagcaagtccctacctcgccgccagcctcggagaacagcagcgcggcccacagcatcggcagcactcagagtaccccctgctctagcagcagcacagcctaggtggacagacagacgcccgcccaccgcagccagggcagggcccgatgccagtgctgcgtgtccacagtcagaagtcttgatctgggctccctgtaaagaaagagtgaatttcagtatacagacagccagttctacccaccccttaccacggcccacataaatgtgaccctgggcatctgtcacacgaaagctaagctggtggccttccccaccagcccctcgcaggatgggggtttcaatgtgaaacatmkgccrswwwkgttttgtttttttaatgctgctttgtccaggtgtccaaacatccatcatttggggtggtctgttttacagagtaaaggaggcggtgaagggacgtcagctagtgtgtagagccaaggggagacagctaggattctcgcctagctgaaccaaggtgtaaaatagaagacacgctccatatccagtctcgccctggatgcccccttctgacctgccacaccctacatggtcccctgtgtagcttgctagcctttgtggggaggggctgtcacttaccaccgcaacattcctctcttgggccaatgaacgctaattcctggtcctccatgcacgcacaccaactccaaaagtgccttagtcaagagcatttctcctttcaggcacacagaaactgaaaacggtcgagagagtgggatatcggatttgtgcctgtctccggcattccgtcctaacaatatttaaatatcaggctggtagggttcggtggtcagcgaggggattagcagggtgatgcctgtgtgtggccatatgggcacaaatgcagaacacattgtggggacgatcacttcccccttaaatatggtctatccttccagagttggaacttaagttatatgtggtaggctatattgactccaaattcatcagcctctctgatgggcctgtataaaaacctggagaggcccaggccatctgatgatgtcacctgtcctgcccmgagratgcmsmsactgkgagaagggcgctgactttaaaaagggtttcaggtgaacttct

SEQ ID NO: 617 - DNA, 1960 bp, Rattus norvegicus
cactgaaggwgccwgcagcmckcrargyyrskmaggcaaatcacagcccaggcagccgcgaggtcacttggttgctctcctcaagaccatggatgtgcatctgtttgactatgtggaacctgggaactactcggacatcaactggccctgtaacagtagcgactgcatcgtcgtggacaccgtgcagtgtcccgccatgcccaacaagaatgtgctgctgtataccctctccttcatctacattttcatcttcgtgatcggtatgattgccaactccgtggtggtctgggtgaatatccaggccaagactacaggctacgacacacactgctacatcttgaacctggccattgccgatctgtgggtcgtcatcaccatccctgtctgggtggtcagtctcgtgcagcataaccagtggcccatgggtgagctcacgtgcaagatcacacacctcattttctccatcaacctctttgggagcatcttcttcctcgcatgcatgagcgtggaccgctatctctccatcacctacttcaccagcacctccagctataagaagaagatggtackccgtgttgtctgcgtcttggtgtggctgctggccttctttgtgtccctgcctgacacctactacctgaagacggtcacatctgcttccaacaacgagacctactgcaggtccttctaccccgagcacagcatcaaggagtggctcattggcatggagctggtctccgtcatcttgggttttgctgtccccttcacsaksattgctatcttctacttcctgctcgccagagccatgtcagcatccggtgaccaggagaaacacagcagccggaagatcatcttctcctacgtggtggtcttcctggtgtgttggctgccgtaccattttgtggttctgctggacatcttctctatcttgcactacatcccgttcacctgccaactggagaatgtgctctttacagcgctgcacgtcacgcagtgcctgtccctggtgcactgctgtgtcaamcctgtgctctacagcttcatcaaccgaaactacaggtacgagctgatgaaggccttcatcttcaagtactcagccaaaacaggactcaccaaactcatcgatgcctccagagtgtcwgagacagagtactctgccytggagcaraacrccaagtgaccgtgctatagaggcatggggacatgtgcatgttgcaaatggggcagctgggccctgtggtttcttcaagaaagcactgtagctttgggtctggttgcttgagtggtatgaagaggagaaggaccatgcttcctgtctctcattctccagccaagatggctgtcacctggacactcatcctgacagcttgcagcagacaggctgccytgcgctgtgcagccagagctgtgtgtcaaagccagcatcaggacagactcttctggacacgtgtacaatagaatcttttgtgtttcttcaagtttttacttggtgacttttgkmwykargyyytaagactttattttctcactatggatgtaccttataaatgcatttgaaagctaaatatattttaaatattgkatgggaggtgtaargctgttgtatttgsrscaygtaggcctcagattagcaggactctgagttttgactaargatgmcattcattgttagctgattcgaaatgatataaatatatatamaatatraatatatatwtaaatttatgccagtcctggctggaatgttttatthmcaatagttwtatatctgtgtggtgtttaatgctggcacagcatatggaacggaaactgcccagcaatgcagtttgtgacacgamccgtattgtagagttacgtttygggctscmaacccgtgaacagaggaamcagcattctctygattgtaagttatttttttaataaagatttttktttcctwwaamwraaaaaaaaaaaaaaaaaa

SEQ ID NO: 618 - DNA, 2119 bp, Rattus norvegicus
cggccgcgccgcgaaagccccatcccggaagtgcttactggtcgtctccatgcgccggttcctgggcgtaaagcctaggcgcgaggctcakcccagcaggtagtgaggacgcagagggccctgcctgctggacgagagccgcggcgtccgcgggaacagctccagccagcatgctgctcctgcccagcrccgcggagggccagggcaccgmcatcacccacgctctgacctccgcctctgcagtctgtcaagtcgaacccgtgggaagatggtttgaagctttcgttaagaggagaaacagaaatgcttmcacatcttttcargaactggaagatawgaaagagttgtcagaggaatcagaagatgaagagttacagttagaagagttccccatgctgaaaacacttgwkccsaawkmttggaagaatcaagatcattatgcagttcttggacttggccacgtcagatacaaagccacacagagacagatcaaagcagctcacaaaacaatggtcttgaaacatcacccagacaagcggaaagcggctggggaacccatcaaagaaggggacaacgactacttcacttgtataacgaaagcttatgaaatgttgtctgatccagtgaaaaggcgggcatttaacagtgtagatcctacttttgacaactcagttccttctaaaagtgaagcaaaggagaattttttccaagtgttttctccagtgtttgaaaggaattccagatggtcaaataagaaaaatgttcccaaacttggtgatatgaactcatcatttgaagatgtagatgcattttattccttctggtataattttgattcttggagagaattttcttacttagatgaagaagaaaaagaaaaagcagaatgtcgtgatgagaggaaatggattgaaaagcagaacagagcaacgagggcacaaaggaagaaggaagagatgaacagaataagaactttagttgataatgcttacagttgtgacccaaggataaaaaagtttaaggaagaaggaaaggccaagaaggaagcagaaaagagagcaaaagcagaagccaggaggaaggaacaggaagccaaagaaaagcaaagacaagctgagttagaagctgttcggttggctaaagagaaagaagaggaagaagttagacagcaagcattgttggccaagaaagaaaaggagatccagaaaaaagccattaaaaaggaaaggcagaaacttcgtaactcatgcaagaactggaatcacttctcggacaatgaggcagaccgggttaaaatgatggaagaggtggaaaaactctgtgatcggcttgaactagcaagcctacagtgcttgaatgaaatactggcatcatctacgagagaagtgggaaaagctgcacttgaaaaacagatagaagaagtcaatgagctgatgaggaaagagaaggaggaagctgatgcccggatgcggcaagcatctaagaatgcagagaagtcaaccggcggaagtgggagtggcagtaagaactggtcagaagatgatctgcaattattaattaaggctgtcaatctcttccccgctgggacaaactccagatgggaagtcattgctaattatatgaacatacattcttcttctggtgtcaaaagaactsccaaagatgttmttggtaaagctaaaagcctccaaaaacttgaccctcaccaaaaagatgacattaacaaaaaggcatttgwtaagtttaaaaaagaacatggcgtggcccctcaggctgacagtgcggcaccctcagagcgatttgaaggtccctgcatagatyccatcccwtggacaacagaagrgcagaaacttytagaacaggctttgaaracatacccggtaawtactccggaaagatgggaaaagatcgcggaagccgttcytggcaggacgaagaaggactgcatgaggcgatacaaggagctcgtggagatggtgaaagccaagaaagctgctcaggagcaggtgctgaatgccagcagagccaggaagtgacgygggcaggcggtctcggtctgtgtgcacttttwtartaaaactcaaaatactgtamamammmmaaaaaaaaaaaaaaaaaa

SEQ ID NO: 619 - DNA, 1024 bp, Rattus norvegicus
tttttttttttttyttttaaccttcaacagaatttttaatcgttcaraaactcttacagggattgactgggtgttttttggttaarttggttggytggttttcyatttggtttttcyadacaasgtttchctgtgtatcctggctgtcttggaactcactctgtwkaccavgctarcctgctgggataaaasgtgtgctccggtactggcctggttttgyttttgtttttgcyacttcycwgtaaggagatacaatttttcsaaaaagtagtcgactccccavgttttatgcctttcttcaagagcatccacctcctcaaggcattgcatgttgcattttgtaccaaataactttttaagttcagcatctggaacatawaatggcgggcctgtgtgttttgttggatcataagaaaggacaaccasgaggtartgatacccttttctcarcagggacagtattatatctgcatarcggtcacgatcgcctggattgacagccaccaatgctcctctatcccaaatcctgtcaaacttgccgatgtttgctctgggaaggtcgaaaatgctgcaacagtataaggaaatgttcccggaagaactyttaaacmctytgkyaccagcaatttcggtgagcggttcttctgtgtatgacagattctgttctgcaaaaaattcccgaatcccaatttcactgatttctacaccaactacagtgtggccccggtctgcgaaccatttcatctcaatggcttttccacagagcgggaaaaacactctcagtccactctgccctttaagaaatgtatcgaaatgcttctttaatagctgatgcccttgctcctgatggaatgcgatgtgacgggtcacccacttgtcttgccagtcgtccagggttagtacccggttcttttgtacctcagcatcagggtgctctttgataccgagtgacatggtgccatccgtggcttgtctccgaggttggtgtctcccggtgccttgggcgatggctttaaacctcgtg

SEQ ID NO: 620 - DNA, 1315 bp, Rattus norvegicus
ctccttcacagctgtcctggctgcagccttccctccaggcagacgtggcaagggctagctatgaatgagtcctatcgctgtcaggcagccacctgggtggaacggggctcctcagcgacaatgggtggtgtgctcttcagtgcaggactgctgggcaayctcctggcgctggtgctgctggcgcgatccgggctggggtcctgccggccagggccactgcatccgccgccctcggtcttttaygtgctagtgtgcggcttgacrgtcaccsacttgctgggcaagtgtctgatcagcccgatggtcctggctgcmtacgcgcaaaatcggagcctaaaggaactgctgcctgcctcaggcaaycagttatgtgaagccttcgccttcctgatgtccttctttgggttagcctcgaccttacagctactggctatggcactrgagtgctggctgtctctgggacaccctttcttctaccaaaggcacatcaccgcccgccggggagtgctggtggcrccagtcgcrggcgccttctctttggctttctgtgcgctcccctttgctggctttgggaagttcgtscagtactgtccrggtacctggtgcttcatccagatgatccacaagaagcgctcattctcggtaataggcttctctgtgctctactccagcctcatggcgctgctggtcctcgcaactgtggtgtgcaacctgggtgccatgtccaacctctatgccatgcacaggcgccagaggcaccatccccgccgctgctccagggaccgcgcccagtcaggctcagactacaggcatgggtccccgaatcctttggaggagctggaccactttgttctgctggctctcacgacagtgctcttcaccatgtgttccctgcctttaatttatcgtgcttactatggagcctttaaacttgtggacagagctgacggagactcggaagacctccaagccttgcgttttctgtctgtgatttccatcgtggacccctggatcttcatcattttcaggacttcagtattccggatgttatttcacaagrctttcacaagacctctgatctacagaaactggtgcagccattcctggcagactaacatggaatccactttgtgagggctttgcatgttctggcaagctgaaaatacagcacacattcggacaaagaactgtggttggaaaagccttacaattgaaatccttaaaaaatacctcccacggggagctaaagagatgcatcggccctgaaagagcatttacttttcttccagaagaccggagttcatttcccagcacc

SEQ ID NO: 621 - DNA, 1144 bp, Rattus norvegicus
agtatttgacgacagtcatcccttacgagaaaaagaatggcccgccgtctgtggaagatcttcaaatattaacaaaaattctgcatgccatgaaggaggacagtgagaaagttccaagcttgttaacggactatatactgaaaggtgagttgttaactgactgtatgctgagaggcgagctgttgaccgactgtatgctgagaggcgagctgttgaccgactgtatgctgagaggcgagctgttgaccgactgtatgctgagagttctgtgtccgacatagagcagcggtatggtgggagccgcttccccttctgtggactccaggcttcatgacctatgctgttactctggaacatgctgtcacgactcccggcttttggagacccagcacacttgaacttggatttgcaattcagtattaatagatcatccactaayccatcacgttatagcactacgagagcttcagcactctkgaattctagagataggatttggtatacataaycattatgaactggtttctaagttaacagtcaaggagagggagggatatggactgtgcatgctgttgtttttgacagtgtggctgttaggttttgagttcctccatctgaactgactgaagaastaggttaaagcacggggcgagccaactgtagctgttcttcagcgagggtgagratcgktgcttttagagcatcttcagactattacctaccagtattgtccagaaactgagattmrgcgtggctgctgggaaacagtgccacccgccttcactgctttcgcstcattgtggacgcctgacgcggttggaaactgagttttgtaatgtctgcctgattcaccattgttggcatgcgagccgttaggatgccattcacaatcattatgaactttgggtgtgtctgtcccgtgaagaagygtatgttgaaaggggttcatgcctctaaggtgcttaaggagctgctgaggtactgccttttctcatgggtgtgytcggttttatttacacstatgtgcttttctagaaaaagctgctcatggctgcaacactaatcatgaacacttttgccagtttcaatcaaatcagcggcatttaataaaacagttcacacttaaaaaaaaaaaaaaaaaaaa

SEQ ID NO: 622 - DNA, 2036 bp, Rattus norvegicus
cacgaggggatgcgctgcagcgaatggtcgcgcggggcgccgctctgagtgacctttcacccgcgcccagcggcctcgggcggcagcacaaggcggaagccatggcggaggcggcgggagaggcgggcgcgagcgagcgggacccagacgcggtccgcgcgcgtcggcggctgcgggttctgtcgggccatctgctgggccggccccaggaggctccgagtaccaatgagtgcaaagcgcggwgagccgcgtcggmggmcggggcgtcgcccgctgcttctcycgccgcgccggastcgggcaccatccccaagaagcggcaagaacttatgaaatggaayggatggggctataatgattccaagttcttactgaataagaagggccaggttgagctgactgggaaaaggtaccctcttagtggcttggctttaccaactttgaaagactggatccaaaacacccttggagtaaatctggagcataaaactacctctaaaccatccataaatcctagtgaagcacctccttctattgtgaatgaagatttccttcaggaacttaaagaagctcatatttcctactcacaagacgcagatgatcgtgtgtttagagctcacggtcattgtcttcatgagatatttttgctcagagaagggatgtttgagcggattcctgatatagttgtatggccaacatgtcatgatgatgtagttaagattgtgaatctagcgtgcaaatataacctttgtatcataccaattggtgggggaacgagtgtatcctatggcctgatgtgccctgcagatgagacaagaacaataatttctttggatacttcacaaatgaaccggattctctgggttgatgagaacaatctgacagctcacgtagaggctgggataacaggacaagatttggaaagacagcttaaagaaagtggttattgtacaggtcatgaaccggactccctagaattcagcatcgtgggaggatggatatctactcgagcatcaggcatgaagaagaatgtctacggcaatattgaggacctggtggttcacatgaaaatggtaacacctagaggtgtaatagagaaaagctcccaaggccctcggatgtcaacggggcctgatatccatcacttcatcatgggctctgaaggaactcttggtgtaataacagaagctacaataaaaatcagaccaactcctgaataccaaaagtatggttcagtggctttccctaattttgaacaaggtgtagcctgtttaagagaaattgcaaagcagagatgtgctcctgcatctatccgcctcatggacaaccagcagtttcagtttgggcatgctcttaaacctcaggtctcctctatttttacgtcatttttggatggattcaaaaagttttatattacaaagtttaaaggatttgatccaaatcaaataagcgtagccacattactgttcgagggagaccgtgagaaggttcttcagcatgaaaaacaagtgtatgacatcgcagcaaaatttggtggtctggctgctggagaagataacgggcagaggggttatttgctgacttatgtcattgcatacatgcgtgatttgggtttggaatactatgtagtaggagaatcttttgagacttctgctccttgggacagggttatagatctgtgtagaaatgtaaaagaaaggataagaagggaatgcaaagaaaggggagttcagtttgcgcctctttctacgtgcagggtgacgcagacttacgatgcaggtgcatgtatctacttctattttgcctttaactacaggggaattagtgacccactgactgtgtttgaacagactgaggcagctgctagagatgaaatccttgccaatggagggagcctgtcacatcaccatggagtgggcaagttacgaaagcagtggctaaaggagagcatctctgatgtcggctttgggatgctgaagtctgtcaaagactatgtggaccccagtaacatctttggaaacagaaaccttttataa

SEQ ID NO: 623 - DNA, 2426 bp, Rattus norvegicus
gcggccgcgagggagtakcgcgcggccccaagggtatctgaagctcagcgcacaactgctgtgacaccgctttgtggacaatggctactcaagctgacctcatggagttggacatggccatggagccagacagaaaggccgctgtcagccactggcagcagcaatcttacctggattctggaatccactctggtgccaccaccacagctccttccctgagtggcaagggcaatcctgaggaagaagatgtggacacctcccaagtcctttatgagtgggagcaaggcttttcccagtccttcacgcaagagcaagtakctgacattgacggtcagtacgccatgactcgggctcagagggtccgagctgccatgttccctgagacactaratgagggcatgcagatcccatccacgcagtttgatgccgctcrtsccrctaatgtccagcgcttggctgaaccgtcacagatgctgaaacatgcagttgtcaatttgattaactatcaggatgacgcggracttgccacccgtgcaattcstgagctgaccaaactgctaaatgacgaggaccaggtggtcgttaataaagctgctgttatggttcaccagctttccaaaaaggaagcttccagacacgccatcatgcgctcccctcagatggtrwcwgccatmgtgcgcaccatgcagaatacaaatgacgtagaaacagcccgttgtaccgctgggaccctacacaacctttcccaccatcgagagggcttgttggccatctttaaatctggcggcatcccagcgctggtgaaaatgcttgggtcgccagtggattccgtactgttctacgccatcaccacgctgcataatctcctgctacatcaggaaggagctaaaatggcagtgcgcctagctggtgggctgcagaaaatggttgctttgctcaacaaaacaaacgtgaagttcttggctattacgacagactgccttcagatcttagcttacggcaatcaggaaagcaagctcatcattctggccagtggtggaccccaagccttagtaaacataatgagaacctacacgtacgagaagctcctgtggaccacaagcagagtgctgaaggtgctgtctgtctgctctagcaacaagccggccatcgtggaagctggtgggatgcaggcactggggcctcacctgacagacccgagtcagcgacttgttcaaaactgtctttggactctgagaaacttgtccgatgcagcgactaagcaggaagggatggaaggcctccttgggactctagtgcagcttctgggttctgatgatataaatgtggtcacctgcgcagctggaattctctctaacctcacttgcaataattacaaaaacaagatgatggtgtgccaagtgggtggcatagaggctcttgtgcgcactgtccttcgtgctggtgacagggaggacattaccgagcctgccatctgtgctcttcgtmatctgaccagccgacatcaggaagctgagatggcccagaatgccgttcgmcttcattatggactacctgttgtggttaaactcckgcacscrcmatcccactggcctctgataaaggcaactgttggattgatccgaaaccttgccctttgcccagcaaatcatgcgcctttgcgggaacagggtgcgatcccacgactagttcagctgcttgtacgagcacatcaggacacccagcggcgcacgtccatgggtggaacacagcagcagttcgtggagggcgtccgcatggaggagatagttgaagggtgcactggggctctccacatcctcgctcgggatgttcacaaccggattgtgatccgaggactcaataccattccactgtttgtgcagttgctttattctcccattgaaaatatccaaagagtagctgcaggggtcctctgtgaacttgctcaggacaaggaggctgcagaggccattgaggctgagggagccacagctcccctgacagagttgctccactccaggaatgaaggcgtggcaacatatgcggcygctgttctattccgaatgtctgaggacaagccacaggactacaagaaacggctttcggttgagctgaccagttccctcttcaggacagagccaatggcttggaatgagactgctgatctcggactggacattggtgcccagggagaagcccttggatatcgccaggacgatcccagctaccgttcttttcactctggtggatacggccaggacgccttggggatggaccctatgatggagcatgagatgggtggccaccaccctggtgctgactatccagttgatgggctgcctgacctgggacacgcccaggacctcatggacgggctgcctccaggtgatagcaatcagctggcctggtttgataccgacctgtaa

SEQ ID NO: 624 - DNA, 709 bp, Rattus norvegicus
tctacagagagccagctggcgtccaagggcgatgcagataccaaagatgaattggaggagacggtgcccaaccccttcagccaactcactgaccaggagctggaggagtacaagaaggaggtggaaaggaagaagctagaacaggagcaagaaggggagaaggacgcagccacagaggagcctggttcacctgtaaagtccacacctgcgtctcctgtgcagagcccaacgagggcagggaccaagagtccagcggtctctccttccaaggcttcagaggatgccaagaagacagaagtcagcgaagccaacacagagcctgagccagagaaaccagagggggtggtggtgaatgggaaggaggaggagccgtgtgtggaagaggtcctcagcaaaggaccgggccagatgactaccaatgctgacactgatggcgacagttacaaggacaaaaccgagtcagttaccagtggccccttgtccccagagggctcgccctctaagtcaccctccaaaaagaaaaagaaattccgaaccccctccttcctgaagaagagcaagaagaaggagaaggtggaatcctgattagtggctcagtgggtcctgatgcatccctgccctccttccttaccttctcccaactctgagccctgaacgccagggccaaggagggcaagaggagatcctgggtacacactcagaaccggtt

SEQ ID NO: 625 - DNA, 982 bp, Rattus norvegicus
agcttctcaacgcctctcagcaggctccaggcggcggggtggaaataagatcgcggccgtcgtggctggcctctacactggccttcatcctcatctttactatcgtggtggacatcctgggcaacctgctggtcatcctgtctgtgtatcgcaacaagaagctcaggaacgcagggaatatatttgtggcgagtttagctgtggcagacctcgtggtggctatttacccatttccctgggcgctgacgtctatacttaacaatggatggaacctgggatatctgcattgtcaagttagtgccttcctaatgggcctgagtgtcattggctcggtattcaacatcaccgggatcgctatgaaccgctactgctacatttgccacagtctcaagtatgataggatatacagtaacaagaattccctgtgctacgtgttcctgatatggacactgacactcatagccatcatgcccaacctgcaaaccggaactctccagtacgacccccggatctactcctgtaccttcacccagtccgtcagctcggcgtacacgattgccctggtggttttccatttcgtagtcccaatgattattgtcactttctgctacttaaggatatggatcctggttcttcaggtcagacggagggtaaaaccggacagcaaacccaaactgaagccgcaggacttcaggaactttgtcaccatgtttgtagtttttgtactttttgccctgtgctgggccccactcaacttcataggtcttattgtggcctcagatccggccaccatggcccccaggatcccggagtggctcttcgtggctagttactacctggcgtatttcaacagctgcctcaacgcaatcatatacggactactgaaccaaaatttcagaaaggagtacaagaggattatcatctcactgtgcacagctaagatgttctttgtggacagttcaaatgatgcagcagataagat

SEQ ID NO: 626 - DNA, 4572 bp, Rattus norvegicus
  misc_feature (137)..(137): n is a, c, g, or t
cccttccttagcatctcatagtagcccaggctagcctaactcacagcaatcctcttgactcagcctccaagtgctgttacagccctgagccacactggaccttcatctttgaggggagggaaaacaaaagacctcangagcagttttgtgttgctgtgtctggcttcaagaagaaaattctagacctctatgccggcaagaccaaagctcagctaagacttcttctcctaagaagataattttattaaaggatgggttggatcagtacaggtggtttgaggagaagctgactgaggaccatggaaaggtgggagaggacgcgcggctcctgggcttcctctgagctcagctccaggcaccacaaggccacataaggagggtgaggtccctggagtggactacattttcataaccgttgaggactttatggaattggagaaaagcggtgctctcctagaaagtgggacctatgaagacaactattacggcactccaaagcctccagctgaaccagcaccattattattaaatgtaacagatcagatactcccgggagctactccaagtgctgaggggaagcggaaaagaaataagtctgtgaccaacatggagaaagcaagtatagagccaccggaggaagaggaagaagaaaggcctgtggtcaacggaaatggcgtcgtcataacaccagaatccagtgaacatgaagacaaaagtgcaggtgcctcaggggagaccccctcccagccttaccctgcaccagtgtacagtcagcctgaagagctcaaggaccagatggatgatacaaagtcaacaaagcccgaggagaatgaggactccgacccattgcctgataactgggaaatggcctacacagagaagggtgaagtctacttcattgaccataacacaaagacaacatcatggctggatccacgacttgccaaaaaggctaagcctgcagaggagtgcaaggaaaatgagcttccatatggctgggaaaaaatcgatgatcctatatatggcacttactatgtcgaccacataaatagaagaacacagtttgaaaaccctgtcctggaagcaaaaaggaagctacagcaacataacatgccccacacagaacttggaacaaagcccctgcaggccccaggtttccgagaaaagccactcttcacccgggatgcatcccagttgaagggaacattcctcagcaccaccctcaaaaagagcaacatgggctttgggtttacgatcatcggtggagatgagccggacgagtttctacaggtgaagagtgtgatcccggatgggcccgccgcacaggatgggaaaatggagacaggtgatgtcattgtctatattaatgaagtttgtgtccttggacacactcatgcagatgttgtcaaacttttccagtctgttcctattggtcagagcgtcaacctggtgttgtgtcgtggctaccctttgccctttgatcctgaagaccctgccaacagcatggtgccaccccttgcaataatggagaggccacctccggtgatggtcaatggaagacataactatgaaacatatttggaatacatttctcggacctcacagtcggtcccagatattacagaccggccacctcattctttgcactccatgccagctgatggccaactagatggcacatatccaccacccgtccacgatgacaatgtgtctgtggcttcatctggagccactcaagctgaacttatgaccttaaccattgtgaaaggtgccaagggatttggctttactattgccgacagtcccacgggacagcgggtgaaacaaatacttgacattcagggatgccccgggctgtgtgaaggagacttcattgttgagatcaatcaacagaatgtacagaacctgagccatacagaagtggttgatatacttaaggactgccccgtcggaagcgagacttctctaatcatccatcgaggaggtttcttttctccatggaaaactccaaagcctatggtggaccggtgggagaaccaaggcagccctcaaacaagtttatctgctccggccgtcccacagagcctgcccttcccacctgcccttcataggagctcctttcctgactcaacagaggcctttgacccacggaagcctgacccgtatgagctctacgagaaatcgagagccatttatgaaagtaggcaacaagtgccacccaggaccagttttcgaatggattcctctggtccagattataaggaattggatgttcaccttcggaggatggagtctggatttggcttcagaatccttgggggagacgagcccggacagcctattttgatcggagctgtcattgcgatgggctcagctgacagagacggccgtctgcacccaggagacgagcttgtctacgtggatgggatcccggtggctggcaagacccaccggtatgtcatcgacctcatgcaccatgcggcccgcaacgggcaggttaacctcactgtgagaagaaaggtgctatgtggaggggagccctgcccagagaatgggaggagtccaggctctgtatcaacacaccacagctctccccgcagtgactatgccacctacgccaacagcaaccacgcggcccccagtaacaatgcctcaccccctgaaggctttgcctcgcacagcctgcagaccagtgacgtcatcattcaccgaaaggaaaacgaaggcttcggcttcgtcatcatcagctccctgaacaggcctgagtctggagccaccataaccgtgccccataaaatcggacgaatcatcgatgggagccctgcagatcgctgcgcaaaactcaaagtgggcgaccggatcttagcagtcaacggccagtctatcatcaacatgcctcacgctgacatcgtgaagctcatcaaggatgcgggtctcagcgtcaccctccgcatcattcctcaggaggagctcaacaacccaacatcagcacccagttcagagaagcagagccccatggcccagcagcacagccctctggcccagcagcacagccctctggcccagccgagcccagccacccccaacagcccagttgcacagccagctcctcctcaacctctccagctgcaaggacatgaaaatagttacaggtcagaagttaaagcaaggcaagatgtgaagccagacatccggcagccgcccttcacagactacaggcagccgccactggactacaggcaacccccgggaggggactactcgcagccctcacccttggactacaggcagcactccccagacaccaggcagtaccctctgtcagactacaggcagccacaggatttcgattatttcactgtggacatggagaaaggagccaaaggatttggattcagcatccgtggwggaagggaatacaaaatggatctgtacgtgttgagattggcggaggatgggccagccataaggaacggcaggatgagggtgggagatcagatcatcgaaataaatggggaaagcacacgagacatgacccacgccagagcaatagaactcatcaagtcgggaggaagaagagtgcggttgctgctgaaacgaggcacggggcaggtcccrgagtatggaatggtgccttccagcctctccatgtgcatgaaaagtgacaagcatgggtccccatatttctacttactgggccaccctaaagacacgwcgwammctmygcmtgrakmkctrcckytkcyryygmmmmarrmmwrmmrraartaggcgtctccctcgaagacatcctctctccattctctccatcacatccagccccaccctccgacccttcccaccagataggcccagacccaacttgggatatccaaagggaacacgacgttaggaaaccaaaggagctttcggccggcggccagaagaagcagcgcctgggggagcagagggagcgctcggcgagcccgcagcgcagtgcaaggcccaggctggaggaggtgccaggcggccaggggcggcccgaggccggcaggcccgcctcggaggcggccgatggaaaggaggcgctgcgcggccggcgcgagggccccggggccgcgggcgcgcgggaggccgaggccaaggtgggcgtgcgctcgggggcccgacccgcagcacggcccacggggggcggcctggcgcgcaaagcggcggtggcaccggggccctggaaggtgccgggctccgacaagctgccgggcgccctgcagcctggcgcctcggccgcgggcagatgagccccgaggcggggcccccgcccgcctccccgcaggccgatcttcctgggttccgtctgacggcgttttaatttatttccactgtcacacgcatagatctacacgaggcgccgaggcccgggagcaccggcgtgcgacgcgcgtgggcggcacggcagggtgtgcgcgcaggcagacctaaactgatcctaaagcccccggttccatggtgggagctttggcagctatggaagaaccaaaatcacgcaaacatcacagagagactcgtgccgaattcctgcagcccgggggatcc

SEQ ID NO: 627 - DNA, 747 bp, Rattus norvegicus
aactactgggacaagtttgtcaagcggaaggttctggacaaacacgggcacatcttcgggcgggagcggattgcagagctgctgggcatggatctggcctctctggagatcacagcccacaatgagcgcaaacctgaccctccaccaggcctgctgacatggatcatgtccatcgatgtcaaataccagatctggaagtttggagtcatcttcacagacaactctttcctgtatctgggctggtacatggtgatgtccctcctgggccactacaataacttcttcttcgctgcccacctcttggatatcgccatgggagtcaagacgctgcgcaccatcctttcatccgtcactcacaacggaaagcagctggtgatgacagtagggctcctggctgtagtggtctacttgtatacggtggtggccttcaacttcttccgcaagttctacaacaaragcgaagatgargacgagcctgayatgaagtgtgaygacatgatgacgtgctacctgttccacatgtatgtgggsgtccgggccggtggtggcatcggggacgagatcgaggacccggctggtgatgaatatgaactgtaccgggtcgtcttcgacatcacctttttcttcttcgtcattgtcatcctactggctatcatccagggtctgattattgatgctttcggggagctccgagaccaacaagagcaagtgaaggaagacatggagaccaagtgtttcatctgtggc

SEQ ID NO: 628 - DNA, 307 bp, Rattus norvegicus
ctataccgtggaggtgagcatcaatgactacctggacatctattgcccgcactatggggcgccactgcccccggcagagcgcatggaacggtacatcctatacatggtgaacggcgagggccatgcctcctgtgaccaccggcagcgaggcttcaagcgctgggaatgcaaccggcccgctgcgcctgggggacccctcaaattctccgagaagttccaactcttcacccccttttccctgggctttgagttccgacctggacacgagtactactacatctctgccacacctcccaacctcgtggac

SEQ ID NO: 629 - DNA, 1211 bp, Rattus norvegicus
gttgggggctgcggmrcckgkgsckccwagrymsctkmkggcaactggtagctgttcttagctgtgcccagccctcccggaacacaccctgtgtgagswcmskccagctataaggtgggcaccatgtctgagaagttcgactgtcactactgcagggaccccttgcaggggaagaagtatgtgcagaaggatggccgtcactgctgmctgaagtgctttgacaagttctgcgccaacacctgcgtggaatgccgcaagcccataagcgctgatgctaaggaggtgcactataagaatcgctactggcacgacacctgcttycgctgtgccaagtgccttcaccccttkgscagtgagacctttgtgtccaaggatggyaagatyctgtgcaacaagtgcgccactcgggaggactcccccaggtgcaaagggtgctwcaaggccattgtggcaggasaccasaatgtggagtwcaagggcmccatstggcataaagactgcttcacctgcagcaactgcaagcaagtcattgggaccggaagcttcttcccgaaaggggaggacttctactgtgtgacttgccatgagaccaagtttgccaagcattgcgtgaaatgcaacaaggccatcacatctggaggaatcacttaccaggatcagccctggcatgccgagtgctttgtgtgtgttacctgctctaagaagctggcggkgcagcgtttcaccgctgtggaggaccagtattactgcgtggattgctacaagaactttgtggccaagaagtgtgctggatgcaagaaccccatcactgggtttggtaaaggctccagtgtggtggcctatgaaggacaatcctggcacgactactgcttccactgcaaaaaatgctccgtgamtstgkcyracwagygmtytgwctktsatmatgagcwggtstattgwyctgactgtgccaaaaagctgtaacttgacaggggctcctgtcctgtaaaatggcatttgaagcawamwwwrwrwmhwwwrmtcactctctctgcaccatccatagggcaagagtgggctttcacctctttcaaattgctctttctgtctttgctctcattttacagtattaatcaaccgaggacacacagtgatcatattagaatttagaaaagagcaacctcgcaggaaaaataatttctctgttgctgcaatggcaaaaaaaaaaa

SEQ ID NO: 630 - DNA, 2607 bp, Rattus norvegicus
  misc_feature (2316)..(2316): n is a, c, g, or t
ccgagctgcggggcgggagactggagcttcctgcgcgggtctgtgctctggtgggtgagtgctgtccctgccagtgtccgggcgcccagggctgatcgacggccagaaccccagaactcccgttcagtgcggactggagctccagcagaaamgctcrswkcgcwssccctaggtaaagacataaggagatcagagggacttgaagggaaggtccccagtgggacgcagcccaggaggacagtgcgatgctcctctccatcctggtagcgttatgcctgtgsstgcgcctggctctgggagtgcgcggagcgccctgcgaggctgtgcgcatccccatgtgtaggcacatgccctggaacatcacccggatgcccaaccacctgcaccacagcactcaggagaacgccatcctggccatcgrgcagtacgaggagctggtagacgtgaactgcagctctgtactgmgcttctttctctgtgccatgtaygcacccatctgtaccctggagttcctgcacgatcccatcaaaccctgcaaatctgtgtgccagcgcgcacgcgacgactgcgagcccctcatgaagatgtataaccacagctggccagagagcctggcttgcgatgagctgcctgtctatgaccgtggagtgtgcatctctccggaggcgatagtcactgaccttccggaagatgtgaagtggatagacatcacaccagatatgatggttcaagaaaggtcctttgatgctgactgtaaacatctgagccctgatcggtgcaagtgcaaaaaggtgaagccaactttggcaacgtacctgagcaaaaacwacagctatgttattcatgccaaaataaaagcggtccagaggagtggttgcaatgaggtcacaactgtggtcgatgtaaaagagatcttcaagtcttcatcacctatccctcgaacgcaagtccccctcatcaccaattcctcctgccagtgtccacacatcctgccccatcaagatgtcctaatcatgtgttatgagcggcgttcaaggatgatgcttcttgaaaattgtttagttgagaaatggagagatyaactaagcagaaggtccacacagtgggaagagaggcttcaggaacagcagagaacaactcaggacaagaagcaaatagccagccgcaccagtcgcagtaaccccccaaagccaaarggaaggtcacctgcttccaaacctgccagtcctaagaagaacatcaaagctagaagtgcacccaaaaarwmaaammmaaagaaaagtacaagctaattactttccaagttgaagccacccttacaggataaggtggtactgcctgggacagccttccraaggccacacaccacttgccttaggacccactgtggttctctttatagacatgtcttgcagcatttctcttaatgatagcttcagtatttctctttaaaccacagatccctgttatttgtcagttttcttttatggaaaggwacctgtgttcaragtggcctgtgagcawactgkgtgaccttmkgstttgagattttgrcctaaaatctmccytataaagttcmcataytatgtcaagcaaaactttttttgacaaaaawattggatatcctttsacttctgttaggaagttagtgatatataaaatgttattgaaaaaaatgtttttgacaaaggcagaagaatgatacataaargmcmwwmawrwrwwwrwwrwmwgcmraaararwwwwmwrawraatgtggttttcaaaaacttgaggtatgggatgwggraaatgataatgtrggtttgtaaaactttctcttctgtctttagttagaaatttctaaaacgaagccaaaaatgatgagtaaagggactgtcgatgtttatgttcttgctgtctgattgccacagcatcctggattctcctcaacagtgacccatgagccaccccacagacagtatgcttcttttctcctgtatgacttgggtaccaaggagacatcttggttaatccatcaagagagctgggccatcccactccagggcatcgtaagkkmwtctagtcatgaataggacaggatattctctatgcacttgcaggtattcacaaccttcatgcagtgtctgtagagctatggtggctgggatacccaagctggttcacagtgtgctatgccataggcaccatactcactgtttccttagtacagggagcagaagctcttggttaccactacacatggaatagcaaacatatgaaagtaagacactttcatgtcctatgtcgagaacgcggtctacacgtctgacctnttatacggcgtggcgggaacttcgatgtaggaccgtcccgagggagtgcaacactgacgcccaacggatccgcgtcccgctcttttctccacacggaaagaaaagcctcgatttgttacaacacacagagcaacacacgacacacgaccacccacaacgcaacaagaagaacacaaccgatcacgacaacgaacacaacgcgcacagcacacaaccgaggaaacaacaaagaacaagcacgcagcggactgacgataagcaagtacagacagacacacgacacacaaacgt

SEQ ID NO: 631 - DNA, 522 bp, Rattus norvegicus
tactggtgcatctgtcacagtgcgacctaccaccgagcctgcagtcagtggcatgctcccctctacatcagcctcatctggcttctcactctggtggccttggtgcccaatttctttgtggggtctctagaatatgacccgcgaatctattcctgcaccttcatccagacagccagcacccaatacactatggctgtggtggccatccacttcctccttccaattgctgtggtgtccttttgctacctgcgaatatggatactggtgctccaggcccgaaggaaggcaaaggctgagagaaagctacgcctgagacccagtgacctgcgcagtttcctaaccatgttcgcagtgtttgtggttttcgccatatgctgggcccccctcaactgtattggccttgcagtggccatcaatccagaggcaatggctcttcagatcccagaagggctttttgtcaccagttacttcctagcttacttcaacagctgccttaatgctattgtctacgggctcctgaac

SEQ ID NO: 632 - DNA, 525 bp, Rattus norvegicus
ttcggagtggccagttcaagaacctcaaatggaaacgtgatatgcagtgcctgtgcccctgggacgttctctgacaccacatcatccacagatgtgtgcaggccccaccgcatttgtagcatcctggctattcctggaaatgcaagcacagatgcggtctgtgcatccgagtccccaactccaagcgctggtccaaggacaatctacgtatctcagccagagcccacaagatcccagcccatgggtcaagagccagggcctagccaaactccacacatccctgtgtccttgggttcaacccccatcattgaaccaagcatcacgggtggcatctctcttccaattggtctgatcgttggactgacaactctgggtctgctgatgttaggactggcgacctgcttcatcctggtgcagaggaaaaagaagccctcctgcctacaacgagaaaccatggtgcctcatctgcctgatgacaaatcccaggatgcaataggccttgaacagcagcacctattgaccaca

SEQ ID NO: 633 - DNA, 1619 bp, Rattus norvegicus
cttcgggagatcgtatcccagacggggtgaggggggctccatgtgggggtgggggtggcatggcatgggagggsctgtgcgggcctcacctacgatgtggtctgctgaactctgtaggcccatcagtctcwcagtggccaagtgctgggacccaacccctcggagctacttcaccatcccaaggggtgagcgaccccatggaaaggtggggtagggtggggttcctaggcccagtctgggggtctttcttgctgtcccccacttactgtcacttgtcatctgttgccatgtggtaactatgcagctgacccagtgcgacccatcgacccggctgcctggctgtcccacacagcagcactgaccggtgctctgccccgctatggtacgagtccctgctccagcgccatcacacgcaccagctcttcctcactaaccagctcagtgcctggcgccccacgtaagtggcaactcacaagagccctccaggaaactgaggctaaaggacaagggtcagctccagctttgagctttagtgctcattggagctgttccagggtccattgatgtttgtctccaacaccttcacaaatgtgtacaccaagatacatgtacgcatctctcacagcccggccatgctggtcgtctgcatacattgaagggtcctgccagtcctgtgctgaggattgggaggacatggtagcttctgctttgcttttctgctacctaacataactaacagcttgagctgtccagggaggtgtctgtgggggaggggcaggggctggcttgcccgtgtgtacttggactgtggctcaagttttgatgagagataacctcccgagagtagaagatagaggtttgatcctgccccctgctcccaaccccatggcggttcactctgtgagcctgggctcagagaagtgtgctttgcagagcttgaggaggcaccactgactgtgaagagtgacatgagtgccattgtccgcgtcatgcagttgccagactcgggactggagatccgggaccgcatgtggcttaagatcaccattgccaatgctgtcattggtgagtccctggctgtgtgggaaggacccagtctgttcttcattctggtgtagcttcccagggctcagctaccctgactttcatgggcctatggccaggggcggatgtggtggactggctgtacacacacgtggagggcttcaaggagcgaagggaggcgaggaagtatgccagcagcatgctgaagcatggtttcctgcggcacacggtgaacaagatcactttctctgagcagtgctactatgtctttggtgacctgtgcagcagtgagtaagggttatcgggtagggattattgtggggctcatccatttgccctcacttacccttccactcccttcccgccagacctcgcatccctgaacctcaacagtggctccagtggagcctcagatcaggacacactggccccactgccccacccatctgtaccctggcccttgggtcaaggctatccctaccagtacccaggacccccgccctgcttcccacctgcttaccaggaccctggcttcagctatggcagtggcagtgctgggagtcagcagagtgaag

SEQ ID NO: 634 - DNA, 770 bp, Rattus norvegicus
aaaggcttgagggacaaaggcttgagggacaagggtctgtcttttgttctttaaacagaagaggaacgatgttagccagcctgagaaggatgaagcttctgcctgcttccacatgcccctgaggcttccccaaggagtcagcctgctggggttagggggttgccccgtggaattcccccaaatcctgcttcaaagagcctgctcccagagggcaggagaggaagctgagtcaaagacactaacagggggtgggaatgagaggatagaacctacagtgtggggaggggctccaggctgccctctggtcagggagaggggtatctcagaagcccaaggaagagtggtcttgggcttcargtcttccagtcctmtacaaggctgaccactcagggccttcagacctaggactagatggcccctccaccatgcgtaccctccttccttttcccacagattctgcagtttgcaaaaactcaaccacttccctgagtgctgtggtttcctgtgggtctggggtcctgcctgacttggcagtgggggactgtgggcagggcataaaggagtgggtagtgtaagcactttctttgggctgccccacacacacacacacacacacacacacacacacacacacacacacacccacaccctgagtcagcgtaagcctggagggaggggcggggacactgattcagttttcgtgcctctttaaaacctccgcaaattctgcttcacccagaagcttcggttctcaccatgaacccctggca

SEQ ID NO: 635 - DNA, 386 bp, Rattus norvegicus
tctgtccagagctgcgggccaggccgaggaccggttggccggcggcgttacgtgcgcaagcaacttgtgcctctgctctacaagcagtttgtgcctagtatgcccgagcggacccttggcgcgagtgggccagcggaggggagggtaacaagggggtcggagcgcttccgggacctcgtccccaactacaaccccgacataatcttcaaggatgaggagaacagcggcgctgaccgcctgatgacagagcgttgcaaagagcgggtgaatgctctagccatcgcggtgatgaacatgtggcccggagtacgcctacgcgtgactgaaggttgggacgaggatggccaccacgcacaggactcactgcactacgaaggccgtgccct

SEQ ID NO: 636 - DNA, 591 bp, Rattus norvegicus
cctgagctcagtgccttcttaagaaatgctacaattccccatcttgtcagaaagagggatgtgccagtggtccagccccacagacagagccctgcaagaatactgaactgtaccaacattgactgcttgcaaatctcktgtgcagtgggtcgcctgggaggmggmrmragkgcagtyctraaggtcagatcgagattgtgggcscacacrttcctcmagagaaagaaygaycmttatgctcttgcatccctggtgtcctttgaagtcaagaagatrccktataaagarcagccagcaaarctgccagcsgggagcacagcgrttaagacrtcggttatttgggccactccraatgtctccttctcaattccaytgtgggtcataatrctagcgatccttcttggyttgctggttctggcyatcttaactttagctttatggaagtgtggattctttgatagagcaagacctcctcaggatgamatgacagacagggaacaactgaccagtgacaagaccccggaggcttgacttggaaccatgaacacctaaaattcaagcactggtcctgttcaaagaaaaaaaaaaaaa

SEQ ID NO: 637 - DNA, 643 bp, Rattus norvegicus
tttttttttttttttttgctsgcwymrgsccgcgtggtcgtgccgggatggagtcctcctcgtcctcttcgggctcggctttgsccgmsgtggaccctcagctgcagcatttcatcgaggtggagacacagaagcagcgcttccagcagctggtgcaccagatgacggaactttgctgggagaagtgcatggataagcctgggcctaagttggacagtcgggctgaggcctgttttgtgaactgcgttgaacgcttcattgatacaagccagttcatcttaaatcgacwsgrgsagacccagaagtccaamcctgtyttctcagaaagcctttctgactgatytcagcattmcctctttggaaaagtagttcaagaagggaagagctgctgctgagtcggttaaagaaatggctatggggggattaactcccaattctcttcatcatcttgggacawattgtcacctgagaatgaacaaagaccaatttttatgtatgggarwwrararwmamrwrwatttggttgtgttttttaagctaactgtgtggtaataatttagataaatggaagthtgrgamrmrwawwrmwrwrwawtgggacggcgctttctcaaggtcccttattaactactttatagaattt

SEQ ID NO: 638 - DNA, 1859 bp, Rattus norvegicus
cacgaggcggcacgatggcaagaacaagtatagtttctgcgcccgtggacactgtagcttaactgagggggggaatcagaggtagagactgctcatttgtctagsaggacatyggsctctccctgggagcctgacctcggcccatacgaaacaccaaagacttaagctgagacttctgtatgcaaccaggaggstgcagcaggggtgctgagctctgggcaraaacatcatccctcacccttcaaagtggaccccawgggakaaatccaacaaaagcagtggccacctaacagtccaggacacacagatgtaaacctggagatgagacctgaggagaggtggaaccatgttggccttgtacaacgtgaagaagcagattctgtcttggaagagcctatcaacgtagatgaggaagatggaggtcttcaaatctgccgtgtatgtggggacaaggccaatggctatcacttcaatgtcatgacctgtgaaggatgtaagggatttttcagaagggccatgaaacgcaatgtccggctgaggtgccccttccgcaaggggacctgcgagatcacccggaagacccgacggcagtgccaggcctgccgtttgcgcaagtgcctggagagtggcatgaagaaagagatgatcatgtctgatgccgctgtggaacagaggcgggccttgatcaagaggaagaagagggaaaagattgaggctccaccgcctggagggcaggggctgacagaagaacagcaggcgctgatccaggagctgatggacgctcagatgcaaacctttgacacaactttctcccacttcaaggatttccggctacctgcggtgtttcacagtgactgcgagcttccggaggttctgcaggcctcactgttggaagaccctgccacatggagtcaaatcatgaaagacagtgttccaatgaagatctctgtgcagctgcgcggagaagacggcagcatctggaactaccaacctccctccaagagcgacgggaaagagatcatccccctcctgccgcacctggccgatgtgtcaacctacatgttcaagggcgtcatcaacttcgccaaagtcatatcccacttcagggagctgcctatcgaggaccagatctccctgctgaagggggccactttcgagatgtgcatcctgaggttcaacacgatgttcgacacggaaacaggaacctgggagtgcggtcggctggcttactgcttcgaagaccctaatggcggcttccagaagctcctgctggacccgttgatgaaattccactgcatgctgaagaagctacagctgcgtgaggaggagtacgtgctgatgcaggccatctccctcttctccccagatcgccctggcgtggttcaacgtagcgtggtagaccagctgcaggagcgatttgccctcaccctgaaggcctacatcgagtgtagtcggccctatcctgcacacaggttcctgttcctgaagatcatggctgtcctcaccgagctgcgcagtatcaatgcccagcagacccagcagctactgcgcatccaggacacgcacccctttgccacacctctcatgcaggagttattcagcagcacggacggctgagtggctgcccctgagtggagatctcacggagcagccagacccagatgttctgaattgccacttctagggctatcagatggacacactgataactaacaatgcctctgtctgcagctggctagcatttctcaggaaaaggacacaggagctcagcctgtggaaagtgctggcctagaaattagaccatctctgtggttgggaataaaccttcaaatcctgctaaaaaaaaaaaaaaaaaaaaa

SEQ ID NO: 639 - DNA, 1602 bp, Rattus norvegicus
cttgcgtgaagtagatcataagatagaactatagacataacaccgatgtgagaggtgtcctttatctttcttgttacggagggaaaaacaaatcagcattagtgcccgagcacagtgcgctcctgtgaagtttggttttgtacagaactaagcacttgtgtggatgtgtccatcagttgtgagtggactagacactcaggtcccttgtcctttctcagcctgaattatcttctatgatgagtggcctcatctgcagaaacggataaacctgcggaggaatgtgtttccggtgtccagataaaaatagttaaaacgagttgacccaccctagtccagcactgcagttctccttagatagcccggttggtggcgctcattcagtcccgaggggaccgaggggagtcggcacccaggagctgggactttgcctgtgagtgaatgcgttcctgcatacatttaaagagtcccagtgttttctatggtgcttcattgcaaaattgcaaacataattcttattattattaatttttttttactaaagaaaaccctttttgttaaatcttcgggatttagcacttaaagcccagtactttctctacagagagtcactggccacagctgaatgataccatatcactagtcacagcctccaaaagcaactgaatgagaaaccactctgagaggctccaagtggtcactcccatttgagtacaaacttggggcagggcacatggtttctattctgtacaaaatctagcctcctcctccgggtattcatactttaactgttatgtaactgacatgttcttggtaactaaactcagctgtgtcttctgtatcagtgcagctgatgacttgggtggagttcagcattctcccattgcttctctgagccacataagtgactgcctgggagtggcttgtagaagacagaacctctaacccaacttcattccacaccatttccctcctctgttacacacacacacacacacacacacacacaccaggcacagacacacacacacaccaggcacacacacagacacacagacacacacaccaggcacacatacacaccaggcacacacacacacacacacasrcacacacacacacacacacccaggcacacacacccagccctagccttcctttaaaggttatgctgtgtttcatttgctgcttwtgccttctaggagatgaaaaggctcctggraggtttctgattgccttcccacctcttcgtatgtgtacactctagctgggtggctaaaaaggcagtggctgtgccagctctgtccamtcagctatggtcagytgctccccttcctgcgctgagctgcagaagtcacacaactgtcacccttcactaacgctaagtgcatgccttctgttcacaagtccctggccgtttctgcacataccagacagtctgtgcctgtgttctatggttgtggagagtggatgaacaggtaaatctgtagaacaggttcccttggtattggtcaattatcctagtgtcttgtttatagctgtattatcctaacaatattctataattaaaggtataatttttaaactcaaaaaaaaaaaaaaaaa

SEQ ID NO: 640 - DNA, 3029 bp, Rattus norvegicus
tttttttttttktttttgggaggagtaaggaagaaactgggagaagagcgaaggaaaataaagagaaaataaaagggcttagcccctttcctttgagctgatttaggaagcagtttcakctggcgggaaaggtcccgagggcccagagatgttctccctgtcgagcactgtgcagcctcaggttacagttcctctcagtcatctcatcaatgccttccattcaccaaaaaatatatccgtttccgtcaatacatctgcttctccaaaacagcatcgagatacagttgctgagcatgaagctcccagtagtgagcctgtgsktaatttaagggaccttggattatctgaattgaaaattggacagattgataaactggtagaaaatttacttcctggattttayaaagacaaaagagtttcttcctgttggcatacatctcatatctcggsacagtccttttttgaaaataaatatggtcacttagatatgttcagtacattasgttccwctagcttgtacaggcaasatccaaaaactcttcagagcatttgttcagatcttcagaattttccagttttcatacagtctcgwggtttcaaaactttgaagtcaaggacacggcgtttgcaatctacttctgaaagattagcagaagcacagaatatagcaccatcatttgtgaaggggtttcttttgcgggacagaggaacagatcttgagagtttggacaaacttatgaaaactaaaaacatacctgaagctcaccaagatgcatttaaaactggttttgcagagggttttctcaaagctcaagctcttacacagaagaccaatgattccttaaggcgaactcgtctgattctctttgwtttgctcctgwttggcatttatggactcttaaaaaatccatttttatctgtgcgcttccggacaactacaggacttgattctgcagtagaccctgtccagatgaaaaatgtcacttttgaacatgttaaaggggtggaggaggccaaacaagaattacaggaagtggttgaattcttgaaaaacccacagaagtttactgtgcttggaggtaaacttcccaaaggaattctcttagtggggccaccaggaacagggaagacccttcttgcccgagctgtggcaggagaagctgatgttcctttttawtatgcttctggatcagaattcgatgagatgtttgtgggtgtaggagccagcaggatcagaaatctttttagagaagcaaaagcaaatgctccttgtgttatattcattgatgaattggattctgttggtgggaagagaattgaatttccaatgcatccatattcaaggcagactatcattcaacttcttgccgaaatggatggtttcaaacctaatgaaggagtaatcattataggtgccacaaatttcccagaggcattagataatgccttaatacgtcctggtcgttttgatatgcaagttacagttccaaggccagatgtgaagggtcgtactgaaattttgaaatggtatcttaataaaataaagtttgataaatctgttgatccagaaatcatagctcgaggaactgttgggttttctggagcagagttggagaatcttgtgaaccaagctgcattaaaggcagcagttgatggaaaagaaatggttaccatgaaggaactagagttttccaaggataaaattctaatgggaccagaaagaagaagtgtggaaattgataacaaaaacaaaactataacagcctatcatgaatctggtcatgctattattgcatattacacaaaggatgcaatgccaatcaataaagctacaatcatgccacgagggcccacacttggacatgtatcactgttgcctgagaatgacagatggaatgaaaytagagcccrgctgcttgcacagatggatgttagtatgggaggaagagtggcagaggaactcatatttggaactgakcatattacaactggtgcttctagtgattttgataatgcaacaaaaattgcaaagaggatggttaccaaatttggmaygagkgaaaagcttggagttatgacytacagtgatacaggaaagctaagtcctgaaactcaatcggccattgaacaagaaataagaatccttctacgggaatcatatgamcgagcaaaacatatcctgaaaacacatgcgaaagaacataagaacctggccgaggcgttgctgacctatgagactttggatgccaaagagattcaaattgttcttgaggggaagaaattagaagtgagatgataactctgttgatattgctggttttattacaagaatatacttagtcctacagtctcctttgcaacacttccaacccccacttctgacttggtatctaattccaggatgtgaaacacttwrwmarwmwhmwrwwmmattatttgattttggttattcctgtggtgatactcattggagattagtaacctataacaagtacacgaaaagataaataaagagctgtcaggattaaagtcaawwramaaawrwmaawmawrdtgaaagtaagcaatcattttgtggttgattactccaagtgagtaaaaattgtgcctttatgtactggtaagtatggttttttttttctttgcaagctaamtytgaaaatctatcatctcctgatggtaacatttctctttggggaaacaaatgccatggataaaccatttctacttatatcagtagaratgccattaagatgtacttaattttgttcttgattgrccatgtaaaatggcctttammagmmsskryykkmrktgtaaatataaataymwrcycrgrmyktmratgattgtaatggtttaaaaatgcacatgtatgcccattttctttcagatattactatctcactgacaaaatttgtttcagaacaacagtattttatgaagtaaacaagtraattatattctgaatatctgtataattacattaatctcaaaatcaaaawraaaacaaaaactcaattcctttc

SEQ ID NO: 641 - DNA, 703 bp, Rattus norvegicus
cctgcswysassatgaagtccwgcggcctgttccctctcatggtgctccttgctctgggtgtmctggcaccctggrrtgtggaaggaggcaaaaatgatgctatcaaaatyggagcctgccctgctagaaagcctgcccagtgccttaaacktgagaaaccagagtgcrgtactgactgggratgcccaggaaagcagagatgctsccaagatacctgtggtttcaartgcctgaatcctgttcccattcgtggaccagtgaagaagaagcctgggaggtssswcaratttcaaggaaaatgtytgatgcttaammytcssmayragkgscagaatgacggccastgtgatggcaaatacaaatgttgtgagggyatgtgtgggaaagtctgccttcccccagtgtwagtytgatycctsacattkgcraaatggctctggacccgtgctctawatgttctggaaactacttccctgctttcagggtttcccggttccgggttccggtgctctggggtgcccargctttggacatttgaataatgtttatttctgccsccaacatatctttttgtcccatgtcagcattcatcaagcccctaaggaaatgctgttggagasmaaataaataaaggcaatcatttctctavvmmmaaaaaaaaaaaaaaaaaaaccggcccccggggtcgcgcgcccgcggccg

SEQ ID NO: 642 - DNA, 688 bp, Rattus norvegicus
cgtgtgcagcacgtccagcatgttgtttgcctgggctcccttccctgccctcctgggcctggcagactcctgctgtttcgtcgtgccccgcagtgagtggaaggccctgccatccgagtgctccaagggcctgaagaaaccagtccgctacgtggtgatctcacacacagccggcagcttctgcagcagcccagactcctgtgaacagcaggcccgcawtkygcwgmttyacsrwmtkmarcmkckgggmtggtgsgatgyagcctasaacttcctcattggagaggatggtcatgtctacgaaggccgaggctggaccatcaagggtgaccacacagggcccatctggaaccccatgtctatcggcatcaccttcatgggtgactactcacaccgggtacctgcaaagcgggctctccgtgctgccctaaatcttctgaaatgtggggtgtctgagggcttcctgagatctaactatgaggtcaaaggacatcgagatgtgcaaagcactctgtctccaggtgaccagctctacgagatcatccaaagctgggaccactaccgagagtgagatcttgagaccttgtggagttcccaccctgaaatccctcctaccacctgctgcttcccagtgaccccaataaagacgcagccccaccatgctccagggaaaaaaaaaaaaaaaaaa

SEQ ID NO: 643 - DNA, 2434 bp, Rattus norvegicus
actatagggcacgcgtggtcgacggcccgggctggtactggctagctgaagccagtcaaccttcccatcggaaacccaaataaagagttgtcttgttctaagtcacacagtaattaaaaactgtattagacacaggggttggaactgttttgtggtttttgtttgtttgctaacatcttttcctctgagatttgaaaagttaccaggacttcccatcttcaggtgtctttttaaatccagccgaaattgtagtgcctgtttctggacttggggctccttaggatgttgcttgaagggggaaatcggaatcccttgactctgccatctttgtttccttcctcattctacaaaaagcttttctttccaacaggagctgagctggtaggaacagccagaattcacagtgcagtgctctatctggacagggtcatcacctccttctccattcctggtgttaaatggaaataggccagcgtcaaattacaccctcctgtgattcattccaaaggaagatcccgccctaactgctgcctataaaagagaaggcagagctgccagaagagcagaggcaaggccagcaccgagtctgccaactttcactgaagccagcttcaactttcactgaagccagccttctctctctctctccaccatgcagatctctgccgcgcttctgtgtgtgctgctcacagctgctgctttcaccgtgcacgtgtgggcccaaccaggtgagacttgccctgctgtctttttcccagaacatgctgtaccttctctgggacgttttgtggacctttacagaacaaggcttacccatagtctcaccttcctggctttgccaaagtaaggcaattaaaagaacaagccagtccaaatgacagagccaaaacttgaatctgattctcttagggatcccttaggtttcatttttggagacaagatagttcctgccacagctgcttctgtggtgttccccatgatcctgggtcatcaaataggggcctgggatgaaggtgttctcaggtagaagagaaagggggaaagaggtccaagatctagtgggagtttatccagctcaatttccatagtcagtggttctatagaggccgtgtcacaactagacaccatttcttttatccaaaaaggggactcataaccagtgtctccttattctaaggaactggggcattatactagtgttctccagtgacacccatggttgtcatcagctcttcttgcctctattgactggcattcaagtgagaaagaattgaggacatattaaagagtagagacattaatctagggtgggcaagtcctcccttcatcttgtctccttgacggcttctaaccattcctttaatcatcaacgaaagacccagaatcaaccacaaagaaccttttcttgttctttctttgtagatgggaccaattcatccacttgctgctatgtcaagaaacaaaagattcccaagaggaatctcaagagttacagaaagatcaccagtagtcggtgtccctgggaagctgttatgtaagtacccaactcctgccttcaccccctcagtgataagtcatcccctgaggcagtgaatagaattatatactcaatgagtagagagtatatctctaacacaaactcacatgggaaaactgaagcctgtcacttttttcagagccaccagtttagaacttccttctccttctaagagccaaggggccttttctttggccagtgagaactgcatcttaccattaggcccttcctttttctcaccttcttcctcctccatcccgggggtaatgtcatcaacttgcagtaatacaccaagcagggactcacagaataagttatatgctctctaactgagcccttttccttcagcttcaagaccaaaaagggcatggaagtctgtgctgaagcccatcagaagtgggtygaggagsccatagcatacttagacatgaaaacttcaactccaaagccctgaagacagatgcctgaacagaaaccaaccctgaagtcaagaagcaaaattcctcacccttgtcytttctgagaactgtgctgaaatgggtggactacggtcctaaggggtaggaacggtctgtaggaatgtgaaatagtygctcctaaggaatggtctttaagttattaatatttttatttaatttgccatgtactttggtgtgatttgaatgtaaagccctggagacctcatgtcactttaatgttgtgttacctgcagaattcttcccccgccccattgactttgttcctgtattatgtagggrcattgcaagaatcagtgyaaatattttatttaaaaatgtttaggacaaaatcataatgttatgatactgtgggatgtttaaatgtatgactactgaagtttcatataaaatgtatttttgcamaaaaaaaaaaaaaaaa

SEQ ID NO: 644 - DNA, 762 bp, Rattus norvegicus
catcatgaccatgagacactgtggctgtgcagcagaccccagtccttggtgggtcctgcttctatatgtccatgttgtcattctggccagagccacatctgcacctctgacaactgccactgtcttaaccagaagctcaaaggacccgtgctcttcctggtctccagcagtcccaactaagcagtacccaacattggatgtgatctggccagagaaagaagtgccactgaatggaacgctgaccttgtcctgcactgcctgcagccgcttccccaacttcagcatcctctactggctgggcaatggctccttcattgagcacctcccaggccggctgagggagggccacacaagccgggagcagaggaacgcaagcacctggctacacagggccttggtgctggaggaactgagcccctccctactaagtaccaacttctcctgtctgtttgtggatcccggacaggtggcccagtatcatgtcattctggccmagmwytsggmwsgakkgaagacwgmycyrtccccwtcycwagwraccytstssrgysaswgsmcaggacccagatcagcaggcccaggggccccatgaagccaaccacagcatgaccttgaccrgagcctkgctctcatctacctggagggtgaagtctacaccacaggctgtgattgcctctttccagcggctgaacctcaaactcaagcttcatttctacctagattacaatagttattaagtccttggaaaaaaaaaaaaaaaaa

SEQ ID NO: 645 - DNA, 1420 bp, Rattus norvegicus
cgcatccagcacttccattttccaatcaagtccctctctccacaggtcctgaagtccctagtgctcacgagtcctcgggaaccaggatcactgcagccgcacccacttctgaccgctaccaggccacgtccgtcagactcctcccaagcctgggagccccgggcagacgcaggcacgtgaccgtgacgtcacgcgcgcgcctgcggtctgggccgagggttctcgcgttggcagtcgctcgtggctgctgtctcccggagtgtcgctgtttctgtctcggccctgcggcccgtgagggtacagmatgtaccacaacagyagccagaagcggcactggaccttcgctagcgaggagcaactggcgcgtctgcgggccgacgccaaccgcaaattcaagtgcaaagctgtggctaacgggaaggttcttccaaawgatccgytgtttcttgagcctcatgaagaaatgacactttgcaaatactatgaaaaaagattgttggaattttgttcagwgkttaaaccagctatgccacggtctgttgtgggtacagcttgtatgtatttcaagcgtttttatcttaataactcagtaatggaatatcaccctcggataataatgcttacttgtgcatttttggcctgcaaagkagatgaattcaatgtgtctagtsctcagwwwgwwgggaaccttcgagagagtcctcttggacaggagaaggcactggaacarattttggaatatgaactactacytatacaacaacttaattttcacctcattgtccacaatccatatagaccatttgaaggcttcctcattgatataaagactcgataccccatgttggagaatccagagattttgaggaaaacggctgatgattttcttagtagaattgcattgacagatgcttatcttttgtacacaccytcacaaattgccctgactgccattttatcaagwgcctctagggctggaattactatggaaagctatttatcagagagtctaakkckkaaagaraacagaacttgcctgtcacagctactggatataatgaaaagcatgagaaatctagtaaaaaagtatgagccacccagatctgaagaagttgctattctgaaacagaagttggagcgatgtcattcttctgaccttgcacttaatatggttacaaagaagaggaaaggctacgaagacgatgactatgtatcaaagaaacccaaacaggaagaggaggagtggacggacgatgacctggtagatgctctctaaccagtgtaaatgactgcagcagtacttactgaccgacggaagtaggaagcatgtctgacattttacttttgtcaaaatagtgcaatgtgaaaacatcgaaaatatattaaacttttctaattcttmwawaaaaaaaaaaaaaaa

SEQ ID NO: 646 - DNA, 2325 bp, Rattus norvegicus
tacacatacacacttgccaagtggagaatgcccggccacatccccagccacatctgtggcaaagttcagacagggcaccaatgtggtctctggccccagactcctatccctgaacacagagccccgtgcttgcaccacccagagacagcttgtgagaggagggaggagggcggagaaagagggaagggagagggaaagacaaagaaaggggtgcggcagggcagcagttagcccgagggggcggagagtgagctcagcctggagcaggtcttaacagtcagaacgttgtgagaaggttgaggagagcagctcctgccacagaaaagcttcttgcttcctggtctcaagccccttctttctgggaccaggcactgaggcagcagacaggaagagctggggcccgtctgctggccagaggcactaatcttgggcataaacaggatctccaagctctgggaccagtcctgcagctgacagcccagcagcctgcccctgacgctcttgctaggtgatggaaaacgtgagtttttccctggacagaactctttgggtcttcctyctgkycatgctaggctccaccgcaggccagccgctggggggagaatctgtctgcacagcccggcctctggctagatacagcatcactttcactggcaagtggagccagacagcatttcccaagcagtatcctctgttccggccccctgcacagtggtcctctctgctgggggcagcacacagctctgactacagcatgtggcggaagaatgagtacgtcagcaatgggctgagggacttcgctgagcgtggtgaggcctgsgcactgatgaaagagatcgaagcagcaggagagaagctccakagtgtgcacgcggtattctcggctcccgccgtgcctagtggtaccgggcagacttctgcagagtwagaggtgcaccctargcactcgctggtgtccttcgtggyacgcakkgtccccagtccggactggtttgtgggcatcgacagtctggacctgtgcgarggargccgctggaaggagcargtggtccttgatctttacccacacgatgcagggacagacagtggcttcaccttctcctcccccaactttgcaaccatcccacaagacacagtgactgagataaccgcctcatcgcccagtcacccagccaactcattctactacccacgcctcaagtccttgccacccattgccaaagtgaccttcgtgcggctacggcagagtcccagagcctttgccccaccttccctggacctggccagcagaggaaatgaaatcgttgacagcctytcagttccasagacaccgctggactgygaagtttccctgtggtcatcctggggactgtgcggagggccatgtggaaagttgggagccaagagcagaactcgctatgtgcgtgttcagcctgctaacaatgggactccctgtcccgagcttgaagaagaggctgagtgtgccccagataactgtgtctaaacccagaccccagtagccagcccttaggatccctcgagccttggactctgatctgggccacaaagtgttttcaggagkcccgtgtaggcagggatgagagcatgggcaattttgcaccatttcccwccattcctgggttgacagatgrtcttgawacagaggccctcagtgacaggtaagacacrgactgcctytcccactgtgtgattcmtgaggakcatgggtttgathtacataaattccyktgwaatttmtwactgtggtgggagggaggctscctttgatacagagagaaggcattycaggaacaggtgagaggatgcchtaagcctgtgagccccacaaccacactgytgtcagatacctcagacytgytsccactgcacttgctcytggaggccaagaagtcaaccttcacaccactcttgagctcaccytggggtgaccacaggaggggcaaatgaagwggggcakttttgkaaacttggagcttytgtgtcactgatccctttgcattcaaataaaggttrwgktcctacgmaarawrwmwrarmmaamrrwwraaamtgtgcgttccattgccagatacattggtcacattcaagatgtctccaatccgatggcataggttatcacatcagtaagcgatccccaaacttcattttcttccagagcatttcattttgtgttatcctgataatcaccatatcggagccaccatgggggtgagcttgactcccttccctgacacacttttaactggacaccaacagtaaggacctaggcaaaggctaattgatagatagaagtgtatcacagcg

SEQ ID NO: 647 - DNA, 963 bp, Rattus norvegicus
tctgaatgaccttcttgaagagagaaagatccttgctcaggatgtggcacaactcaaagaaaaaagagaatctggagagaatccacctcctaaactccgaaggcgcacattctcacgagatgaagtgcatggtcaagattcaggagcagaggattctatttcaaagcagattgaaagcctggagagtgaattggagctcaggagtgctcagattgcagacctacagcaaaagcttctggatgctgaaagtgaagaccagccaaaacaacgctgggagaatattgccacgrttctcgaagccaaatgtgccataaagtatttagttggagagctggtctyctccaaaatacaggtgagcaaaytggaaagcggcctgagtcagagcaaggccagctgtattgaagtgcagaagatgctgtttgaggaacaaaatcattttgctaaaatagagaccgagttgaaagaagagctggtcagagtggagcagcagcaccaggaaaaggtgttgtaccttctcagtcagctgcagcaatgccaagtgacagagaaacagctggaggagtcggttagtgagaaggaacagcagctgctgagcaccctgaaatgtcaggaggaagagcttaggaagatgcaagaagtgtgtgagcaaaatcagcagcttctgcaagaaaacagtgccatcaagcagaaattgaacctcctccaagtagtcagcaaagagaaaccccatcttgtgagaaatatcccccagtctccggactcttcctttgaatatattccacctaagcccaaacctttccgtattaaagaaaaatgcccagagaaaagcttcgccatcgaggacctgcagtattattcagagacttctgtggctgaggaggagaatgaggacagtgatgaccatgctgatgaggagtggatcccaacaaaattagtcaaggtgtccaagaagaacatccaagg

SEQ ID NO: 648 - DNA, 1424 bp, Rattus norvegicus
cggccgcaaaggttttctttctcacagcatctccacccaaccagcagaaaaccggttgctgtggttccaccaaaatatggaacttgattttggacattttgacgaacgagacaaagcatctagaaatatgagagggtcacggatgaatggacttccaagtcccactcatagtgctcactgtagcttctacagaaccagaaccttgcaggcattaagtaatgagaagaaggccaagaaggtacgtttctaccgcaatggggaccgttacttcaaggggattgtgtacgctgtttcttctgaccgttttcgtagttttgatgcattgctggctgacctgactcgatccttgtccgacaacatcaacctgcctcagggagtgcgctacatttacacyattgatggatccagaaagattggaagcatggatgaactggaagaaggggaaagctatgtctgttcctcagacaacttctttaaaaaggttgagtataccaagaatgtcaatcccaactggtcggtcaatgtaaagacmtcwgccaacatgaaagcgccccagtccttggctagcagcaacagtgctcaagccagagagaacaaggacttcgtgcgccccaaacttgtgaccatcattcgcagtggggtgaagcctcggaaggcggtgcgtgtgcttctcaacaagaaaacagcccactctttcgagcaggtcctcactgacatcacagaagcgatcaaactggaaaccggagttgtcaaaaaactctatacccttgatggaaagcaggtcacctgtctccatgatttctttggtgatgatgatgtgttcattgcttgtggccctgaaaagttccgctatgctcaagatgacttctccttggatgagaatgaatgcagagtcatgaaagggaatccatctgccacagctggcccaaaagcttccccaacacctcaaaagacatctgctaaaagcccaggcccaatgcgccgcagcaagtctccagctgactcaggtaacgaccaagacgcaaatggaacttctarcagtcagctctcaacacctaagtcgaagcagtctcctatctctacacccacaagccctggaagtctgcggaagcacaaggacttgtacctgccactgtcattggatgactctgattcacttggcgattccatgtgaaagatgataggctaaatcaaagccgattattatagcagaatactttcgctcaagtgaccaacaaggctattggtgcttagaatttttgttgttattgttgcttttcaaaacactctgtagtatgtagggtttattttcttgtgacttctcttctgggccactaattcacatttaccaataagagatagattgataaccatcttttgagtgacttttccagaactgcaaaatgtgctactccatgacctta

SEQ ID NO: 649 - DNA, 837 bp, Rattus norvegicus
cagcgggcgctactaaggcaaaatcgcgcgcagctctgagcgcttcaaggagctcacccccaactacaatcccgacattatcttcaaagacgaggagaacaccggtgccgaccgcctcatgacccagcgctgcaaggaccgtctgaactcactggccatctctgtcatgaaccartggccgggtgtgaagctgcgggtgacsgaaggctgggatgaagacsgccatcactcagaggaatctttacactatgagggccgcgcggtggatatcaccacctcagaccgcgaccgaaataagtacggactactggcgcgcttagcagtggaggccggcttcgactgggtgtattacgagtccaaggcccacgttcattgctctgtcaagtctgagcactcggctgctgccaagacaggtggctgctttcctgccggagcccaggtccacctagaaactggggagcgtgtggccctgtcagctgtraagccaggagaccgggtcctggccatgggggaagatggcaaccccaccttcagcgatgtgctcattttcctggaccgtgagccaaacaggctgagagctttccaggtcatcgagactcaggatcctccacgtcggctggcactcacgcctgcccacctgctcttcattgcggacaatcatgcagaaccagcagcccgcttccgggccacgtttgccaaccacgtgcagccaggccaatatgtgctggtagcaggggtccaggcctccagcctgctcgggtggcagccatctccacccacgtggcccttgggtcctatgctcccctcacgaagcatggggacacttgtggtggaaga

SEQ ID NO: 650 - DNA, 1908 bp, Rattus norvegicus
  misc_feature (1867)..(1867): n is a, c, g, or t
  misc_feature (1878)..(1878): n is a, c, g, or t
gcaaaattaatttattggccactgttcgckwakwsggcssasgargccgactgttycggtctctgcatarcaggsccmaacctttgctccagagatcatggctgccgaggatgtggtggcgactggcgccgaccccagcgagctggagggcggcggsctgcttcaagagattttmacgtcgcctctcaacctgctgctccttggcctctgcatcttcctgctctacaagatcgttcgcggggaccagcccggtgccagtggggacaacgacgacgacgagccgcccccgctgccycgcctcaagccgcgtgacttcacccctgccgaactaaggcgatacgatggagkycaggacccgcgcattcttatggccatcaacggcaaggtgttcgacgtgaccaaaggccgcaagttctatgggccggagggrccatacggrgtctttgctggaagagatgcatccaggggccttgccacattttgcctggacaaagaagcactgaaggatgagtatgatgacctttctgacctcrykcctgcccagcargagaccctgaatgactgggactctcagttcagttcaccttcaagkaccatsacgtggggwaaactgcttgaakgagsggaggakccgwytgtgtactcggatgatgwwgaacaaaagatgaggctgctcggaagagtgactgwagcagtcagwggagcatatctattkttgtattttgcaaaatcatttgkaacattccagtctgtctttacaacatggwgatttcaatatttwraraarhwwwraamwwgyaagttttttaagtaacatcactagtgacaccgatwwaatcaactcgtcttagaatgcatgatgtgtttgtacgtcacaaatccagaaagtgaacttyagwkctctagatscaaatrgkaaagctgtttctcttctatctgtagktaaaactgaattacamttttattttcctgagakggaaaacttgggttatttccacawactggccwwwtkkshagwgcacacacacacwgtggccmcawmwsgwsratgtactaagwatgaagagagaaggycttakccatgctatagtctgaaaacaagcccattttacccaacagacttaactgcatgattttygdkktatctacctctaaagcaaaactgcagtgttccaaagtctgwggkrktgatymaaaacagaagtccagtaacaaaatgaaaaytcrrtamkrggtttagttggggcaaacacattgcctgwgwtcatggactgatttatcatccctgtccccacgtggacactcccacacmcagtarmtctcasacacytggtaattggcagktggaactacaacagaaatctgaaaattcaaggtagaactttgcaaaagaaaaatctgttgcttgtascagggcaatggwtatgtggwtattggccrarkgtaaawtytgagagcaatwtacrggacaggaacaggtgtgcgcttttcaaaagctkycactgacatctbtgaagaatgdgaaamcmctacatggcacwagmtgggtgattttgaawggaaaatmcattcctaaggtaacagttaamtccttytgttgtyacaaaaytsrtagtygcttyaaaarwrgyartcagstgtytarryytwrswtarwastcttgrktaawastaaayvtwgcttaagtagmcthtgcagktgwawacatttgtaaaagtwttatytgaacaaswagtgaggtttcaractmttgtaatkgtmgytarawmgwcawkgdatwttytkgygagmtgkgttwaakggttttmccycaaatcaraaaaaaawkgaagtgcttggrwcmgktamtaamacggttttgsmmhnwmdharaamwnwaaawwmamawrmrrmhrraamaaaaaaaa

SEQ ID NO: 651 - DNA, 1727 bp, Rattus norvegicus
  misc_feature (1628)..(1628): n is a, c, g, or t
  misc_feature (1681)..(1681): n is a, c, g, or t
cctcgtccttcttgctgtggcacttcagacctccgatgcaggtccctatggtgccaatgtggaagacagtatctgctgccaggactacatccgtcaccctctgccaccacgtttcgtgaaggagttctactggacctcaaagtcctgccgcaagcctggcgtcgttttgataaccatcaagaaccgagatatctgtgctgaccccaggatgctctgggtgaagaagatactccacaagttggcctagggagaagggcctgatgaccacgggtctggtgtctccacaaggctcagcaaaccctatccttctgccatccagcaagagccttgccaacaactccacctttgctcacctccatcccctgggttgtcactctgtgaagcctcgggtccctgtacttcctgtccgtcccctccagctcattctcttccaacgtggcagccgggaagcacttctggctagccttacccaatactactcccactgctttaaatgagacaggtccttgttttggtgcctttggatcctatgatgccttcccagtctccagccttggcccccttctcttcttacatgtagggaacaccaatatctttcaagtatgtgctacccaattcctcttcctcggaggctgctgggaccggaatataccctgctgcaggccctctccagcaccactcacctcccaggcttccatccgtcccagtcccaagccccatgcttcagacttccttggcccccacctacactcagaattctgggagtctcagactggtccactaggccccaagggaggaggtccccacaagagctcctcctgtttctcggtctccagcacaggagtgggctcagaatcagatttctgaaaggagctgcaaattctaccagtaaaattaatctttccccccatccctgatgtaggcaaaagacagtctcctctcaacacggagactcaggttgttagaaaggggctatgtaggtcaactgtgacctaaattcaccaagaatcaacttccatccatccctcttcaaccgaatgttaggtcttttactttttctacttctgactccatgcctgtgtagttgataatcaaagtcatgctatggtgacagtgatcgccatagcttggtattataagctatagttatatttatataggaaagaggataaatatatgtgaggccaaatagacgaactggagagtcttacgacctgcgggcaggaaggaccatacaaagcccttcagaaagcagctggttgtgggagctacaggcacagtggcatagttaaattaaagaacttagttgaaattattcttgagtgggctggggccaagtcaggaatttaaaaatcaattttggtttccctggagacaacagtgccccagggtggggaaataaatttgcttgctcctttggagggaacagtggcctggcttagctgagtgaatggattgcgtgagcctgaggacattgcttttcccctttgagcctcagctgacagaatatgggaccacaaagggttttccccaacccacagggactgacagtgccagccacagctgtgttcagggcttatgtccttccagaaggagcacccgatgaccagggccaccattagtggtantttgcccactgccatgcatgtcctgagggtcacctcctttcctaattttgggnaaataaatgcttgtcaatagtgcaaaaaaaaaaaaaaaaaaaaaaa

SEQ ID NO: 652 - DNA, 2104 bp, Rattus norvegicus
ggtctgagaggagatagscatgaccttcaccttcacagccctgctctgtcttggactgactctgrgmctctggatcccagtgctgacmgggtccctccctaagcctatcctcagagtacagccagattctgtggtctcaatgggaactamggtraccttcrtttgtgaggagaccattggagtyaaagagtctsatctctatagaaatggaaacctacagagaasagttcyaaagaacmatcagaagccaacaaacaagactgaattctyattctyaaatgtagaccagcaaaatgcagggcaatatcaatgytcctacaggactcagrstaagtcatcagactacagtgagcccctggagctagtggtcacaggagcctactcgaaacccagcctttcagcccagaccaaccctgtggtgacctcaggagggtatgtcaccctcaaatgtgagccctcacaggacaatcacacgttgattcttactgtagaaggatctcagaaacmctcctggaggaaggacccagagtgtaaccgctatactgagaagtgtcatgccctgttctatgtgggccctttgacctccaaccagagatggatattcagatgctacagctatgaaaaacacacaccacaagtgtggtcagctcctagtgaaccagtggagctcctggtgtcagggaaactgcaaaaaacaaccatcaaggctgaaccaggctctgtgatccgctctggaagagccatgaccatctggtgtcagggggacctggatgcagaaatatattttctgcataaggagggaagccacaatacacagagcacacagaccctacaacagcctgggaacaaggccaagttcctcatcccttctgtgacacaaaggcatgcagggcaatatcgctgctactgttacagctcagctggctggtcagagcccagtgacaccctggrgctggtggtgacaggaatctactactatggagtcaagctgtcaggactkcccagccctgtggtgccagagggagrgaacgtaacactccactgtacctcacacagcaactatgataaattcattctcaccaaggaagatcagaagttcaccagctcactagacgcagagtatataccttctactggacaacaccaagccctgtttgttatgggacctatgactccaaactactcagggacattcagatgttatggttactacaagcataccccacagttgtggtcagtacccagtgagctcctaaaaatattcatctcaggaccatcgaggaagccctctctgctaagtcatcaaggccatatactggaacctggaatgagcctcacactgcagtgttactctgacaccaagtatgacaaatttgctctgtacaaagaagggggaactgacatcatagaatcctttagccagtggaccaaggctggcctctccatgaccaacttcacactgggctatgggagacactccactggaggcaaatacagatgctatggtgcacacaacctctcctctgagtggtcagcctccagtgaccccctggacatcctgatcacaggacagcttgatctcgctccttccctctcagtgatgcctaactccacagtacactcaggagagaatgtgaccctgctgtgttggtcaatgtaccctgtggacactttcattctgtcaaaggagggatcaggccagccaccccttcgacgaaagtcaaagttccaagatcaacagtaccagtcagaattctccatgagagctgtgacatccaagctctcgggcacctacaggtgctatggttctcccgactcatctctctacctgttgtcatttgccagtgcccctgtggagctcatagtctcagaatccatcgaagcctccagctggccagctaaaaggttcatcacaacagccaccccagaaaaccaggatcacacaacggagtttctcatcaggatgggaatggctgtcctggtcctcatagtcctttcgattctagctgctgagccctggcaaagtcatagacagacccaccacgcagctggcaaataatctaaagagaaaggacagctttcaatgttctacactctgcaagcc

SEQ ID NO: 653 - DNA, 1486 bp, Rattus norvegicus
cacgaggcgactccttacgcctgtggcgggtggccgcgacggagggcgcttgagcgcctgcgcggtacctaccttgggtacaggcgccaatagagactggcgggagtaaataccatggcgtgggttccagccgagtctgcggtggaagagttgatgccacggttgttacctgtggagccctgtgacttgacggaaggtttcgatccctcggtaccccccaggacgcctcaggaatacctgaggagggtgcagatcgaagcagcccagtgtccagatgttgtggtagcccagattgacccaaagaagttgaaaaggaagcaaagtgtgaatgtttctctttcgggatgccaccctgcccctgaaggttattccccaacactgcagtggcagcagcaacaagtgatacagttttcgagtgttcgacagagtgtgcacaagcatagaaatcactggaaatctcaacagttggatagtaatgtgacaatgccaaaatctgaagatgaagaaggctggaaaaaattttgtctgggtgaaagattatgtgctgaaggggctactggaccatctacagacgaaagccctgggrttgattatgtacaagttggttttcctcccttgctgagtattgtaagcagaatgaatcaggcaaccattactagtgtcttggaatatctaagtaattggtttggagaaagagattttactccagaattgggaagatggttctatgctttgttggcttgtcttgagaaacctttgctacctgaggctcactcactgattcgacagcttgccagaaggtgttctgaagtgaggctcctggtgggcagtaaagacgatgaaagagttccagctttgaatctgctgatctgcttagttagcaggtattttgatcaacgtgatttagctgatgagccatcttgatagagcttacctcctggggatggaagagagttctgtgaagggagcctaagtctgaggaagcataattccaacctgaggacagagtgcatcacttcttcaagttgtgtgaagggtttcatcttaatctgcaattcaagttgatattcaaaawawaramwwrawwggtttaagtgtctgaaatgtctacggaaagcccacctggcatctgatgagcagttggaacagttttcctcagttgcatgcattgaaaataggccacgtgggacttagtacttaagcggcttgcataaaaactgctgacattttatacagtcccctggtgctgcttcattggttttttacaatatacatatatatttatgttgaaatgtawwwwramwamwmaaawtttacttgactcaaacaaaataaaagacaatggatgtccwwararwwrmaawwmmwamarawraaawrrmaaawctattcatagttaacaaaagtaatccagtgttcatgtttaaactcaatagtcttagtttaattacaccaccaaaaccttttctaaaaaaaaaaaaaaaaa

SEQ ID NO: 654 - DNA, 793 bp, Rattus norvegicus
ggcatccagctgctcctctcagtgccggtccagcatgtgtcaatcacgctacctcctcttcttggccacccttgtcctcctaaaccacctcacttcggccagggtcataccagtctctggacctgccaagtgtcttaaccagtcccaaaacctgctgaagaccacggacgacatggtgaggacggccagagaaaaattgaaacattactcttgcactgctggagacatcgatcatgaagacatcacacgggacaaaaccagcacactggaggcctgcttaccactggaactccacaagaatsagagktgcctggctactaaagagacttcttccataataagagggagctgcctgcctccacaaaagacttctttgatgatgaccctgtgccttggtagcatctatgaggacttgaagatgtaccagtcagagttccaggccataaatgcagcacttcagagccacaatcatcagcagatcactctggacagaaacatgctgatggctattgatgagctaatgcggtctctgaatcacagcggcgagaytctgcaccagaaagctcccatgggagaagcagatccttacagagtgaagatgaagctctgtatcctgctccatgccttcagcacmcgmgtcatgactatcaacagggtgatgaactatctgagctcctcctaaggaggagggctaggagtcaggtagtcctggcctggttgaccttcagctcctgtaggaatctgtaaccccaaaggtggcacggctgcctcagcgtgggcccctccattgtgt

SEQ ID NO: 655 - DNA, 1401 bp, Rattus norvegicus
atgaccttgctgctcctgggtgcggtgctgctggtggcccagccccagctcgtgccttcccacccggctgctcctggcccgggactcaaacagcaggggcttctgaggaaggtgattattctcccggaggacactggagaaggtgcagccaccaatggttccacccagcagctgccacagactatcatcattggagtacgcaagggtggtacccgagccctgctggagatgctcagcctgcatcctgatgttgcggcagctgaaaacgaggtccatttctttgactgggaggaacattatagccaaggcctgggctggtacctcacccagatgcccttctcctccccacaccagctcacggtagagaagacacctgcctacttcacttcgcccaaagtgcctgagagaatccacagcatgaaccctactatccgcctgctgctcatcctgagggacccatccgaacgtgtgctatccgactacacccaggtgttgtacaaccaccttcagaagcacaaaccttacccacccattgaggacctcctaatgcgggacggacggctcaacgtggactacaaggctctcaaccgcagcctgtaccatgcacacatgctgaactggctgcgttttttcccactgggccacatccacatcgtggatggcgaccgtttcatcagagaccctttccctgagatccagaaagkcgaaaggttcctcaagctgtctccmcagawcaacgcctcgaacttctactttaacaaaaccaagggcttctactgcctgcgggacagtggcaaggaccsctgcttacatgagtccaaaggccgggcgcmccctyaagtagatcccaaactacttgataaactgcacsaatattttcrtgagccaaataagaaatttttcaagctcgtgggcagaacattcgactggcactratttgccgtctgttaggcacgggacttttcctgttgtaacttctggtgtacatctgaagtggggggaggaacaaattttaaaaaagcatttaagctataatttatttgtaaaacccacaaatgacttctgtacagtattagattcacagttgccatatatagyagttatatttytctacttgwtaaatggagggcgttttgtattgtttttcatggwtgttaacattgwgtatgtctctataatatgaaggaacttaactattgcactgaaaaaaataagagatttttttttctggaramrwmwwwwwwwwwwaatataattaacctgcctccaattcaaaatagctctttgtttgcaaccctccttgtcaaatctataatctttttctgcttaaaaaaatttattggtattatggaaaaaaaaaaaaaaaaaaaaaaaaaataaaaaaaaaacacgtgcggccgc

SEQ ID NO: 656 - DNA, 184 bp, Rattus norvegicus
cacccaagcctttgatattggaaccctgaggaatcctgcagctatcgaggagaaaaagctgcggcgagatatcattcctgaaacgttatttataccgcggcggactcctacggccccggataacacggatgtccgggatttcattaatgagcgcctcaaagagcacgacttggaccccactgcg

SEQ ID NO: 657 - DNA, 1425 bp, Rattus norvegicus
atggagaaaggactcgctttgcctcaggattgccgggaccttgtgcacaacctgaagattcgaggcagatatgtcctgttcttggcatttgtggtcatagtttttatcttcattgaaaaggaaaataaaatcatatccagggtctccgacaagctgaagcagatccctcagtttgtggcagatgccaacagcaccgacccagccctgctcttatcggaaaatgcatctctcttgtccctgagcgagctggattccaccttctcccatctgcggagccgcctgcacaacttgagcctgcagctgggcatagcgccagcaatggaggcccagggccaggaggctgtggcagagaagccatcccagcaggctggagcagggacccggcgccacgtgctcctcatggccaccactcgcaccggctcctcattcgtgggcgagttcttcaaccagcaaggcaatatcttttacctctttgagccactgtggcacatcgagcgcaccgtgttcttccagcagggaggtgccagcgcggcgggctcagcgttggtctaccgcgatgtcctcaagcagctattgctgtgtgacctgtatgtgctagagcccttcatcagccctccgcccgaggaccacttgactcagttcctgtttcgccggggatccagccgctcgctctgcgaggatccggtgtgcacacccttcgtcaagaaggtcttcgagaagtaccactgcaggaaccgtcattgcgggccactcaacgtgaccttggccgccgaggcctgccgtcgcaaggaccacatggccctcaaggtcgtgcgcatccgtcagctggagttcctgcagcctctggctgaggacccaaggctggacctgcgagtcatccagctggtgcgcgacccccgggccgtgctggcttcacgcatggtggcctttgcgggcaagtatgagagctggaagaagtggctgtccgagggccaggaccagctgagcgagaatgaggtgcagcggttgcggggcaactgtgagaacatccgcctgtctgcagagctgggcttgcggcagccagcctggctgcgcggtcggtacatgctggtgcgctacgaggatgtggcacgcaggccactgcagaaggcccgagagatgtatcgctccgcaggcatccccttgaccccgcaggtggaggactggatccagaagaacacgcaggcggcgcgcgacagcagcgacgtctactccactcagaagaactcctcggagcagtttgagaagtggcgcttcagcatacccttcaagctggcacaggtggtgcaggctgtctgcggcccggccatgcacctcttcggccacaagttggcaaaggataccgcctcactcaccaaccgctccatcagcctgctggaggagcggggcaccttctgggtcacgtag

SEQ ID NO: 658 - DNA, 3044 bp, Rattus norvegicus
ccatggtttcggtcggtcggtctctgtctctctgtctctgtctctctgtgtgcacgcgcgctcgcacgcgttcatgtgggcgtgcatgtgtgtattaagagggatacgctgctccaggctggcctcaactcccttttaggcaggccccaaactcttcatcctccagtctcagtttccaaggtagcttaaacaaggatttcacagagcgttcctcgggtgagcacagtagtgactccagactccccatgcatcggtccaggtttcccggggcctgaggctggggagacaccggggaagccttgtcacaccgtgttccccgcggagtgccaggtgccacccccgcgcgctaactatgctgttttgcctggcttgttgacgccgtcgccaaggggacggacggggcggggcccgggcccgggggcggggactgaggcgcgcagcccggggtcccgtagtggctgccacagccgccgccgccaggcttatataccgcggctaaatttaggctgagctcggagctcgtccccatccgggacgcgtttccgtcgacgcctcctagccccgccctctgtgtctgccgcgcctataaggcctgggtgggcccggccacagcacacacagtccctgccatggcgctcagcgagcctatcttgccgtcctttgccactttcgccagcccctgcgagcgcggcctccaggaggtgagggcacgcgagggtccgcgggcggcggggtatcagggtatcagaccatagggtgcaggagcgagtactggagatgacaaggtccggggtgcggaccgctggcggcggtgggagaccgacctcagggcgccggtagttagattgtcatccgtgaggacttagacctcaggctgtggggcaggagggagggtgcagggactgaagacacgcgcgccgagggatgccgtgcactgggtgcagaccccaatggcctaggagttagactttggggtgcagggtagcaggaggaagccccgcgctcacgtcccgcgccctgtctcctgcagcgctggccgcgaaatgagcccgaggcgggcagcacggatgaggacctaaacagcgtgctggacttcatcctgtccatgggactggacggcctgggcgccgagaaccctcccgagcccccaccgcagcccccgcctcctgcgttctactacccggagccgggtgcccctccgccctatggcaccccggcggcwsgmstgggaacggagctgctgcgcccgratctggatgcgcytcagggsccggctmtacacgrccgsttcctcctcgcgcctsccggrcggsygrkgaaarccgagcccccgkaggtggacgkcggcggctacgggtgcgcagccggcttggctcgcrgaccgcgcgggctgaagctcgagggcgccctgggagcgacaggtgcatgcatgcggggtcmtgmtrrccgtcccccaccrscvtccgacacrccrycgmtmagycccgacggcccccmgcrcctcccggcgcccggtccccgcaacccgkkmcmgccaccyttsggssscggccccagmttcggcggccccggccccgcgttgcactacgggccgcccgctcccggcgctttcggtctsttcgacgacgcggcggcggctctgggtcttgctccccctgccacgmgcggtctcctcacgccgccctcgtccccgctggagctgttgkaggccaagcccwagcgcggccgccgctcctggccccgcaagcgcgccgccacgcacacttgcagctacaccaactgcggyaagacctacaccaagagttcgcacctaaaggcgcatctgaggacgcacacaggtgggcgcctggcctcactccccggagctgcagcagtgggatggatgggagcgagttcaggaacaggctakgttagagagggagagcctgtccatcctccggaagggaaatggatactgtccccagagtctggctctggcaagggggagtggcagttkaacggattggctacggggaagggactcggttctcaagaattctggacagtgcargtgtagtagggtctgtgagggacatatttaaagaagctggggagggttgggctggggctaagctggacgactaacacccccagcagcactgcatataaaaccctggcatggtggcttgagcctgtcatctcggcactgagcagaacaggaattcagacctaatctcagaatgttagggaaggggtgcgcccgagcctgcttgtggtcagcttcaggagcccaagggtctctgtttggattagatatgggtggggatgagattggagagggaggggggtcagtgctatcaggtgctgcccgcccggaataggctttcggggaaactgaggcttaakgyscwtcswkkmygcyayargtgagaagccttatcattgcaactggracggctgcggctggaagttcgcgcgctctgacgagcttacccgccactaccgcaagcacacgggtcacaggcccttccagtgccacttgtgcgaccgggccttctccaggtccgaccacctggctctgcacatgaagcgacacatgtagcctgggtcgactcggccagcccatgagcgactgtggcgggttccacgcgccgggcacggcccccttgcaacaaactgactgttatttattggaccctgaggacggagtcggacaagagtggccacaggaaaatgactttgccaccagttccggctcccaccgtgactgaaggctcmaggaaagaagacaggagcctgtgaagaatgttttcaaaatggtgcaataattgacttctttctctcgggttcccactagaggatcgaggctagccttgtgagaaatgcctttgagtttactatccccaactatccccaacgttgtttttataatattgtatataagtgaccgtggcaatctgtatgactataagggagacgatggcatctctgtcgcctgcttcgtttttataactcytttyttmattrammrmgktttggatctttrraaaaaaaaaaaaaaaaaa

SEQ ID NO: 659 - DNA, 1242 bp, Rattus norvegicus
gttgctgtaagccgagtgcatcttagctggccatggcgaccccrgcacagcggctgcaccttctccctctgttgctgctgctttgtggtgagtgtgcccaagtatgcggttgcaatgagacaggaatgctggagaggttgcctcgctgtgggaaagcctttgccgaaatgatgcagaaggtggacgtctggaagtggtgcaacctgtcggagttcatcgtgtactacgaaagcttcactaactgcacggagatggagacaaacatcgtgggctgctactggcccaacccgctggcccagagctttatcacgggtatccataggcagttcttttccaactgcactgtggacaggacccactgggaagaccccccggatgaagttctcatcccacttatcgcagttccagtcttgytgaccgtggctatggctggsctggtggtrtggcgtagcaagcrcactgaccggcttctgtgagggcctgcgggatggaaggccgtgcctggcaagctagaagaatgtcgcccagagctctgagagcctgcagactctgtttctgtctggtctgccttggccacaccctacctgswcgwgkcwragkcctscwgactwgwctgwcgtkgcccttgctgtctagcctgctgcctggtggggttcaggctgccccgacaggtgcttcactctttcttgggctagtggaagaaagtgacaaacctcacatttgtgtaccaggcgtggaaatcatctcttgctgagtcccaccctccctgggctgaattcccgagtytctagacatttcttggcagagtctggcccagcctcaaccctaacccaggtcctgacccatttctatccctgaccctgacctctgctacgcttggggcagagagggcaggcaaggtcatctggaaggtgtggcgtcccgagcagaaagagagatgagcacattctctgttggacatgaagrgtagtcggggggattggggaatggagttgttaggagtcatgtgtgacctacggacctgcctgtcttctaggcgatctgccatgattctgtgtccagtgtgggctggagctgtgatttgtttaacccttcagaymcctaccctgaagatagagagtgaacctccttcctgaggggtattcctgggggtgaggcacgctctgagcgtgctcaagggttctgtctgctgatgtctgctttctgattaaagtgtctccttmcaaaaaaaaaaaaaaaaaa

SEQ ID NO: 660 - DNA, 881 bp, Rattus norvegicus
cggtatttcagctcccaccagaccacagcgccagaggtgaacaatatcttcatcaaacaagaacttcctataccagatcttcatctctcggtcccttcccagcagggccacctgtaccagctgttgaatacacctgatctagacatgcccagttcgacaaaccagacagcagtcatggacaccsttaatgtctctatggctggccttaactcacacccctctgctgtgccacagacgtccatgaaacagttccagggcatgcctccttgcacgtacaccatgccgagtcagtttcttccacagcaggccacctactttcccccatcaccaccgagctcagagcctggaagtcctgatagacaagctgagatgctccagaatctgaccccacctccgtcctatgmtgctacaawtgcttcgaaactggcaattcacaatccaaatttacctgccactctgccagttaattcgccaaatatccaacctgtccgatacaacagaaggagtaacccggatctggagaagcgacgcatccatttctgtgattatgatggttgcacaaaagtttatacaaagtcgtctcatttaaaagctcacctgaggactcatacgggcgagaagccctacaagtgcacctgggagggctgcgactgsaggtttgcccggtcggacgagctgacccgccactacaggaagcacacgggtgccaagccgttccagtgcgtggtgtgcaaccgcagcttctcccgctccgaccacctggcgctgcacatgaagcgccaccagaactgagcactgcgcacaaccggctmgacgcctcgcagtccgctcgccatcctttaaaccgcagacctaacttcatataaaaaaaaaaaaaaaaa

SEQ ID NO: 661 - DNA, 1430 bp, Rattus norvegicus
cccaataaagcgggcattctacaccagggaggccgcactgtgctgagtgaggctgcttgccagtgcggtcagagtccgcctcctctatccaggacataaagacttcgccagcctcctcacagaggaagcaggcatttcatctgcatatttgcagcaaccatgacaaccttcgtgaagctcagaaccaaagccaagatgcccctggtgggcctgggcacctggaagtctcccccaggccaagtcaaggaagctgtgaaggcagccattgatgctggatatcgccactttgactgtgcctatgtgtatcagaatgagagtgaggtgggagaagccatccaagagaagatcaaagagaaggctgtgaggcgggaggacctcttcatcgtcagcaagctgtggtccactttctttgagaaaagcctgatgaaggaagccttycagaaracyctcwcrgatctsaagctggactayytggacctstatctwatycactggccwcagggayttcaggcwgggaargarttmytmcccaaagayrrwcaaggcwamgtyctcmysagtaaawcmacrwksytggawgcctgggagggcatggaggaactggtggaccavgggctggtgaaagctttgggcgtctccaacttcaaccacttmcagatcgaaaggctcctgaayaagcctggactgaaacataagccagtgaccaaycaggtygagtgccacccttacctcacccaggaaaaactgatccagtactgtcactccaagggcatcghggtcayagsctacagtcccctgggctccccagacaggcctwrkgcyaagccwgakgacccygtaktgctrgagattcccaagatyaaagarattgctbsaaagcayaagaaaacwryagcycaggttctgatycgrttccatrtmsaraggaacgtggcmgtgatccccaagtctgtgacactctcacacataaaggagaacattcaggtctttgacttccagttgagtgaggaggacatggccgccattctcagcctcaacaggaactggagggcctgtggcctgtttgtcacaagcgatgaagaggactttcctttccacgaggaatactgatgttggttcgcttgatgagattcaagccgggtagattcctttgtccttgtgtgagactcactcctcctgaagcagattttagccacgtctctctaaaacaacctggatgtaggctaccatttggccatgyaggatttaaatttttgtgttcatcaaggtgcagactctcacagggaaaagtgagtccagagaaactaaggtcaatggttttcactaatgagggctgagcaaatgtttctcatcaggaatgcattaccatggtaacactggagacacagagataaaacaataaaatgtaataacagtaaaaaaaaaaaaaa

SEQ ID NO: 662 - DNA, 759 bp, Rattus norvegicus
agccttgtctggttctcaggtggaaacggcagtgcactagacgccttcacctacgggccctctccggcaccagatggcacctggactagcctgggccagctttccttgtcctctgaagagcttgaagcttgggagcccttggtctgccacackaggcmwgyrgscksaggcctcmacakrwgymcrsaysccctcmagytrycaggggaagaagcttccacagacagaacctgccctcaggagactctcagggggacacaacgtcaggtactgcggctgagcgtcctgcgtctgctcctcttcaagctgcttctgctagatgtgttcctgacctgcagccgcctctgtgtgctggcgggccagcacmtattgccaccaccctcaagcaagcaagccccagcttccacccaccaaagttggacttaatgaggttatgagcttgatcttgtccacccatctaagtctagggtggtaacactggacactactgctccctggggcaggaaacacaragtcccggagctggtgatccccgctcagtgtttcttgttcaaactggggacttccttgtttttgtgtatgtggtctccctcttccygtgattagagctatcggggactggagtcttgcctcccctatcagactgagactttgggaggaaaaggactatgtctctcccatcagactgggcaggaggatgtgcccggtaactaggcacaatataaaaggtttctacaacactaaaaaaaaaaaaaaaaa

SEQ ID NO: 663 - DNA, 287 bp, Rattus norvegicus
cgagctcctactgaagcccaagttcagcggcgtggagaagatcaagaccatcggcagcacgtacatggcagctgcagggctcagcgtcgcctcagggcacgagaaccaggagctggagcggcagcatgcccacattggtgtcatggtggagttcagcatcgccctgatgagtaagctggacggcatcaacaggcactccttcaactccttccgcctccgcgtcggcataaaccatgggcctgtgattgctggagtgattggggcccgaaaacctcagtatgacatct

SEQ ID NO: 664 - DNA, 666 bp, Rattus norvegicus
cgcatgtactttttcattggcaacttggctctctgcgacctgctggccggcatagcctacaaggtcaacattctgatgtccggtaggaagacgttcagcctgtctccaacagtgtggttcctcagggagggcagtatgttcgtagccctgggcgcatccacatgcagcttattggccattgccattgagcggcacctgaccatgatcaagatgaggccgtacgacgccaacaagaagcaccgcgtgttccttctgattgggatgtgctggctaattgccttctcgctgggtgccctgcccatcctgggctggaactgcctggagaactttcccgactgctctaccatcttgcccctctactccaagaaatacattgcctttctcatcagcatcttcacagccattctggtgaccatcgtcatcttgtacgcgcgcatctacttcctggtcaagtccagcagccgcagggtggccaaccacaactccgagagatccatggcccttctgcggaccgtagtgatcgtggtgagcgtgttcatcgcctgttggtccccccttttcatcctcttcctcatcgatgtggcctgcagggcgaaggagtgctccatcctcttcaagagtcagtggttcatcatgctggctgtcctcaactccgccatgaaccca

SEQ ID NO: 665 - DNA, 376 bp, Rattus norvegicus
ggacacaccgcacatctgtgcagcgaaagagccctgcgaccaccgccgcagtctcctcagcccgcacccccaccaccgggtcccgcgctccagtctcctcccgctgcgctccgcggggcacgcgcggcgcgtgcaggaacccggagcagccgcgcacgggctacagatgcgcgcggctgccgcctgcgctcacagctggtgccggtgagcgctctcggcctgggccacagctccgacgagctgatacgtttccgcttctgcagcggttcgtgccgccgagcacgctccccgcacgatctcagcctggccagcctgctgggcgccggggccctgcggtctcctcccgggtcccggccgatcagccagccctgttgcc

SEQ ID NO: 666 - DNA, 667 bp, Rattus norvegicus
cacagtgaccagcaaaccctggaaaatgaatctcagcaagctgagcatgctcaaaccagactccgacctctgcctcaaatttgctatgctgtgtactcttaacgacaggtgcgaccgcctccgaaaggcctacggggaggcgtgctcagggatccgctgccagcgccacctctgcctagctcagctgcgctccttcttcgagaaggcggcagagtcccacgctcagggcctgctgctgtgtccctgtgcacccgaagatgcgggctgtggggagcgccggcgcaacaccatcgcccccagttgcgccctcccgtctgtggcccccaactgcctagatcttcggagcttccgccgtgcggaccctctgtgcagatcacgcctgatggacttccagacccactgccaccctatggacatcctcgggacttgtgcaactgagcagtccagatgtctgcgggcatacctggggctaattgggactgccatgaccccaaacttcatcagcaaggtcaacactactgttgccttaggctgtacctgccgaggcagtggcaacctgcaggacgagtgtgaacagctggaaaagtccttctcccagaacccctgcctcatggaggccattgcggctaaaatgcgtttccacagacaactcttctcccaggactgg

SEQ ID NO: 667 - DNA, 4805 bp, Rattus norvegicus
gcacgagccgaggcttcctatgccggctggagttaggatgccacggcccattatttgcaccgactaacccggagttcctcctcggccctgggaaggactggcggcggcggctggagcagacagagcagcaggctctcttctccgaggggaggggggggcgtcgaagcgccctcgctgggctctagccctcacccacggtcctcaagccgtcacctcggtggcctgcttcctttttcttctccccgcgactccgggcccgaccgcctctgggatttgacccgcgcgccccggatgctccgagctgcccagacgcgcccccccccctccagcctcatcgtgctgattgacccgtgaggggacaagagaaacccaccccccaacctccgggcctcgggatcctgctctggagctgccagggagccgatgatgtccacgcagacccggcttctgacactgtccacgcagccgggggaaggtggccggccgcagccggccgagccttaggcgcacaaagcgcgagcccgccgacgactttgccgctcgctccgccgctctttgtctgcacttggggcgcacgcccgactctgggatttcgctgcgagagcgggctgggggggccgggggcgagctctcggttccccggccgccccccgctcgggctcgcctcccccctcccccgcacgtccccggctcgggctctcagcgcttccaagctctcggaatcgcgacccctccctgccatgtatccgcaaggcagacatccggcaccccatcaacccgggcagccaggatttaaattcactgtggccgagtcctgtgacaggatcaaagacgaattccagttcctgcaagctcagtatcacagcctcaaagtggagtacgacaagctggcgaacgagaagacagagatgcagcgccattatgtgatgtactatgagatgtcctacggcttgaatatcgaaatgcacaagcagacagagatcgcgaagagactgaacacgattctagcccagatcatgccttttttgtcacaggagcatcagcagcaagtggcgcaggctgtggaacgcgccaagcaggtcaccatgacggagctgaacgccatcatcgggcagcagcaactccaggcacagcacctctcccatgccacacatggtcccccggtccagctgccaccccacccgtcaggcctccaacctcctgggattcccccagtgacaggaagcagctctgggttgctggcacttggtgccctgggaagccaagcccacttggcagtgaaggatgagaagaaccatcatgaactggatcacagagagagagagtccagcacgaacaattctgtgtcaccctcagaaagcctccgggccagtgagaagcaccggggctctgcagactacagcatggaagccaagaagcggaaagcggaagagaaagacagcctgagccgatacgacagcgatggggacaagagtgatgacctggtagtggatgtctccaatgaggacccagcgacaccccgggtgagcccagcacactcccctcctgaaaatgggctggacaaagcccgaggtctgaagaaagacgcccccaccagcccagcctctgtggcttcctccagcagcacgccttcctccaagaccaaagaccttggtcataatgacaaatcttccacacctgggctcaagtccaacacaccaacgccaaggaacgatgccccaactccaggcaccagcaccaccccggggctccggtcaatgccgggcaaacctccaggcatggacccgatagcctcggccctgcgcacacccatctccctcaccagctcctatgcagcaccctttgccatgatgagccaccacgagatgaatggctccctcaccagcccaagcgcctatgctggcctacacaacatcccatcccagatgagcgccgccgcagcagctgcagccgccgcctatggccgatcgccaatggttggttttgaccctcatcccccgatgcgggccacaggcctgccctccagtcttgcctccattcctggagggaaaccggcgtactccttccatgtgagtgccgacgggcagatgcaacctgtgcccttcccccatgatgcgctagcaggccccggcattcccaggcatgcccggcagatcaacacactcagccatggggaggtggtatgtgccgtgaccatcagcaaccccacgaggcacgtctacacaggcggcaagggctgtgtgaagatatgggacatcagccagccgggcagcaagagtcccatctcccagctggactgcctgaacagggacaactacatccgctcatgcaagcttctccctgatgggcgcacgctcattgtgggtggtgaggccagcacactcaccatctgggacctggcctcgcccacgccccgcatcaaggctgagctgacgtcctcggctccagcctgttacgccctggccatcagtcctgatgccaaagtctgtttctcctgctgcagtgatgggaacattgcagtttgggatctgcacaaccagaccctggtcaggcagttccagggccacacggatggggccagctgtatagacatctctcatgatggcactaaactgtggaccgggggcctggacaacactgtgcgctcctgggacctgcgtgaagggcggcagctacagcaacacgacttcacctcccagatcttctccctgggttactgccccactggggagtggctcgccgtgggcatggagagcagcaacgtagaggttctgcaccacaccaagccggacaagtaccaactgcatctgcacgagagctgcgtgctgtccctcaagtttgcstactgtgscaagtggtttgtgagcaytgggaaagacamccttctcaatgcytggaggacgccttacggagccagcatcttccagtctaaagaatcctcgtccgtcttgagctgkgatatttcagcggatgacaaatatattgtaacgggctctggtgacaagaaggccacagtttacgaggtcatytactgaacaaggactctaagaggcctgtcaaactctgggagacacccacgcggccctgacagggagatgctggccrggccccgaggatggcagaagagtgagggacagcattgtggggctgccctccggaaggtggagaggacgcacgcccctttgtggattgctgtgtctgacagacttgaaggactttctcctctccccctcaccagtgctggcagatgcttcaattagatttctctggaggcttctgctttcgtttcccacacagacaccctcatgagtctctgtctcttcctcccctgtctgatctgtcccctccctactccgggttgggggcatgctggagtagacattgttgtttctggggaggggcgcctcgttctgattgtgcagtgcacaaggtttgtgaacaatgtaaataagagactgtggttgctgactggccagtgagggaggaggccccttcccaccagtgctcgccgtgtattttgcctgctgtatttgtaacccactcgcggtggtggcttttytttytttyttttcttaagattttttttaaacagatgttctgtggggaaagtaggcagagatagagagtcsrsgagkggaatgagaagcttcytggggatgggcaaaccagcytgscccactgggactgaagtatatctccacacgggttttagcaccatcttcagatggaatgataggcagatggacagacaagctgatggacagacagtactgggatgggccagcttgggctattatccacaggaacagcgaggatttcctgtgggtttctctgctccatcttctcttgscttgccctcacacctcctgacctccatctctttctgcccccctccccccgbtcgcctytcccamtggaccccatctttctctttggtgcacactcaatcattgtgatgaggaatggaagttcaagggaactccctctctgactytcctccgccagcctagaaaggattccatatgggggtgggagggagacaagcgactcagctcargragctaccagagaamaacagcaactggtgtgggtgctttttktttttaatttgaataaaaataattwgwagtgawawmmwdwvadarrawrmmrwhtmyccttysckgctctcwgccctttytgctccctgaagcmggggatatggtgacccccagggtcgtaagtytaagaagatgggcgggggagcgggctgggggctggggcagacggaatgtcatctgcagatatcacccctagggtaccaatgtttgtggtattaggtttgctttgyyttgttttggtcttttgttgttttattaaagaaaagstaaagaccgtgwrarmmmwrmwrrwrrrmtttccatggatgtagcatatggaagagagtttttwtattgcatttttatggattattttataatgtgggactcagtctgggaagaaagatgagggtgtctaaaacctgcccatctccagtgctccaactgagcggctgccccgaacaggatgtatgttgggacatggaaagaccgtggcaccccgcaccttcctgagaggcatgtcgacatgcctgtctggagtctgtccatctgtctctgggtttcagatgatcactggccaccacttgttaaggctctagccagaagggagggttagggtggaagagagttattcctgaagaaaaaagaaaaattgaaacatcattgtaatgaagctttttatatttttaaaagttactatttaaaaarraaaaaaaaaaaaaaaaa

SEQ ID NO: 668 - DNA, 957 bp, Rattus norvegicus
atgcgccgggccaaccgagactacggcaagtacctgcgcggctcggaggagatgggcagttgccctggcgtcccacacgagggtccgctgcatcccgcgccttcagcaccggctccagcgccgccccccgccgcctcccgcttcatgttcctggcgctcctggggctgggactgggtcaggtggtctgcagcatcgctctgttcctgtactttcgagcgcagatggatcctaacagaatatcagaagacagcacgcgctgcttctacagaattctgagactccgtgaaaatacaggtttgcaggactcgactctggagagcgaagacacagaagcactacctgactcatgcaggagaatgaaacaagcctttcaaggggccgtgcaaagggaattacaacacattgtggggccacagcgcttctcaggagttccagctatgatggaaggttcgtggctcgatgtggcccggcggggcaagcctgaggctcagccgtttgctcacctcaccatcaatgctgccgacatcccatcgggttcccataaagtcagtctgtcctcttggtaccatgatcgaggctgggccaagatctctaacatgacgttaagcaacggaaaactaagggttaaccaagatggcttctattacctgtacgccaacatttgcttcaggcatcatgaaacctcagggagcgtacctgcggactatcttcagctgatggtatatgtcgttaaaaccagcatcaaaatcccaagttcgcataacctgatgaaaggggggagcactaagaactggtcagggaattctgaattccacttttattccataaacgttggaggatttttcaagctccgggctggtgaggaaattagcgtccaggtgtccaacccttccctgttggatccggatcaagatgcgacgtactttggggctttcaaagttcaagacatagactga

SEQ ID NO: 669 - DNA, 1975 bp, Rattus norvegicus
gggtgttttatttcctcctcttcttcccgcactgtgcgctcctcctgggctagggcgtctggatcgagtcccggaggctaccgcctcccagacagacgacgggtcacctggacgcgagcctgtgtccgggtctcgtcgttgccggcgcagtcactgggcacaaccgtgggactccgtctgtctcggattaatcccggagagccagagccaacctctcccggtcagagatgcgaccctcagggaccgcgagaaccacactgctggtgctgctgaccgcgctctgcgcggcaggtggggcgttggaggaaaagaaagtctgccaaggcacaagtaacaggctcacccaactgggcacttttgaagaccactttctgagcctgcagaggatgtacaacaactgtgaagtggtccttgggaacttggaaattacctatgtgcaaaggaattacgacctttccttcttaaaaaccatccaggaggtggccggctatttcctcattgccctcaacaccgtggagagaatcccttcggaggacctgcagatcatcaggggaaatgctctttatgaaaacacctatgccttagccatcctgtccaactatgggacaaacagaactgggcttagggaactgcccatgcggaacttacaggaaatcctgattggtgctgtgcgattcagcaacaaccccatcctctgcaatatggatactatccagtggagggacatcgtccaaaacgtctttatgagcaacatgtcaatggacttacagagccatccgagcagttgccccaaatgtgatccaagctgtcccaatggaagctgctggggaggaggagaggagaactgccagaaattgaccaaaatcatctgtgcccagcaatgttcccatcgctgtcgtggcaggtcccccagtgactgctgccacaaccaatgtgctgcggggtgtacagggccccaaaagagtgactgtctggtctgccaaaagttccaagatgaggccacatgcaaagacacctgcccaccactcatgctgtacaaccccaccacctatcagatggatgtcaaccctgaagggaagtacagctttggtgccacctgtgtgaagaactgcccccgaaactacgtggtgacagatcatggctcatgtgtccgagcctgtgggcctgactactacgaagtggaagaagatggcatccgcaagtgtaaaaaatgtgatgggccctgtcgcaaagtttgtaatggcataggcattggtgaatttaaagacacactctccataaatgctacaaacatcaaacacttcaaatactgcactgccatcagcggggaccttcacatcctgccagtggcctttaagggggattctttcacgcgcactcctcctctagacccacgggaactagaaattctcaagactgtgaaggaaataacagggtctttgctgattcaggcttggcctgaaaactggactgacctccatgcttttgagaacctagaaataattcgtggcagaacaaagcaacatggtcagttkwcwstggckgkwgtckgcctgaacatwryaycsckgcygtggmagrttbmakcrctgtcrtggcaggctgtgacaaggcccttgcaccctytggcccaaawwagagtcagctgggacactgggccctgaccttgtaagcttcctgtaatgttagcctgcccatggcaccccaacagcaagatcctgaagctcaagtttgatcctaacaaaaccaccgstgctgcggtttytgggaraagcaagcatttattcacctgcaagatcacatccctaaccttgactttgcttaagagtgctgaatgaagatcctgtccctaaatcataactcaattcttttgctcaaggaaaatgcacttgtcttcttccaaaaaaaaaaaatcaatatgcaaaatggaatttgaaataaaagcttttctaaaartgaaaaaaaaaaaaaaaaa

SEQ ID NO: 670 - DNA, 1253 bp, Rattus norvegicus
cgrccgctrcccggggcggacacccacsgcaccatgagcccccgttcgtgcctgcggtcgctgcgactcctcgtcttcgccgtgttctcggccgccgcgagcaamtggctgtacctggscaagctgtcatcrgtgggcagyatctccgaagaggaaaygtgcgagaagctcaraggcctgatccagaggcaggtgcagatgtgcaaacggaacctcsaggtgatggactcagtgcgccrtggcgcccagctggccattgaggagtgscaataycagttycgraaccggygctggwactgttccacactggactccctgcctgtcttcgggaargtggtgacacaagggacccgggaggcggcctttgtakacgccatctcttcagcaggtgtggcctttgcagtgacaagagcatgcagcagtggagatctggagaagtgtggctgtgaccggacagtacacggggtcagcccacagggtttccagtggtcaggatgctcggacaacatcgcctatggcgtagccttctcacagtcctttgtagacgtccgagaragaagcaagggggcctcctccagccgggcactcatgaaccttcacaacaacgaggctggcaggaaggccatcctgacacacatgcgggtggagtgcaagtgccatggggtgtcaggctcctgtgaggtaaagacatgctggcgagsggtaccgcccttccgtcaggttggccacgcactaaaggagaagtttgacggcgccacgraggtggagccacggcgcgtaggctcctcccgggcactggtaccgcgaaacgcgcagttcaagccacatacggatgaggacctggtgtacctggagccaagtccagacttctgtgagcagracatgcgcagcggcgtgbtrgkswcgassgkccgcacttgcaacaagacgtctaagrccattgacggctgcgagmtactgtgctgtgsccgcggyttccacrcagcgcamgtggaghtggcagagcgctgcggctgcaggttccastggtgmtgcttsgtcaagtgccgrcagtgccarcggctcgtgragatgcacacgtgccggtgaccgtgcccgcctgtgcccaggwccacctgcgtggcccagggaaggccaataacttaaacagtctcccgccacctaccccaaamgatactggwtgtattttttgtwwtggtttggtttttgggtcctcaagttatttattgccaaaaaaaaraaaaaammwcgtg

SEQ ID NO: 671 - DNA, 259 bp, Rattus norvegicus
ttggaaatatatttttcttataaattaaataattttccgtgtttttattcttacgtgtgaggctcatatttggaatacgtacacatatttttaagtttgtttccgtaatccaccatgacttataaaggatcaatattgtaaagcttatatatctacaaccacaagaacaactttcggttggtccgcgagtagtggtgtttacaactaattgatcacaaccagttacagatttctttgttccttctccactcccactgct

SEQ ID NO: 672 - DNA, 863 bp, Rattus norvegicus
aacccaccacgtctgccggaccgccagccttacccgggagttccacaccaccaccaccaccaccaccaccaccaccacagttctcatgaacaccggccgccagcccacccctccccctcacctgcccatactcaccaggactttcacccagtgctccacctggtggcactgaacacccctctgtctggaggcatgcgtggtatccgtggggctgacttccagtgcttccagcaagcccgagccgtggggctgtctggcacctttcgggccttcctgtcctctaggctgcaggacctctacagcattgtacgccgtgctgaccgcagctctgtgcccatcgtcaacytgaaggatgaggtactatctcccagctgggaywcsywskwskccggctcccagggtcaactgcactctggggcccgcatcttttctttsgatggcagagacgtcctgagacacccagcctggccacagaagagcgtatggcatggctcagaccccagtgggcgcaggctgatggagagctactgtgagacgtgraggrctgaagctactggggttacaggtcaggcctcttccctgctgtcgggcaggcycctggracagaaggccgaragstsccasaacagctatatcgtcctgtgcattgagaatagcttcatgacctctttctccaaatagggcctctrccagctaaragggcggacaraggcgatgcagaactttgacacagtgcagggagcatccagccascacccagggtctggctaggatacgaccctgtgtagttcacattttatgtaatcstcaagaaataaaaggaagcymwagrgymwrhddwhwhrarrmawaaaaaaaaaaaa

SEQ ID NO: 673 - DNA, 2052 bp, Rattus norvegicus
ctttgggtcccggtgtcccgctccttctgctggagttcctccaggtgccatggaactggatctgagcccgtctcatctcagcagctccccagaagatgtgtgcccaactcctgggacccctcccgagactcctccgcccccggataaccctccgcccggcgatgtgaagcggtctcagcctttgcccatcccaagtagcaggaaacttcgagaagaggagtttcaggcaacctctctaccctccatccccaaccccttccccgagctctgcagcccaccttcacagaaacccattcttggtggttcctccggtgctagggggttgcttcctcgagactccagccgcctctgtgtggtgaaggtgtacagtgaagatggagcctgccggtctgtggaagtggcggcaggcgcgacggctcgccatgtgtgtgagatgctggtgcagcgagctcacgccctgagcgatgagaactggggcctggtggagtgccacccctatttggctctggagcggggtttggaggaccatgagtctgtggtagaagtgcaggaggcctggcctgtgggtggagacagccgcttcatcttccgtaaaaacttcgccaagtatgaactcttcaagagccctccgcacaccctgttcccagaaaagatggtttccagctgtctggatacaccaacaggcatatcccatgaagacctcatccagaacttcctgaatgctggcagcttccctgagatccagggcttcctgcagcttcggggatcaggccgggggtcaggtcgaaagctttggaaacgattcttctgcttcctgcgtcggtctggcctctattactcgaccaagggcacctctaaggacccgagacacctacagtacgtggcagatataaatgagtccaatgtgtatgtggtgacccagggccgcaagctgtatgggatacccaccgacttcggcttttgtgtcaagcccaacaagcttcgaaatggccacaaggggctccacatcttctgcagcgaggatgagcagagtcggacttgctggctgtccgccttccggctcttcaagtacggggtacagctatataagaattatcagcaggcccagtctcgtcacctgcgcttatcgtatttggggtctccacccttgaggagtgtctcagataataccctggtggccatggacttctctggccatgctgggcgtgtcattgagaacccccaggaagctctgagtgctgccacagaggaagcccaggcctggaggaagaagacaaaccaccgtctcagcctgcccaccccgtgctccggcctgagcctcagtgcagctatccatcgcacccagccctggtttcatggacgaatctcccgggaggagagccagcggctaattggacagcagggcctggtggatggtgtattcctggtccgggagagccagcggaacccacagggcttcgttctgtctctgtgccatctgcagaaagtcaaacattatctcatcttgccaagcgaagatgaaggctgcctttacttcagcatggatgacggccagacccgtttmacaracctgctgcagctggtggaattccaccagctgaaccgaggcatcctgccctgcttgctgcgccactgctgtscccgtgtggccctctgaggccmcacaagctgttacagccatggggctgcttatcgcccttctgctccgttcagwggactcgstgcagatgggtgggatgatmaacagatgaagagctccccccacttttctcccactttttttttttacctccctcaggtaatgaaacatcccccasccctgttcatccctgactcctgtccccaaagkaggcattgtggtcctctccccttggtasasctcctgmggcagtgaagggcattatragaggagtaggggcmscccgggtggtctcatgccccacccacactctgtacagactgagaggccagttgatctgctctgttttataccagtgataataaagattattttttgmtmcammmamaaaaaaaaaaaaaaaaaaaaaaaaa

SEQ ID NO: 674 - DNA, 2861 bp, Rattus norvegicus
gaattcggcacgaggcgatgctcagagggcaggcacctgctgctctgtaatgattcagcctctttcagccgctgcgttaacacgacaggatgctgttgctactgtcgctgctgcctctcctgccgccgccgctgctgccgccgccgcctcctctggtcttgcttttgcttttacttctcctgcatgacagttgttttcttcctctaagcagacaccagcttcagacgcttgaggtgagaaacatgcctttcagtttgggatactggtttacttaatcggctaggcggcagcttgcttcctattttggtcccctgccttcttgaccaacccggcatggtttggagaagcatttgaaagaactgaaaaagtgtcccagaaacaacagctcaagatatttcggtacacttctatttcatagttgctagaagccctttctttttcgttttttttttctttttctttttctttttctttttccttttcctgcttcctcctaagctctggtactttgggtaattgccttggacttgggtgccttatcgatttccccctccaagatgctgtatcatttggttggggggagctctgcgtggtaatgcactgtgagagaggccaggccttctggaggtgagccgatggagatttattccccagacatgtctgaggtagctggcgggaggtcctccagcccctccactcagctgagtgcagccccatctcttgatgggcttccggcagcggaggaacatataccagacacccacacagaagatgagagaagccctggactcctgggcctggcggtgccctgctgtgtgtgcctggaagctgagcgcctgagagggtgtctcaactccgagaagatctgcattgttcccattctggcttgcctagtcagcctctgcctctgcattgctggcctgaagtgggtatttgtggacaagatatttgaatacgactctcctacccaccttgaccctggggggttaggccaggaccctgtgatttctctggatccaactgctgccccagccattttggtatcatcygaggcatacacttcacctgtctctaaggctcagtctgaagctggggctcatgttacagtacaaggtgaccatgctgctgtggcctctgaaccttcagcagtaccgacccggaagaaccggctgtctgcttttcctccctttcactctactgcaccgcccttcccttctccagctcggacccctgargtgagaacacccaagtcaggaactcagccacaaacaacagaaactaacctgcaaactgctcctaaactttccacawcracatccacgactgggaccagccatctcataaagtgygcggagaaggagaaaactttctgtgtgaatgggggcgagtgcttcacggtgaaggacctgtcaaacccgtcaagatacttgtgcaagtgcccaaatgagtttactggtgatcgttgccaaaactacgtaatggccagcttctacarwrcrkmsrhwsbswttswrtytmtgsmwgmgkaggarcwctrctcagwmgakgstgctkwctwrttrctrscatctgtatcgccctgctggtggtcggcatcatgtgtgtggtggcctactgcaaaaccaagaagcagcggcagaagcttcatgatcggcttcggcagagtcttcggtcagaacggagcaacctggtgaacatagcgaatgggcctcaccacccaaacccgccgccagagaacgtgcagctggtgaatcaatacgtatctaaaaacgtcatctccagtgagcatattgttgagagagaagtggagacttccttttccaccagtcattacacttccacagcccatcactccacgactgtcacccagactcctagtcacagctggagtaatgggcacacggagagcgtcatttcagaaagcaactccgtaatcatgatgtcttcggtagagaacagcaggcacagcagtcccgccgggggcccacgaggacgtcttcatggcctgggaggccctcgtgataacagcttcctcaggcatgccagagaaacccctgactcctacagagactctcctcatagcgaaaggtatgtatcagccatgaccaccccggctcgtatgtcacctgtagatttccacacgccaagctcccctaaatcgcccccttcggaaatgtctccacccgtgtccagcatgacggtgtccatgccctctgtggcagtcagcccctttgtggaagaagagaggcctctgctgcttgtgacgccaccaaggctacgggagaagaaatatgatcatcacccccagcaactcaactcctttcatcacaaccctgcacatcagagtaccagcctcccccctagcccactgaggatagtggaggatgaggagtacgagacgacccaggagtatgagtcagttcaagagcccgttaagaaagtcaccaatagccggcgggccaaaagaaccaagcccaatggccacattgccaataggttggaaatggacagcaacacaagttctgtgagcagtaactcagaaagtgagacagaagacgaaagagtaggtgaagacacaccattcctgggcatacagaaccccctggcagccagccttgaggtggcccccgccttccgtctggctgagagcaggactaacccagcaggccgcttctccacacaggaggaattacaggccaggctgtctagtgtaatcgctaaccaagaccctattgctgtataaaacctaaataaacacatagattcacctgtaaaactttattttatataataaagtatttcaccttaaattaaacaatttattttattttagcagttctgcaaatactcgtgccgaattc

SEQ ID NO: 675 - DNA, 1468 bp, Rattus norvegicus
atgccccaactttccggaggaggcggtgggggggacccggaactctgcgccaccgatgagatgatccccttcaaggacgagggcgatccccagaaggagaagattttcgccgagatcagtcaccccgaagaggagggcgacttagcagacatcaagtcatccttggtaaacgagtccgaaatcatcccagccagcaacgggcatgaggtggtcggacaaacacagtcctctcaggagccctaccacgacaaggccagagagcacccggatgacggaaagcatccggacggaggtctatataacaagggcccctcctactccagttactctggctacatcatgatgcccaatatgaatagcgacccatacatgtcaaatggatccctttctccacccatcccgaggacctcaaataaagtgccggtggtgcagccatctcacgcggtccaccccctcacgcccctcatcacgtacagcgacgagcacttttctccagggtctcacccgtcacacatcccgtcagaggtcaaccccaagcaaggcatgtctagacacccaccagctcctgaaatgcccaccttctaccccctgtctccaggcggcgttggacagatcaccccacccctcggctggcaaggtcagcctgtttatcccatcacgggtgggttcaggcaagcctacccatcttcactttcaggggacacttccatgtccaggttttcccatcacatgattcctgggccccctggcccccacacaactggcatccctcatccagcaattgtaacacctcaggtcaaacaggagcacccccacacggacagcgacctaatgcacgtgaagcctgagcacgaacagagaaaggaacaggagcctaaaagacctcatattaagaagcctctgaatgctttcatgttatacatgaaagaaatgagggcgaatgtcgtagccgagtgtacgctaaaggagagcgcagctatcaaccagatcctgggcagaaggtggcacgccctctcccgggaagagcaggccaaatattatgaattagcgcggaaagaaagacagctacatatgcagctctatccaggctggtcagcgagagacaattatggcaagaagaagaagaggaagagagagaagctacaggaatctacttcaggtacaggtcccagaatgacagctgcctacatctgaaacatggtggcaaaagaaactcattcccaacgtgcaaagccaaggcagcgaccccaggccctctcctggagatggaagcttgttgaaaacccagactgtctccacagcttgcccggctgaccccaaggagcactgacagcaactttaccctgaggtcactgctagcgctgactccacagacacagtcactgccagccctcccttctgtctactgcaagcgctgacttccaaaagaaagccgaatacggtcgtttctgaaaaaaaaaaaaaaaaa

SEQ ID NO: 676 - DNA, 5841 bp, Rattus norvegicus
cgggcggccccggcccggccccgcccccggcccgccagcgcagcccgcgcccggccgcgctccggagctcagcgccagccctcgccccctcgccgtgcctccgcctgcccgcccccgccggccaaggctgggctgcgggaggccgccgggcggccccgagcctcgccagggcgacccaaacaaaggcagcatccgggctcggcgggaggcagagcatcatgagagactgggtcctcgctgtccccggctccgctgctgctgccgctgccgccgccgccgccgccgccgctgccgctgccgccgccaggagggcttcgctgtgagcgttggaaagcaggggcgcagctgcggggcgtgaatccgaaaggtgagagccagagccagcgagccgagggggcgggcaggccacgaaaaatgtcctcggccgtggggccccgaggtcctcgcccacccacggtgcctccccctatgcaagaactgcccgacctgagccacctgaccgaggaggagaggaacattatcatggcagtgatggaccggcagaaggaagaggaggaaaaagaagaggccatgctcaagtgtgttgtcagggacatggcgaagcctgctgcctgcaaaacaccaagaaatgctgaaagccagccccatcaaccaccactgaacattttcagatgtgtctgtgttcccagaaagccaagcagcgaagagggaggcccagaaagagactggagattgcatcaacagtttgaaagctacaaggagcaagtgagaaaaatcggagaggaagcgaggcgttaccagggcgagcacaaggatgatgccccgacgtgtggaatctgtcataagacaaagtttgctgatggatgtggccatctctgctcctattgtcgcaccaagttctgtgcacgctgcggaggccgtgtgtctctgcgatcgaacaatgaggacaaagtggttatgtgggtatgcaatttatgtcgaaagcaacaagaaatcttaacgaaatctggagcgtggttctttggaagtggccctcagcagcctagtcaagatgggactctgagtgacacggccacaggtgctggatctgaggtgccaagagaaaagaaagcaaggctccaagagcgatcaaggtctcagacgcccttgagtacagcagctgtctcttcccaagacactgctacccccggtgcaccgttgcacaggaacaaaggggctgagccctcacagcaagccttgggtcctgaacagaagcaggcatcaagatcaagaagcgagccaccgagggaaaggaagaaggctccagggctttcagagcagaatggcaagggaggccagaagagcgagcgcaaacgtgtccccaagtctgtggtgcaacccggggaagggatcgcggatgagagggagaggaaagagaggcgggaaacccgcaggttggagaaagggcgctcccaggactactcagaccggcctgagaaacgcgacaatggcagggtggcggaagaccagaagcagaggaaggaggaggagtaccagactaggtaccgcagcgaccctaacctggctcgctacccggtgaaggcgccgccagaggagcagcagatgcgcatgcacgcccgggtgtcccgagcgaggcacgagcggcgccacagcgacgtggcgctcccgcacaccgaggcagctgccgccgcgccggctgaggccacggcgggcaagcgcgcgccggccaccgccagggtctctcccccggagtccccgcgcgcacgcgcggcggccgcccagcctcccaccgagcacgggccaccgccgccgcggccagccccgggtcccgcagagccacccgagccgcgcgtccccgagccgctccgtaagcagggccgcctggacccgggctcggccgtgcttctgcgcaaggccaagcgcgagaaggcggagagcatgctgcggaacgactcgctgagctccgatcagtccgagtccgtgcggccatccccgcccaagcctcaccggcccaagcggggaggcaagagacgtcagatgtcggtgagcagctcggaggaggagggcgtgtccacaccggagtacacgagctgcgaggacgtggagctggagagcgagagcgtgagcgagaaaggtgacttggattactactggttggatcccgccacgtggcacagcagggaaacgtcgcctatcagttcgcatcctgtaacgtggcagccgtctaaagagggagatcgactaatcggccgtgttattcttaacaaaagaacaaccatgcccaaagaatcaggtgcattattgggtctgaaggtggttggaggaaaaatgacggacttagggcgccttggtgctttcatcaccaaagtaaagaagggcagcctggcagacgtcgtcggacacctaagagcaggggacgaagtcctagagtggaatggtaaacccctgccgggagcaacaaacgaagaagtttacaacattatcttagaatcaaaatcagaacctcaagttgagattattgtttcaaggcctattggtgacatccccaggatccctgagagttcccatcctcccctggagtccagttcaagttcctttgaatctcagaaaatggaaaggccttctatttctgttatttctccaaccagccctggagctctgaaagatgccccacaagtcttaccagggcaactctcagtgaagctatggtatgataaagtggggcaccagctgattgtaaatgttctacaagcaacagatctaccccctagagtagatggccgtcccaggaatccctatgtaaaaatgtattttcttccagatagaagcgacaaaagtaaaaggagaaccaaaacagtaaagaaacttctagagccaaaatggaaccagacatttgtctactcacacgtacatcgtagagattttcgagagcgaatgttagagattaccgtgtgggaccagccgagagtacaggacgaagagagtgaatttcttggagagatcctcatagagttggaaacagcgcttttagatgatgagccccattggtataaactccagacacatgacgaatcttcactacctctgcctcagccatcaccgttcatgcccaggcggcatattcatggagagagctccagcaaaaagctacaaagatctcagcgaatcagtgatagtgacatctcagattatgaggttgatgatggtattggagtagtgcctccagtgggttatagagctagtgctagagagagtaaagcaaccacgttaacagtgccagagcaacaaagaactacacatcaccgctcacgttccgtgtctcctcatcgcggcgatgatcagggaaggcctcgttcacgtttaccaaatgtgccattacagaggagcttagatgaaattcatccaacacgaaggtcacgttctccaacccgacaccatgatgcctcccgaagcccggccgatcacagatccagacatgtggaaagtcaatattcgtcagagccagacagtgagcttctcatgctgcccagagcaaaacgaggacgaagtgcagaaagcctacacatgaccagtgaactgcagccctctcttgacagggctaggagtgctagtaccaactgcttgagaccagatactagtttgcattcaccagaacgagaaaggcactccagaaagtctgaaagatgtagcatccaaaaacagtctaggaaaggcacagcctctgatgcagacagggttctcccaccatgcctttctagaaggggatacgcaaccccaagagcaaccgatcaaccggtcgttaggggaaagtatcccactcgttcacggtcgagcgagcactctagtgtcagaaccctgtgttctatgcaccaccttgcccccggagggtcggcgccaccttctccacttcttctgacaagaacgcaccgacaaggaagcccaacccagtctcctccagcagacacatccttcggcagtcgccgtggaagacagctcccacaggtgccagttcgaagcggcagtatagaacaagcaagcttagtagtggaggagcgaacgagacagatgaaagtgaaagttcaccgatttaagcagacaacagggtctgggtctagtcaagaacttgaccacgagcaatactccaagtacaacatacataaagatcagtacagaagctgtgataacgcgtctgccaagtcttcagatagtgatgtcagtgatgtgtccgccatttccagagccagcagtacctcacgcctcagcagcacaagctttatgtcagagcagtctgagcgccccaggggtaggatcagttcatttacccccaaaatgcaaggcagacggatggggacttcaggaagagccatcatcaagagcaccagtgtaagtggagagatatatacactggaacgtaatgacggtagccagtcggacacggccgtaggtaccgtcggagccggtggaaagaaacgaagatccagcctgagcgccaaagtggtagccattgtgtctcgaagaagcaggagcacgtcacagctcagccagacagagtcgggccacaagaagttgaaaagcaccatccagaggagtacggaaacaggaatggcagctgaaatgcggaagatggtgagacagccgagccgggagtccacggatggcagcatcaacagttatagctcggaaggaaacttgatatttcctggagttcgagtaggacccgacagtcagttcagtgatttccttgatgggttgggaccagcgcagctcgttggccgtcagacgctcgccaccccggccatgggcgatatccaaatcgggatggaggataagaagggtcagttggaggttgaggttatcagagcccggagccttacacaaaaacctggttccaaatctacacccgctccctatgtgaaagtatatcttttggaaaatggagcctgtattgccaaaaagaagacaagaattgcacggaaaactctcgatcctttgtatcagcagtccctggtttttgatgaaagtccacagggtaaagttcttcaggtgattgtctggggtgactatggaagaatggaccacaaatgctttatgggtgtggctcaaatcttgttggaagaacttgatctatccagcatggtgattggatggtataaattgttccctccgtcctcactggtggatcccactctcgctcccctgacccgccgggcttcccaatcatctctggaaagttcgtccgggcctccctgcatccggtcatagtaaactcctatccttccagccaaactctacatttcaggataattatcagaaccagattatttcatgatcaagagcattgttggagacagacaatcaacttgtgttttgcctgtagtagtttttcgataatatgtcccaattgttgtttaaaatatggcttcatatgacagaacaaagcaagtcagtcaaaattgcagtaagaacggacatgctagtgagagccacttcacacttcttgcaaataggaaaaacaaaagaggaaacctcaaattcacacacacacacacatacacaccaaattgaacaaactggaaattctcactctgtgaaaaggtgtacttcacatgtttctgcacagaccacaagcagtgttgtttccctagtgtttgagattcttcagttctgtgtgctttcgttgtttgtgtgctgtttgctgattctttttgccccgttgcctctctttctctgtcttcattgtatttattatttccgctagctttttttttttcatttttttttgtctttgtctttctttgctttgccatgacaggattaggtggtgttaacagagactgcttc

SEQ ID NO: 677 - DNA, 1970 bp, Rattus norvegicus
gcacgagctcgggcggcgcgggtaccctgtctagggtgtcctttgctcaggaatgggcccgcagctgcagtcggcaggatgattctgctggtggtcctgatgctgtctgcggagatcgggagtggagctttgatgagcaccgaggatcctaagccgccctcggtgcctgcgccaacaaatgttctaattacgtcctatgacttgaaccctgtcgtacattggaagcaccagaacgtgtcgcaggctgccgtcttcactgtacaggtaaagatgtatccagaatactggactgatgcctgcaccaacattgcccatcattattgtaatatctacaaacacatttcctatcctgactcatctgcctgggccagagttaaggccaaggttggacaaagagaatctgcctatgcgcagtcagaagagtttattatgtgccgaaaggggaaggttggaccgcctggcctggacatcggaaggaaggaagatcagctgattgtccacatatttcaccctaaggtcaatgtgagtcaggaaaccatgtttggtgacggaaatacctgttacacattcgactacactgtgtttgtgaaacattacaggagtggggagatcctacatacagaacatagcgtcctaaaagaagattgtagcgaaactctgtgtgagttaaacatctcagtgtccacgctgaattccaattactgtgtttcagtagttggaaagtcgtctttctggcaagttaatacagaaacatcaaaagacgyctgtatcccctttctccatgatgacagagaagaatcaatttggatgctgctygttgctcctcttctcttccttacaatagttgtcccggcacttgtgtgttgttacattaagaagaatccatttaagagaaaaagcataatgttacctaagtccttgctctctgtggtaaaaaatgccacgtccgagaccaaacctgaatcaaagtactcccttgtcacgtcgtgccagccagctgtcctagagaacgagacagtgatctgtgaggagcacttgtccacagtgacaactccagacagcctagaagcaccagagcaggaagaactttctaaaggaaccgtggctacggttgctgaaggaaacacttcccccgagaccaccgacagccctctaactccggtacaaagtggccatttttccctgtcaagtagtaaccagtcaggctcctgtagcctcaccacctatcactccagggacggctctgacagtggcctcgtgggcacaggcagctccatatctgactctgactttctcccaaacaacgactcggaaacaaagatggcagacccagcccctacacctgtgaggaaggccctgactttctccggttatgacaaaccacacgtgttggtggacgtgcccgtggatggggagggcaaggagtctttgattgggtatagactcacgggtgatacccaggaactgtcctaaggccgccgagtcctgacggtgctgaaggatctgcctytaggcagttttcctgytttgttctcgtgaaagactttgcacgttagccgattctgaccgcagcgtccctaatgtgacacsmggmtmrkgmskytgtgtgagcgcactgcccggtctacycygcawatgccaakactgccagakggatgaacrgtcmcytatgakctcctgcctgggtgggstggttctcctcctctagccttgcttcctccagcmgvtgctcctccacctcactgcctcacgggacacgggggacctgtcctcacacacctttgtwtctgtaagtccgtgtatatagtgtgtttgcagtttcactttaagggaaagmtgaaagccmctgcaggtgactccgttcgtgacaagtttggtaggacatttgtgggcgcatacgttttttwatggggcatcacttatgatttttaagtaaaatgttttgaahccrraaaaaaaaaaaaaaaaaa

SEQ ID NO: 678 - DNA, 3566 bp, Rattus norvegicus
atgaagtttttgctgcttagtgcacttttatttttgcatagttccttagcttggacaagagaaaagcattattacatcggaattactgaagcagtttgggactatgcttctggcagtgaagaaaaggaacttatttcagttgacacggaacagtccaatttctatcttcgaaatggtccagatcgtattggaagaaagtataagaaggccctttattctgagtacacagatggcacctttacgaagactatagacaaaccagcctggctagggcttttaggccctgtcatcaaagctgaagttggagacaaagtttctgttcacgtaaagaactttgcctctaggccctacacttttcatgctcatggggtaacttacaccaaggcgaacgagggggccatctaccctgacaacaccactgattttcaaagagccgatgacaaactgtttcctggacagcagtatttgtacgtgctgcgtgccaatgagccaagtcctggcgagggagacagcaattgtgtgaccaggatttaccactctcatgtggatgctccaaaagatattgcatcaggactcataggaccgttgatactctgtaaaaaaggttctctgcataaggaaaaagaggaaaatattgaccaagaattcgtactgatgttctctgtggtggatgaaaatctcagctggtacctagaagataacatcaaaaccttctgctctgaaccagagaaagtcgataaagacaatgaagacttccaggaaagcaacaggatgtactctataaatggatatacatttggaagcctcccagggctctcgatgtgtgcagaagacagagtgaagtggtacctttttgggatggggaatgaagttgacgtgcattcagagctctttcatggtcaagccctgaccagcaagaactatcatactgatataatcaacctgttccctgccactctaattgatgtttctatggtggcccagaatcctggagtctggatgctcagttgccagaacctgaaccatctgaaagctggtttgcaggcctttttccaggttcgtgactgcaacaagccctcaccggacgacgatatccaagacagacatgtgagacattattacatcgctgccgaggagaccatttgggactatgctccgtctgggacagacaccttcactggagagaacttaaccagtctgggaagtgattcaagggtattttttgagcaaggtgctacaagaattggtggctcttataaaaaattggtttatcgtgagtacacagatgattccttcacaaaccggaagcaaagaggccctgatgaggaacatcttggaatccttggtcctgtcatttgggcagaagtaggagacatcattagagtcacctttcataacaaaggacaatttcctctcagcattcagccaatgggggtaagattcaccaaggaaaatgagggaacatactatggcccagatggccgttcctcaaagcaagcctcccatgtggctcccaaagaaacctttacgtatgaatggactgtccccaaagaaatgggacccacttatgcagatcctgtgtgcctatctaagatgtattattctggagttgacctcaccaaagatatatttactgggcttattgggccaatgaaaatatgcaagaaaggcagcttacttgcagatgggagacagaaagatgtagacaaggagttctacttgtttgcaacagtgtttgatgagaatgagagtttactcttggatgataatatcagaatgttcacaactgcacctgagaatgtggacaaggaagatgaagactttcaggagtccaacaagatgcactccatgaatggattcatgtatggcaatctgcctggcctcaatatgtgtctaggagaatccatcgtgtggtatttgttcagcgctggaaatgaggcagacgtgcatgggatatacttttcaggaaatacctatctgtccaaaggagaaagaagagacactgcaaatctatttcctcataaaagtctcacccttctcatgacacctgacacagaagggtcttttgatgttgagtgtcttacaacagatcactacaccggtggcatgaagcaaaagtacactgtgaaccagtgcaaggggcagtttgaagatgtcactctctaccagggagaaaggacctactatattgcagcagtggaggtggaatgggattattcaccaagcagggactgggaaatggagctgcaccatttgcaagagcaaaatgtttcaaatgcatttttggataaggaagagtttttcataggctcaaagtacaagaaggttgtgtatcgagagtttactgacagcacattcagagaacaggtgaagagaagagctgaagaggagcacttgggcatcctcggtccactgattcatgcagatgttggagacaaagttaaagttgcctttaaaaatatggcaagcaggccatattcaatacatgcccacggaktgaaaacaaagagttctacagttrctccaacgttrccaggtgaagttcgcacttatatatggcaaattccagaaagatcaggtgctggaacggaggattcacctgtgtatcccatgggcttattactcaaccgtggatcgagttaaggatctctatagtgggctaataggcccmykrattstttgtcggaaatcttatgtgaaagtattcaatcctaaaaagaaaatggagtattcccttttgtttctagtttttgatsasrakgaatcttggtacttagatgataacatcaatacatactctgatcaccctgagaaagtaaacaaagacaacgaggaattcatagaaagcaataaaatgcatgctatcaatgggaaaatgttcggaaacctacaaggtctcacgatgcacgtgggagacgaggtcaactggtatgtgatggctatgggcaatgaaatagacctgcacactgtacacttccacggccacagcttccaatacaagcacaggggaattcatagttctgatgtctttgaccttttycctggaacataccaaaccctagagatgtttcccsrmacgmskggaacctggttactccactgccatgtgactgaccatattcatgcggggatggtaactacctacactgttttaccaaatcaagcatcgtctcagagctacaggatgacctggaacatactctmkrcackrkkaatcagcatgactactttattccaaatatctaccaaggagtagccmggmamrwrrggtgttttcaagaacattctaaaaatgaagatggttgtacagctcatttccctgcaacaagaccagtccctcagctcaggggcttcctccatcaccagttccatccaggagccaggattccaaagctcctaaatgtgatcaactatagactttgcccctcaaaagctatattctaaattaacaagacatgtgctatcacgccatatttaaattgtatacgatatcgaaatatattgcataytttaaaagtaaaararrmawwwwwawwtammwrwarwwwmaaaaaaaaaaaaaaaaa

SEQ ID NO: 679 - DNA, 1548 bp, Rattus norvegicus
cggcagcggcagctgtgtcagcgctacccagacatcatgcgctcagtaggagaaggtgcccgggaatggatccgagagtgtcaacaccagttccgtcatcaccgctggaattgcaccacactggaccgggaccacactgtctttggccgtgctatgctcagaagcagtcgggaggcagcgtttgtctatgctatctcatcagcaggagtggtccatgctatcactcgggcctgcagccagggtgagctgagtgtgtgcagctgtgacccatatacccgtggtcggcaccatgatcaacgaggggactttgactggggtggctgtagtgacaacatccactatggtgtccgctttgccaaggcttttgtggatgccaaagagaagaggcttaaggatgcccgggccctcatgaacttacataacaaccgctgcggtcgcacggctgtacggcgatttctgaagctggagtgcaagtgtcatggtgtgagtggctcctgtaccctgcgcacctgctggagggcactctcagacttccgccgtaccggtgactacctgaggaggcgatatgatggggctgtgcaggtgacagccacacaggatggggccaacttcacagcagcccgccaaggctatcgccatgccacccggactgatcttgtctactttgacaactcccctgactactgtgtcttggacaaggctgcaggttccctaggtaccgcaggccgcgtctgcagcaagacttctaaaggaacagatgggtgtgaaatcatgtgttgcggccgaggatatgacacaactcgggtcacccgggtcacccagtgtgagtgcaaattccactggtgctgtgctgtgcggtgcaaggagtgcagaaacactgtggatgtccacacgtgcaaggcccctaagaaggcagagtggctggaccagacctgaacacacagatacctcattcttccctctacttcaagcctctgactcaaaagcacaagatccttgcatgcacacctcctccaccctcaatcctgggctgctacagcttctgttatggacttggagaatgacccagagggaccccaatgtcctggctggttccttagccctagagaggtgttgataggggatggatataggagactgagtggctccctgatcatccatctggaggtttgaagggaagagtagaagaggtaggagtctgtcttcagagtgatctgagttgcactaagtcaaggcccattctccccttgcttgcactgacttctgrtcctcttgcacacttgggtatgcaacaggaagggaacctggaggtagctkctgtgtttgatcctactctacctaaggagagataagacagagagaaaactgcctgtcccttcactgcagacaatcttaggmtatagtactctgctgagaccctgagacagctagatgagttagccacagtgaacaaggctccacctcaggcttttaatgcagcttataatctagtggttttgtgaggagraaaatcacaatactgttcrrrwwvawaaaaaaaaaaaaaaa

SEQ ID NO: 680 - DNA, 1172 bp, Rattus norvegicus
ctgaacgccatcagcgggcgcgcaccatgaactcgtgggacgcgggcctggcggggctgctggtgggcacaatcggcgtgtcgctgctgtccaacgggctggtgctgctctgcctcctgcacagcgctgacatccgccgccaggcgccggcgctcttcactctcaacctcacgtgtggcaacctgctgtgtaccgtggtcaacatgccactaacactggccggcgtcgtggcacaacggcagccggccggggaccgcctgtgccgcctggccgccttcctcgacacctttctggccgccaactccatgctcagtatggccgcgctcagcatcgaccgctgggtggctgtggtcttcccgctgagctaccgtgccaagatgcgcctccgagatgccgccttcatggtggcctacacgtggctgcacgcgctcaccttcccggccaccgcgctcgccctgtcctggctcggcttccaccagctgtatgcctcgtgcacgctgtgcagccggcggcccgacgagcgcctgcgctttgctgtcttcaccagcgccttccatgcgcttagcttcctgctctccttcatcgtgctctgcttcacgtacctcaaggtgctcaaggtggcccgtttccactgcaagcgcatcgacgtgatcaccatgcagacgctcgtgctgttagtggacatccatcccagtgtgagggaacgatgtctggaggaacagaagcggaggcggcagcgtgccaccaagaagatcagcaccttcatagggaccttcctcgtgtgctttgcaccctatgtgattaccaggctggtggaactcttctccacagcacccattgactcacactggggtgtgctgtccaagtgcttggcctacagcaaggctgcttctgaccccttcgtgtactccttgctgcgacaccagtaccgcaggagctgcaaggagcttctgaacaggatcttcaacagacgctccattcactctgtgggcctcacaggtgactctcacagccagaacattctgccagtgtcggaatgaaggacagctctcctgttggggagttcagaatgaggtggccagagcagagggaggtggtctgggactcctgggtggacaggaactgccaccattgtctggcgattgacatgatgctgatgtctgaacaagatc

SEQ ID NO: 681 - DNA, 1830 bp, Rattus norvegicus
ggcacgagccggcgcgccctcccgcccacgccatggacgccaaggtcgtcgctgtgctggccctggtgctggccgcgctctgcatcagtgacggtaagccagtcagcctgagctacagatgcccctgccgattctttgagagccatgtcgccagagccaacgtcaaacatctgaaaatcctcaacactccaaactgtgcccttcagattgttgcaaggctgaaaagcaacaacagacaagtgtgcattgacccgaaattaaagtggatccaagagtacctggacaaagccttaaacaagtaagcacaacagcccaaaggactttccagtagacccctgaggaaggctgacctccgtgggagaggaaagggcagtggtggggaggagggcctgaaccctggccaggttggccaatgggacggcactgactggggtcatgctgagatttgccagcacaaagacactccaccaatagcatatggtacgatattgctacttatattcatccgtgccctcrcsmgkgcacaatggagcttttataactggggtttttctaagaaattgtattaccctaaccagttagcttcatcctcatcttcctcatcctcatcctcatcctcattttttaaaagcagtgattacttcaaggtctgtattcggtttgctttggagcttctcgcttccctggggcctctgggcacagttacaggtggtggctttgctgggagccctggggagtagcaaccttccaccagagcaggtccgaggaatgctgcagggcttgtcctgcagggggcgctcccggacagattccttgccgagagtcactcagctcaaggttgggcagaggctcctttttccagttcagtgtcaggggtagggaagcttcctttagaaggtacccctggggcctgtgctcagagaccctttcctagccgttcctgatctctgcttgcctccaaaagcatgcttcaactggcttccgcttctcacctctgtagcctgacctgccaatgctgcagtggaaggaaggagaatgttttggggggcgcttcctccctctcttccctttgskywcswskcacttgggccytttgtgagatttctctttggcctcctgtagaatggagccagcccctcctggataatgtragaacatgcctagaattaaccmcagaacmcaagtytgagaattatcsgaaacgcaattttaaatttgaaaactttraggaattggacttttgcaattgcccctgagtcctatatatttcaacagtggctccgtgggctctgagttttsgaatatcagagwtgaaaaaaatgaataasccagaatcttbccgtgaagccmcagtggggatthtgggttccaatcagaaatgggamcaagataaaattggwtacgtcmtaatgatcayagacggccctggtggttktgataactatttgcaaggcattttttacawawatttwtgtgcactttwtatgtktctwtggaagacaaatgtatttcagaatatatttgtagtcaattcctatatttgaagagaagccatagtagtgtcagtagataacctbtacggtcttgaactactggcgatttgtaaagaaatmtatatgacatatagatgtattgtagcttgccaatgtcagccagtgtatttttccmcttgtaatgaaattgtatcaactgtgacmctatatgcmctagcaataaaatgccaactgtttcgtgctgtaarmmwmmwamwrwawrwgggaatttatttacctgaaataaaatctwctagttgttaaaaaaaaaaaaaaaaaaaaaaaaaaaaaaaaaaaa

SEQ ID NO: 682 - DNA, 428 bp, Rattus norvegicus
atgggcaccgggcttcttggytgggcagtgctctgtctcctbgayacaggtaagttttagaaaaaaagtctccattytgcatttctctggggrattgktwcaatcattcccattttgaaacactatcttctttttccacagttctgtctgaaactggagtcacccagtcccccagatatgcaatcatacaggaaagtcagactgtttycttttsgtgtgaccctgtttctggacatsagagmctttactggtatcagcaacacagagsccaggggccccggcttctagtttactttcagaatraggttgatatagataagtcacagttacccaaggatcgtttttttgctgtgaggactgaaggagtcaactccactctcaagatccagtctgcaaagcagagtgactcagccacctatctctgtgca

SEQ ID NO: 683 - DNA, 1734 bp, Rattus norvegicus
ttgcagctgggaagatgctgggccgtagtctcctcacctgggtcctggccgcggctgtcacctgcgcccaggcacagcaagtgccaccgtggacagaagattgcagaaaatcaacttatcctccttctggaccaacctatagaggaccagttccgtggtacaccataaatcttgatttaccaccctacaagagatggcatgaattattggctcacaaggcacctgtgttgagaactttagtgaattccatctcgaatttagtgaatgcatttgtgccaagtggaaaaataatgcagatggtggatgaaaagttgcctggtctgattggcagcattcctggcccttttggagaggaaatgagggggattgcagatgttactgggattcctctaggagagattatttcattcaacattttctatgaactgttcaccatgtgtacatcgatcataactgaagatggaaaaggtcatttactacatggaagaaacatggattttggaatatttcttgggtggaacattaacaacaacacttgggtggtgacagaagaattaaagcctttaacagtgaatttggacttccagaggaacaataagactgtgttcaaggctacaagtttcgctggatacgtgggcatgttgacaggattcaaaccaggactgttaagtcttacactgaatgaacgtttcagtttaaatggtggttatctgggtatcctagaatggatgtttggaaagaaaaatgcccaatgggtagggtttatcactagatcagttctggaaaatagcacaagttatgaagaagccaagaatatattgaccaagaccaagataacggccccagcatattttatcctgggaggcaaccagtctggagaaggttgtgtgattacacgagaaagaaaagagtctttagacgtctatgaacttgatcctaagcatggcagatggtacgtggtacaaaccaattatgaccggtggaaaaacaccttgtttcttgatgaccgcagaacacctgcgaagaagtgtctaaatcacacgacacagaagaatctgtcatttgctaccatctatgatgttctatcaacaaaacctgtcctcaacaagctgactgtattcacaaccttgatagatgksaccaaagatcmatttgaaagccaccttcgagattgcccagacccttgtataggctggtgagcacacatcagccagcatacaggrcagacatactcagacctgaagatgtgttytccagcatgcstggtctccttccataggctaagactcaaggcctcttgtctttagtcatgattgtcctcatgtttctgttgtttacagatgttttgttgtttgtttggtttgatcaccatcatcacttccacttataggtaaatcctttaagggacgccatgtagatagaaattgccagttcatttcacttcgacactgaggaagtggtaacctgacctctatggaacccatcaaggttctctgatggtgtttaatccagtgccctgtgtgattaatgtaaaagtcattcaccttttcttttttaawmwamawawwwawrwwtttctgtacaccagtagctttcttttttcctggttctctcttagaaccaccatgtcattcacctttgctgttagtgacagcagtgcaatatcactatgcttggctggagttcctcagatggatatttgacacatattttaatgggcagatcaatagacct

SEQ ID NO: 684 - DNA, 8372 bp, Rattus norvegicus
tgtgtgcccgtctgccaatttaagcatgttaccagcattcccatcgtttccaaatgctgagcccttgagactcggagacgcacgtgaaagactactttagggatatagagactctgtacgaggtgcaggaactctctgggggtttgtgtgccagcttttgccgggggtggcatggggatgaaaaaggaagtgatggaagggcagggagagagagagagagagagagagagagagagagagagagagagagagagagagcaacagagagtgcatacttatgtgctatatatctaggggcctttctctgttcttgcctgttcccacactagttcacatcttgtttgtatctttctctttgtgcctgaatgcaccttgtgggttgtatatgtgatccttgtgtgcatctctgagcacatatcccttgtgtctctgtatctctaaactgtgcctgtctgggtacctctttgtatgttctgtttatttgcaggaatgtgtcctcatgtgtctccttgagtgtccatgtgtctccgagaacggagagacaagtccttggagacagcttgggatgctgagtcctggggtgtctgtctgctctggccttttctggttggacaggtatcctagcaacacttctgtgagttgcctagcaaccaggtccccatccttagagaaagagcagggtctggctgtatgtgggaggtctggctctcattcagtccagacaggaaaaacaaacctatgatttgatgatgactagagactcagcatagggtccctagcctacatgaccttaacttatggtttttttctcagtggactgtgctcccccaccccaccccccccgtgctggcaaagaaggaggtccctaggagcttagtatctctgtgttttctaagatctaattctgggatttggctgtggtgtagcttcaagtgaccagcaaacctggcttccccttatccctgccatgttgacaggcagctccagacttcagaggcgtgatgctttcatttgtgtgaggataatatgggtggcagtggccatgtgtagtgggggttcctgggttcagttttgtcttgagcttagtgcacattaggtataaacagcacatagtagactcagggcagtgctgggtccacagtccagacaatctcttgtttattcgcaagaaggcctttacatggagaattagttgggtcaggatattgctatcactgtggtactctaccctattggacaccggctgagggcagttctgggtaggaaagctagcaaaatctggtctgtgctcagtggtggtagcacatgcctttaatcctagcattcaggaagcagaggcagatgtgtctctaagttctaggacagccaaggctacacagacaaatcctgtctctaacctgttaacttccccaaacaaaacaaaacaaaacagagcaaagcaaagcaaagcaaaacaaaacaaaacaacattttcgagtgttggagcctcacgtctacttctgggtgagcatttctctgtatacatcttgaatgtgttcttgtgtctaaggctgtgcgtgtatgtgtgtctgaattcctgttcatgtctctatttttgtgttcatggatgtccccattgtgtgtcctagggcctgagtgtgtttgtgttgggtgagcccatcacattatatgtttgttaatcttttggctcctacttggtgtggagcctaggggttctggtctggtaatcttccttttttttttttttttttggctttcttctccaacctgcacagcccctccttctctcagccgcagccttctgcccctcccccttctggctgccgcaccggctgctgcgtctagtcaatatcttatcttccgagcaggagctaggagccattcccagccgcagcagaccccaatctagagtgagagtcattgctcagtccactgtgctcctgcctgcccgcctttctgctaagcattggggtctattttggcccagcttctgaagaggctgtgtgtgccgttggaggtaagaggggctcctgctgcctctgacagagctgggggtgggggagccctgggaggtagctatgtgaagtgcctgagccttaggcatttctggataaattccatgccttttgtgccccagtgtaccttaggatggtttaggcattttttgtgtttggctggctgtgagcccctgggtcttggtgggtggacatgtgtgcttgtgtagctacgttgcttctgtgcgggtctataaccctaatgtgaggtaaccttgtaggtaaatgtgctcccatgcctctgtgtgtgtcaccatgtgcccacgggcatgtctgcctttgtctgtgtccgtgtgtctgtgtgtgtgcctagtgtttgtgcatgctcatggaggcgttcatgtgcctgttagtgtagttgtgctgtgttctaaggcctcagtggacggtgtctagcactgtggttacttgtttctgtgccctgttccaggaactgtactgagtggctttgcagggtgacagcatggagtccctctttcctgctccatactgggaggtcttgtatggcagccactttcaagggaacctgtccctcctaaatgagaccgtaccccaccacctgctcctcaatgctagtcacagcgccttcctgccccttggactcaaggtcaccatcgtggggctctacttggctgtgtgcatcggggggctcctggggaactgcctcgtcatgtatgtcatcctcaggtaggctgggccccatcagtctgtgaagggggaacctgaggcaggaggctgttctgggtgaatctgaacaagtatggattttctgcttgctccatcaaatttctttcctctctgttcaaggggcatgaccacccttgaagttcaactcctgttctgtccccatctgtctcagactaggtggaggcttggagctgcagataaattcatgccatgatgtctgtgtgaataacctcatgggtacacaggatcctaggatttctcaaacagaggaagaggggctggtgctgggcctgaagctcttattcattgacttttgggatctctattcatggtggatgtctttagctgagcccatgctctattggtgctcagaaatatgaaaatttggaggactagaaagaaaggcagcagtactgggcaactgagtcagagtcaacagtgaggggatactggagggagcagtatgaggtgcagttctgtggacacaaaagctggacaaggagtatgcaattggtaaaatgtgtcacggcaatgatggtctctgtttttttccagctgggagggcattgagggggactggagacagcaggtgaggacttgaatgccagaatggggacattgggaagacatgggaggtccttgaatggtgaataactagagcaaggttcttcactgatatatttcctctttcaaaaagatgactctgaagaaagcagtcatggtccccttgatggtatcatggtaggtgtggtggtggtggagaaagggcagtgcaggttctatattctgcctcatcacgatcctcttagtattcctgagcaactgttttctccattcgttagatgggaaatatggattacataaccatatataggtgcatgtgcatacacgtgtatatagtataatattgatatgtgattggacagtgtagtaggaaaagccttccaagtactgactttcagcagaggatccttgtgggaaactattctatgatctaagtgttagaggatattcatctttggcaagaagtgcagcaacctgggacagtttgtgagccttgccttcccttcttgtcctcagcatttctctcccatatttactgcatcagggcagacaaggagcaccatcttttccagtagcatcctcagagagctagtctcaggaactgctgtggccacactggctctggaggcaaaacacggcgtgtttgagttggcatacgccaggagtcagaaaaacctgctctgagccccattttgcaccttcgcagttccaagccttataaaagctacttacgtcctccgagcctcagcttccttctctgcagcctagggatctaatagcattttttcttttggggtaaacctcaaatgagataaaatctacgtgaagagcttggctcagatatctaccattatcgttgttattgttgtttattgtagttaaggtctctaggattaatgtctaagaaacagaacttaatcccagattccctgatagcaactaaactatcatggactactgttacctctagttctatcactaccataccaccataaccactctaaccaccaccaccaccaccatcactataatcacccttccctaccgctatcataaacattaattcattccactaatatttatcacttataatgtccctagcatggttcccggtgcttggatacatcaaacctaactagcacatctcttgttttctttattagaattaaaaaataaattatgtttatttatgtgtctgtgtatgtctgtctggatgtgtaggtcagaggagaaagttgggtttctccttttaccatgtaagtttctccttctaccacatgcgtcctggagatagaactcaggttgtcagaattggtagtaagtgcccttaccggctgagccatttggctggcccagcattgtctgttttcattgctagacaatactgtgcagttggaagacacagatctttgatgaactttacaggcagtgccctgaaaagcctctgagagaagtcttaagagagactgaggagagaagacagcatctctctctcttgattcattccacaaactcacattcaggttagatatgcactcaggtactcctccatgcccccaacttttccagggtagtcttgtcattgatttggaacctttctgtagatgtcatagtcacatggggaagcttgttaaagtcccaggctcagtggactttgggtgtggtgcaggatctgccatttaataagcttccttggagactctggggttgagagattcaaagaccataaccctcttggtggtcccttagctgccaagtctacgcaaaatggccaaatggagcctttcttctccttgtcctctacaggcacaccaagatgaagacagctaccaacatttacatatttaatctggcactggctgataccctggtcttgctaacactgcccttccagggcacagacatcctactgggcttctggccatttgggaatgcactctgcaagactgtcattgctatcgactactacaacatgtttaccagcacttttactctgaccgccatgagcgtagaccgctatgtggctatctgccaccctatccgtgcccttgatgttcggacatccagcaaagcccaggctgttaatgtggccatatgggccctggcttcagtggttggtgttcctgttgccatcatgggttcagcacaagtggaagatgaaggtcagtgggtggtcctcctccctgactcattagtttcccatggttcttgctggtccctctgaccccatttctctcctgcagagatcgagtgcctggtggagatccctgcccctcaggactattggggccctgtattcgccatctgcatcttccttttttccttcatcatccctgtgctgatcatctctgtctgctacagcctcatgattcgacgacttcgtggtgtccgtctgctttcaggctcccgggagaaggaccgaaacctgcggcgtatcactcgactggtgctggtagtggtggctgtgtttgtgggctgctggacgcctgtgcaggtgtttgtcctggttcaaggactgggtgttcagccaggtagtgagactgcagttgccatcctgcgcttctgcacagccctgggctatgtcaacagttgtctcaatcccattctctatgctttcctggatgagaacttcaaggcctgctttagaaagttctgctgtgcttcatccctgcaccgggagatgcaggtttctgatcgtgtgcggagcattgccaaggatgttggccttggttgcaagacttctgagacagtaccacggccagcatgactaggcgtggacctgcccatggtgcctgtcagcccacagagcccatctacacccaacacggagctcacacaggtcactgctctctaggttgaccctgaaccttgagcatctggagccttgaatggcttttcttttggatcaggatgctcagtcctagaggaagaccttttagcaccatgggacaggtcaaagcatcaaggtggtctccatggcctctgtcagattaagttccctccctggtataggaccagagaggaccaaaggaactgaatagaaacatccacaacacagtggacatgcctggtgagcccatgtaggtattcatgcttcacttgactcttctctggcttctccctgctgccctggctctagctgggctcaacctgaggtattgtagtggtcatgtagtcactcttgtgactacatgttgtgtgctgttgctctcggcctttcagtatttccacaggactgctgaacatacctggtattgcagtggggagcattaattttcttttaaagtgagactggcccttaagcttggcgttgccttggagcgtcttctacttctgacttcactgatgcagtcagattacccgagggtgagcatcagtggtttcttggatggctgttttctgaagattcttcccatccagtacatggagtctatgaagggagtcacaattcatctggtactgccactacctgctctataatcctgggctatcttcttggcaagatgacagtgggggagacaagacacagagcttccctaaggctctttccctccaaaaccactgtgaactcttatcctacagactgttcggcaagcactgcttctaggtgtgtgggaggtaatcaggagaaagctttgtggcctctgtaggctgctcacaacatggaggcaccacatgctggtcttgcctgcttagtacaggcaggacagagcagaatatgctctctctcgattctctacaaactccctcagttctccagcagagtctcttttacttgctatcagaggtcaggagttgtactgctagaagcatacttgtagcttgggaagagtggcagtcaggatgtgttctactctatatccacagtgaccacctgcttcatatatagggttaggacatatctgagtaaggcctgagtgtgctgccaaattggaggttggtatgagagctgatgcctaaagtggctcatttgcaaggactattatggtttggaatagcaatgggcactggtcggcgaagaagagtctataccttcgagatctatttgatggttcacagaagaggttttgtcaaacgcccttctatgggtcagatatcaaaataccagcaacgttggatagattctgaccttttactgagacctcggtcagatggtttcatgtcatgcagagamcstaggctggttcctgtgtcagagagacmtgggcttctggggaggccagggttcttccwttgacacttgtgcgggasscgttagctmtagagttttcytgctaatgctaagaaacwktgtgaatttgtatatctttatgtatttaagcatgcaacaagygtcatttccatgcatgtagctagccctgaacctgcctctggggtaatgaaggagtgctcataayaaacacttatccagtgaccagtactgtccatagmmwaarwrwwwmwractccagctacataagagtaacttcctgggtattgatatgcactgggatgaggcacagaaccaggttcatgggttttaaacctgttctgcccttgcaagggactttaaggaacttcttgattgatgggaggaaaactagttcctgggttgcagaggctgctgcctttccttctcccaagacaatgactatcttttctccccacactcaggaacagtgggtagatgcctttcttcacagtttttctttgtagactcttgctgcttgagcaaatctaaaaggagttgtggtgatcagagcagaggacccttctctggtggcagagcaaccctatgctatagagatctaccccctggctcttgtctgtgtaggcccaatctggctcaattgaccctctggcagatggcccttatcaggggggctttgaagagggtcttacttgccaaagcgcttgctttcagtacagagctggtgagccaaagcttggttttatacaagttttaatgacattgtccatttgttttttgttttttagtctagcagtttataatcaaaaggtatgaatttctaataggcttaaaagatgcagcccatgcaggcatggtggattggattctatgagatt

SEQ ID NO: 685 - DNA, 3503 bp, Rattus norvegicus
gaagagggtgtcggccttcttgggacagatgattgtaagctgcatgtgggtgccaggaactgaaccctggttcctctgcaagagcagtaaatagttgaagtattggtaacaccaaggaactgtcacaatttgaaaagataagccaaggctgatttccagacactacaggaaaaaaggaggggaaaatggcattgtatcatcatcacttcatcacaagaagaagaaggcgtcccatgagaatttttgtgaatgatgatcgccatgtgatggcaaagcattcttcagtatacccaacacaagaggagctggaggctgtacagaacatggtgtcccacactgagcgggccctcaaggctgtctctgactggattgatgagcaggagaaaggcaacagcgagctctctgaagcagaaaatatggacacacccccagatgatgagagcaaagaaggggctggggaacagaaggcggaacacatgactaggaccctgaggggcgtgatgcgggtcggcctggtagccaagggtcttctgctcaagggggacttggatctggagctggttctgctctgtaaggagaagcccacaactgcccttctggacaaggtggctgacaacctggccatccagcttactactgtaacagaagacaagtatgaaatactccaatctgtggatgatgctgcgattgtgataaaaaacacaaaagagccccccttgtccttgaccatccatctgacctcccctgttgtcagagaagaaatggagaaagtatyagmkggagaaacgctatcagtcaacgaccccccggacgttctggacaggcagaaatgccttgctgccttggcgtccctccgacacgccaagtggttccaggctagagccaatgggctgaagtcatgtgtcattgtcatccgtgtcctaagggacttgtgtacccgagtgcccacctggggtcctctcagaggatggcctctggagctgctgtgtgagaagtccatcggcactgccaataggccaatgggtgctggtgaagccctgcggagagtactggagtgcctggcttccggcatcgtaatgccagatggttctggcatttatgacccttgtgaaaaagaagccactgatgctattgggcatctrgacagacagcaacgggaagatatcacacagagtgcgcagcatgctctgcggcttgctgcctttggccagctccataaagtactgggaatggacccactgccttccaaaatgcccaagaaaccaaagaacgagaacccggtggactatactgttcaaatcccccccagcaccacctacgccatcacacccatgaaacgccctatggaagaagatggggaggagaagtctcccagcaaaaaraaaaaraarawmcagaagaaagaggagaaggctgagcctccccaagctatgaatgccctgatgaggttaaaccagctgaagccagggctacagtacaagctgatctcccagacgggtcctgttcacgctcccatcttcaccatgtctgtggaggtagacggcagtacctttgaggcctcagggccatctaaaaagaccgccaagctacatgtggctgtgaaggtgttacaggacatgggattgccaacaggcgctgaaggcagagactccagcaagggggaggactctgctgaggagtcagatgggaagccagcagtagtggccccaccccctgtggtggaagcagtctccaaccccagttctgtcttcccttcagatgccactactgagcaggggccgattttgactaagcacggcaagaatcctgtaatggagcttaatgagaagagacgtggcctcaaatatgagctcatttctgagacagggggcagccacgacaaacggtttgttatggaggttgaggtggacggacagaagtttcaaggtgctggctcaaacaaaaaggtagcaaaggcttatgctgcacttgccgcattagagaagcttttccctgacgcccctcttgctcttgaagccaacaagaagaaaagagcccctgtgcctgtccgaggcggacccaaatttgctgccaagccacataaccctggctttggcatgggaggccccatgcataatgaagcgcccccacctcccaacatccgaggtcggggccgaggaggtaacatccgagggcgaggacgggggcgaggatttggtggcaccaaccacggaggaggctacatgaatgctggcgctggatatggaagctatgggtacagcagcaattcggccacagcaggctacagtcagttctacagcaatggagggcattatgggaatgccggtggtggaggcagcgggggaggtggtggctcgtccagctacagctcctactaccaaggagacagctacaactcaccagtgcccccgaaacatgctgggaagaagccgctgcatgggggccagcagaaaccctcctacagctcgggctaccagtcccaccagggccagcagcaaccttacaaccagagccagtacagcagctacggcacgccacagggcaagcagaaaggctatggccatgggcagggcagctactcctcctactccaactcttacaactcccctggtggtggtgggggctctgactacagctacgacagcaaattcaactacagtggtagtggaggccggagtggagggaacagctatggctccagcgggtcatcctacaacacaggctcacatgggggttatggcgcaggttctggaggcagctcttcataccaaggcaaacaaggaggctactcatcacagtcaaactacagctcccctgggtccagccagagctacagcggccccgccagctcctaccagtcctcacagggtggctacagtcggaacacagaacacagcatgaactaccagtacagataaaggcccaggctgcccctctcaaccttctgcacctctgcctccaacttgtctcgggagattgagtctgcacatcaccagttgccatgtccactgggccagtgcccacccgtccacgttgctgacgttgccacgctgtgaggcgtggtggtccctgggacccgtgcygttgaccctatttarctgtgttttggactcagtgtcttcagtggtttgttagttaccattacaccttgtctgagtagtgttccgagttcttgccgtgcggaatccctctgtctgtttatgcccggtgtgagttccatcgggtgtctttaaatagttgcagaagggatacgtcatctgttaatgctttttgtgaagtgagttaaatgagctttcattattttaawrmwwarwrwwwmarttttataagtgaaaattttattttaaaaaacagtggggtttgtttttttgtttttttgtctttgtttttttttttttttttggtatgtctggatcattcaggcagtacatttgaattccgctgaatgtagataaataaaagaaaaacaaaacagmaaaaaaaaaaaaaaaaaaaaaacattg

SEQ ID NO: 686 - DNA, 500 bp, Rattus norvegicus
aaagaaatctcataataaacaatttgataattatggagaggaattcactatgcatgacaccattggatgttacttagacatcgataaagggcacgtgaagttctctaagaatggaaaagaccttggtctggcatttgaaatacctgcacacataaaaaaccaagccctcttccctgcctgtgttttgaagaatgctgaattgaaatttaactttggtgaagaagaatttaagtttccaccaaaagatggttttgttgctctttccaaggcccctgatagttacgtcgtcaaatcgcagcacacaggtaatgcacaggtgtcacaaacaaaatttctccctaatgctccaaaagctcttattgtggaaccctccagagagttagctgagcaaaccttgaacaacgtgaaacagtttaagaagtacatcgataatcctaaattgcgggagcttctcataattggtggcgttgcagctcgggatcagctctccgttctggata

SEQ ID NO: 687 - DNA, 560 bp, Rattus norvegicus
acgaggccttatccctccctcagcattcctgccatggaagtctccagtttcggtaaatagaggattgtggaagaactaccaattccagcatgcattgcggaaggaaaggccgtctccacagcatcccttggaaactgtagtcttacggaaaaggagcttcccacgccggaagcaggcacgattaccacagtaacccagtcgatacaacagagaccttctcgcggttatgtcacttggctggtatgcatcgcagcattttgtgttcgtggtttgcgcaccaaaaataggctaaamggarckgymmktkccwggmmgactrcaakysccsyccrkssscgsrawkctcgggctgacctagaactcttggactcctgctaccatcctgctgcaacttcctgagtaactgggactacagctccagcccgacagcatggaaccacaggttactctaaatgtgacttttaaaaatgaaactcaaagctttctggtttcggatccagaaaatacaacttgggctgatgttgaagctatggtaaaagtttcatttgatctgaatacta

SEQ ID NO: 688 - DNA, 7555 bp, Rattus norvegicus
ggctcctcatgactgcggcgcttctgctgccacagccctacsggcctycgctggctgcaggatggatgcggactgtgcggcgctaaccccsgtggctccgctccytccwcgmkcgccgacgagcccgctccgtgagcsgcagcagcytcggtgccagcagcsgcsgcagccggactsagkkkccsgcgtcgccmtcggggcgcmttgtcagtgytgagtgggagtcgtcmggtggctccgagcccgcmgtargagcgctgcccagcacttcttggtggcttctccgggccaccmttttcccttktcattcataaatccgarcccgcattcttcactccaccggaccaacyatgtctgacggcaccgcagagaagcakagcggsactccwggcttcctttcgcctccggctccagtccccaagaatggctcaagcyccgattcttccgtgggcgagaaactgggggccgcggtcgccgactccggaattggcaggacagaggaataccggcgccgccggcacactatggacaaggacagtcgtggggcgkccgccaccactacccccacggagcaccgatttttccgccgaagcgtcatctgcgactccaatgccacggcgttggagctgccgggcctccctctctctatccctcaacctagtgtacccgcagtggtgcctcagagtgctccacccgagcctcacagagaggaaactttgacggccaccgwtgcttcccaggtgtctcagcarccctcggctgctgcctcccmtggggaacaagccgwtgtakgctckgmcaccgcgaccgtccccagcagtaccagcawagaccgcccggtgtcycagcccagcctcgtgggtagcaaagaggagccgccgccgtccagaagtggaagtggcagcggtggtgccagtgccaaagagccgcaggaggaaaggaaccagcaacakgatgatatcgaagagctggagaccmargcagtgggaatgtccaatgacggtcgctttctcaaatttgacatcgaaatcggcagaggctcctttaagacggtctacaaaggwsyskmyrccgawwycactgtgsamgwsgcctsgtgtgaattgcaggatcgaaagttaacaaaatctgaaaggcagagattyaaagaagaagctgaaatgctaaagggtcttcaacatymwaacattgttcgattctatgattcctgggaatccacagtaaaagggaaaaaatgcattgttttagtgactgaactaatgacatctggaacacttaaaacgtacttaaaaaggtttaaagtgatgaaaatcaaagttttaagaagctggtgtcggcaaatccttaaaggacttcaatttctccatacacgaactcccccgattattcaccgggatcttaaatgtgacaacatctttatcactggtcctaccggctcagtcaagatcggagacyttggtctggcaactctaaagcgggcttcttttgccaagagtgtgataggtaccccagagtttatggctcctgagatgtatgaggagaagtacgatgaatccgttgatgtttatgcttttgggatgtgcatgcttgagatggctacgtctgaatatccatactcagagtgccaaaatgctgctcagatctaccgtcgagtgaccagtggagtgaagccagccagttttgacaaagtagcaattcctgaagtgaaggaaattattgaaggatgtatccgacaaaacaaagatgaaagatattccatcaaagaccttttgaaccatgcctttttccaggaggaaacaggggtacgggtagaattagcagaagaagatgatggagaaaagatagctatcaaattatggctacgtattgaagatattaagaaattaaagggmaaatacaaagacaatgaagctattgagttttcctttgacttggagagggatgtaccagaagatgttgctcaagaaatggtcgagtctggttatgtctgtgaaggtgatcacaagaccatggctaaagctatcaaagatagggtatcattaattaagagaaaacgagagcagcggcagttggttcsasaagagcaaraaaaaaraaaamaaraaragagcagtttcaaacagcagaatgaacaacaagcaagtgtttcccaggcaggaatccagccactctctgttgctagcactggcatacccactgctcccaccacatccgcttcagtttctactcaagtagagcctgaagaacccgaggcagatcagcatcaacagctgcagtatcagcaacctagtatatctgtgttgtctgatggaacagttgacagtggtcaaggatcatctgtattcacagaatccagagtgagcagccaacagactgtttcctatggctcccaacatgagcaggcacattctattggcacagcaccaggacatacagtttctagtatccaagcacaatctcagccccatggggtgtatccaccctcaagtatggcacaggggcagaaccagggccagccatcaagtagtttagcaggggttctatcttcacaacccgtccaacatcctcagcagcagggaatacagccgactgtacctcctcaacaggcagtacagtattcacttccacaggcagcgtcttccagtgaaggcactgtccagccagtgagtcagcctcaagtgtcagctggaacacagagtagtacacagggagtctctcaggctgctcctccagaacaaactccaataacacagtcacaacctactcaacctgttccattggtttcctctgtggacagtgcccattcagatgttgcttctggtatgagtgatggcaatgagaatgctccttcatccagcgggaggcatgaagggaggacgacaaaacgtcattatcgaaaatctgtaagaagtcgttctcgtcatgaaaagacttctcgcccgaaactgaggattttaaatgtttcaaataaaggagaccgagtagtagaatgtcaattggagactcataatcggaaaatggttacatttaaatttgacctagatggcgacaaccctgaagagatagcaacaattatggtgaacaatgactttattctagccatagagagagagtcttttgtggctcaagtgcgggaaattattgaaaaggctgatgaaatgttaagcgaggatgtcagtgtggagcctgagggtgaccagggattggagagtctacaaggaaaggatgactatggctttccaggttctcagaaattagaaggagagttcaagcaaccaattgctgtatcttccatgccacaacaaataggtgttcctaccagttctttaacacaagttgttcattctgctggaagacgatttatagtgagtccagttccagaaagtcgattacgagaatcaaaaattttcaccagtgaaataccagatccagttgcggcctctacatctcagggccctggaatgaacttatctcactccgcttcatcccttagtctccagcaggctttttctgaactgaaacatggtcagatgactgaaggacccaatacagcacctccaaattttaatcacccaggaccaacattttctccctttttgactagcattgctggtgtccaaactgtagcagcatccacaccatcagtatcagtccctataacaagcagccctcttaatgacatttccacatcagtgatgcagtcagagggtgcactgcccactgacaaaggcattgggggagttaccaccagcacaggtgtggtagcttcaggtggtctcaccacattgtctgtgtctgagacaccaacactttccagtgcagtttcaagttctacagcgcctgcagttgtcacagtgtctacaacatcccaaccagttcaggctttcacatctgggagcattgcttctagtacaggcagttttccttctggaacattttccacaactacaggtaccacagtgagtagtgtagctgtcccaaatgctaagcctccaactgtattactgcaacaggtagcaggtaatactgctggggtagccatagtgacatcagtttctactaccactccattcccagccatggcttcacagccatcccttccacttggtagcagcacatctgctcctacactagctgaaacagtggtggttagtgcacactcactagacaaggcatctcacagtagtacagcaggattgggtttgtccttttgcgcaccgtcctcttcttcctcctctggaacagcagtgtctagttctgtttctcagcctggtattgtgcatcctttggtcatctcatcagctatagcttctacacctgtcctcccacaaccagcagtacctacttctacacctttattaccccaagtacctaatatcccacccttggtacaacctgttgctaatgtgcctgctgtacagcaaacactcattcatagtcagcctcaaccagctctacttcccaaccagcctcacacacactgtcccgaaatggatgctgatacccagtccaaagctcctgggatcgatgatataaagactctggaggaaaagctgagatcgctctttagtgagcatagctcatctggaactcagcatgcttctgtctccctggagacacccttagtagtagagactgtcacaccgggcatccctaccactgctgtagcaccaagtaaactcatgacttccactacaagcacttgcttgccaccaaccaatttacccttaggaacagctggcatgccagttatgccagtgggcacacctggtcaagtttctaccccaggcacacatgcctcagccccagccagcaccgcaacaggagcaaaacctggaacaactcccccaaagccatctttaactaagactgtggtgccgccagtgggtactgagctttcggctggtactgtaccctgtgagcagctgccaccttttcccggaccgtctctaattcagacccagcaacccctagaagatcttgatgctcagttgagaagaacacttagtccagagactattccagtgacacccgcagttggtcctttgtctacgatgtcttcaacggcagttacagaagcaggaagtcaacctcagaaggatggcacagaagttcatgtcacagcaagtagctcaggagctggtgttgttaagatggggagatttcaggtttcagttacaatggatgatgcccagaaagagcgtaaaaataggtcagaagatacaaagtcggttcattttgaatctagtacatcagagtcatcagttctttcaagtagtagtccagagagtaccctggtaaagccagagcctaatggaattactgtttctggcatctccttagatgtgccagacagtacccatagaacaccgaccccagaagcaaagtcagaaacaggacagcctaccaaggttggacgttttcaggtgacaactacagccaacaaagtgggtcgtttctctgtttcaagaactgaggacaaggtcacagagctcaaaaaagagggaccagtgacctctcctttcagagattcagaacaaactgttattcctgctgcgataccaaagaaggagaagcctgagctggcagaaccttcccatctgaatgggccatcttcagacttggaggctgcctttctaagtaggggtggagaggatggatcaggtagtcctcactctccccctcacctgtgttcaaagagccttcccatccagactctaagtcaaagccttagtaattcattcaactcctcttacatgagtagtgacaatgagtccgacattgaagatgaagacttaaggttagaactgcgacgactacgggaaaaacatcttaaagagattcaggacctgcagagtcgccagaagcatgaaattgaatctttgtataccaaactgggcaaggttccccctgctgtcattattcccccagctgctcctctgtcagggagaagaaggaggcctactaaaagcaaaggcagcaagtccagtcgcagcagctcattgggcaacaaaagccctcagctttcaggtaacctgtctggtcagagtggaacttcagtcttaaacccccaacagaccctccatcccccaggcaataccccagagactggacacaaccagctgttacagcctcttaagccatctccctccagtgacaacctctattcagcctttaccagtgatggtgccatttcaataccaagcctttctgctccaggtcaagggaccagcagcacaaacaccgttggaggaacagtgagtagccaggctgcccaggctcagcctcctgccatgacttccagtaggaagggcacattcacagatgacctgcacaagttggtagacaactgggcccgagatgccatgaatctttcaggcaggagaggcagcaaaggacacatgaattatgagggccctggaatggcaaggaagttctctgctcctgggcagctgtgcatttccatgacctcaaacatgggtggctctacccccatctctgcagcatctgctacctctctaggtcacttcaccaagtccatgtgccccccacagcagtatggttttccagctgccccattcggcactcagtggagtggaacaggtggtccagcaccacagccacttggtcagttccaacctgtaggaaccacatccttgcaaaatttcaacatcagcaatttgcagaagtccatcagcaaccccccaagttccaacctacggaccacctagtcagcagcaaggatgttaactgagtagatctgggggcaggaaatggaatggtgatggggtggggggtggggaaatagcctatatactaactactagtgctgcatttaactggttatttcttgccagaagggaatgtttttaataccattttgagccctcagaatggagaaccaccctccttctccatttgttggagttaaaaaagaaggaaagaagagctttctggtggaggggctgcctgagactgcttttctgtttttgtacccaccagtaaggcctaggggctagaagagagccttgttaccagaaagcctcatgtaagccaaatcccatatgtatctgaagtgggtagagctcttaattttgacatgtgcccccgaaactccttattccctcaacagtgcacaccttaagacaaaaaggttctctcccactcggatccctacccccactkwwyttttwcctttwacaacstaktgaaaaacaccaggggaytggggttgcaaccctttyttatataggtcattaatgctttaagcaaaagattagcagctttgactgcagcattagcaattagggaaaacaatgacgttccstgcggacatgttaactttgccatcagttttgatgtggaaacactgtgatatataaatgttgttggacaacattagttytaagagtaaaatttgaaaggtttaaaaggttcacacacaaagstagctmtgtcctttccttattaagacactttaactytttcstttgtatttccattgtattagataaataaatgtgaatgtaaaattgtrwaaaaaaaaaaaaaaaaa

SEQ ID NO: 689 - DNA, 547 bp, Rattus norvegicus
  misc_feature (334)..(334): n is a, c, g, or t
tgggacccctgtgatctggctgctctgatctcgctctgcaatgctgcctttgcctcagctgtgcgcgctctggggctgcttgttgacagcggtccatctaggacagtgtgttacgtgcagtgacaaacagtacctccaaggtggcgagtgctgcgatttgtgccagccgggaaaccgactagttagccactgcacagctcttgagaagacccaatgccaaccgtgcgactcaggcgaattctcagctcactggaacagggagatccgctgccaccagcaccgacactgcgaactcaatcaagggcttcaggttaagaaggagggcaccgcggtntcagacactgtttgtacctgcaaggaagggcagcactgcgccagcaaggagtgcgagacgtgcgctcagcacaggccctgtggccctggctttggagtcgtgcagatggccactgagactactgataccgtctgccaaccctgcccggtcggattcttctccaatgggtcatcactttttgaaaagtgtcatccatggacaagctgtgaagat

SEQ ID NO: 690 - DNA, 2295 bp, Rattus norvegicus
ctgggcttgtggtaagtaatggagctaagggcaaggaaaatcctgagtcagaaacagtcttatcagaagcaggaaggcttagcaaagcacggggaagaatcagaaatcgcctcattaccagccccaaccttaccacaattcttgtcggcctgtcttcggctgacagctgctggcgcggcggcggccccgagcaagatggcgctgcggccgggagccggagccagcggcgcggcgggggcgggcacagggcccggcggggcaggcagcttcatgtttcctgtcgcaggtggcatgagaccccctcaaggcctgattccaatgcagcagcaaggatttcctatggtctctgtcatgcagcccaatatgcaaggcatgatgggaatgaattacagctctcagatgtcccagggacccattgcaatgcaggcaggaataccaatggggccaatgccagcagcgggtgtacctttcctgggtcagccaccttttctgggcatgcgtcctgcagccccacagtacactccagacatgcagaagcagtttgcggaagagcaacaaaaacgatttgaacaacaacaaaagctcttagaagaagaaagaaaacgacgtcagtttgaagagcaaaaacaaaagctcagacttctgagtagcgtgaaacccaagacaggagagaagaacagagacgacgctttggaagccatcaaaggaaacttggatgggttttccagagatgctaagatgcaccccactcccgcatctcacccaaagaaaccaggtgtgggcgtgtttccctctcaggatcctgttcagcccagaatgcctccttggatttacaatgagagtttggttccagatgcttataagaaaattttagaaaccacaatgactccaaccggaatagacactgctaaactttatcccattctgatgtcatctggacttcccagggaaactcttggacagatatgggccttagctaatcgaactacgcctggcaagctcactaaggaggagctttacaccgttctcgccatggtagcagtaacacagagaggtgttcctgccatgagccctgatactttgaaccagttccctgcggctcccattcctaccttaagcggctttcctatgactctgcctaccccagtgagccagccaacagcgatgacctctggccccgcaggctccatacccctcagccttggacagcccatcatgggcattaaccttgttggaccagtgggtggagctgcagcgccaacttccagtggcttcatgccagcctacccctcaaaccaggtgggaaagacagaagaagatgacttccaggattttcaagatgcttcgaagtcaggatccatcgatgattctttcactgacttccaagaggtgcctgcgtcctcaaaaaccagtaattcccagcatggaaacagtgctccctcactcttgatcccacttcctggaactaaagcctccacagacaaatatgcagtgtttaaagggatttctgctgagaagccctctgaaaaccctgcttcatttggagagtccggtgataaatacagtgctttcagggaactcgagccaacagcagacagtaagcctttaggagagagctttgcggagttcagatccacaggaaccgatgacggcttcactgacttcaagactgctgatagtgtgtcacccctagagccaccaacaaaagactcttttccatcggcctttgcctcaggagctgcacagcagacacagacacaggtgaaaacccctctgaacttagcagacctagatatgttctcctcagtggattgcagtggggagaaaccagtgcccttttcagctgcatttagcacctcaaagtcagtttcctcaagacctcagccggcgggttctgcagcagccccagcatcactggcatccactaaagcgtccagtttggcagatgattttggagagttcaacctctttggggaatattcgaaccctgcgtctgttggggagcaggacgactttgcagatttcatggctttcggtaacagctccatcccctctgagccaaaagcagatgacaagtatgaagccctcagagaagaagggagccccggcgccttgtccaccagcactgtggagggtgcacacaacccacctgtttcgtcatccaagtacgacgtcttcaaacagctttccctagagggagctggactggccatcgaggagttcaaagagaacactccttccacaaaaagtgacggtgactttgctgacttccactccagtaaattctcatccacg

SEQ ID NO: 691 - DNA, 1506 bp, Rattus norvegicus
gccctgcttaatggatggaggctggcccaaacctgacttctgcggttctgaacatggccctgagcactgtgtctgctgaggtcatccaccaggtggaggagtctcttgatgaggatgagaaggagatgatgctcttcttgtgtagagatgtgactgagaacctggctccacccaacgtcagggacctcctggattgtttaagtgagagaggccagctctccttcgctgccttagctgagctgctgtacagggtgcggcggtttgacctgctcaagaggattttgaagacagataaagcagccgtggaggaccatctgtgcagaagccctcaccttgtttccgattatagggtgctgctgatggagattggggagaatttgaatcaatctgatgtatcctccttaattttccttacaaaggattacacaggccgaggcaaggtagccaaggacaagagtttcttggacctggtgattgaactggagaaactgaatttgattggttccgatcagttgaatttattagaaaaatgcctgaagagcatccacagaatagacttgaagacaaaaatccagaagtacacgcagtccagccaagaagcaagatcaaatatgaatgctctccaggcttctctcccaaaattgagtatcaaggaacatttatataactcaagggtgagtctggagccagtgtgtggaatatcagcatgaaccagttccagagatgtaataaaaatatacaccgcatgtcatatgttgttatagctaaacaaattctgataggcgtgtgtttggtaaagaatgtgtgtgacttcttatgattaaaccttagtaatgttcaaaaatatatttggggaaagttattaaatacatagtaagaaaataatatatatacccattacctaggcatgactactgtggaatgctttctttcagtctcgttccgaatgtaaatatagaaagaaaaaggtaaatgtccctaaagagattttaaagttgttcactcccacctcgtagaacccatgtcccacttcctttccattaaggagactatccttgactagtttctccgataaccaagcacagagcctgcctacttaaagtgtctacttttgtacacgtggtagcatatcatgtctgctcctctgaacagagaagtcttagacattgttctatatggttaatatgagattgtttkkmwykarkcgttatttgtactatttggaatgacacccccacccctttattttcttttgtgacaagaacttacctgtaacccagcctggcctaaaatccattatgtaacctaggccagccttgaatttcaatgagtcttctcttgcttcagcctcccaagtgctgacataggcatgtcctgccaggagggctcatggcttctattttctgcatgtactaaaatgtattcagttctttcttgctgatatgtacattgcttcctttcctttgttcctggaaacgatgctgcwaaataaamttyctgattctt

SEQ ID NO: 692 - DNA, 3265 bp, Rattus norvegicus
ggcaaacatgcagtggctccgggatattttgctgtgtatgctgctagcggcggtggtccctactgcccctactcctgccccgacggccacttggactccggcagagccgggcccggctcttaactaccctcaggaggaagctacgctcaatgagatgttccgagaggtagaggagctgatggaagacactcagcacaaactgcgcagcgcggtggaggagatggaggcggaagaagcggctgctagaacgtcctctgaggtgaccctgtcaagtttacctgccaactaccacaacgagaccaacacggagaccaggatggaaaataacacagcccatgtgcaccgggaggttcacaagataaccaacaaccagagtggacagacggtcttttctgagacagtcattacatctgtagaggatggagaaggcaagaagagccatgaatgtatcattgatgaggactgcggacccaccaggtactgccagttctccagcttcaagtatacctgccagccgtgccgggaccagcagatgctatgcacccgagacagtgagtgctgtggagaccagctttgtgcctggggtcactgcacccaaaaggccaccaaaggtagcaatgggaccatctgtgacaaccagagggattgccagcctggcctgtgctgcgccttccaaagaggcctgctgttccctgtgtgcacacccctgcccgtggagggggagctctgtcatgaccccaccagccagatgctggacctcatcacctgggaactggagcctgaaggcgctttggaccgatgcccctgtgccagtggcctcctctgccagccacacagccacagtctggtatacatgtgcaagccagccttcgttggcagccatgaccacaatgaggagagccagctgcccagggaggccctggatgactacgaagatgttggcttcataggggaggtgcgtcaggagctggaagacctggagcggagcctggcccaggagatggcatttgaggaggccacccctgtggattcactaggtggagagaagatttagacctagacccagctgagttgctggtagatgtgcaataggaatggctaatttattttcccaggagtgtccccaaggtgtggaatggccacagctccttcccagtagcttttcctctggcttgacaaggtacagtgcagtgcattttttccagctgccccacttctctggcttaggaaagaaagacaggcgtggcaggtaaggggagcggtgagctgccccacattgttgctagacatgctgccttgtttgttcttcatggattgaagatttgtttgaagggagaggatgggaaagggggtaagtatgcccatgataggtttgggggatacagggaggacagtgcctgccttgcaaacgtggacctggcaaaatgtagccgttgtttttktcttgtgcccctcccatgggctgaggaagtgactacacaggagctatgctgctcttgtggccttccacacattmmtcccccasyccccagkgtywtakctcctacctcactgtaacacacgcctttmmtagccatgttccttcctgatacacamagctagaaggggayaggagtgggtttctctccaagccccatgttctctcactcaaccccacaccagccttggtaccaccaacagtactttcaaaaggaggggagtaaaacccttttkkktttwtttttttttactcctccaaggcatgcctggaaccaaggtcagggtagtttgcatgtccccctgttagtagcagtgtggtggscattgtcctccaccatatgcgtcaatacctccgaaagtcagtgtacattaatttgcaagaaatatgcttgggtaattgtagggccaggattgtgaatgaaacttgcaaagttgcttagcaataatggaaggtctttctcaatcacacagagaaatcaaaaccaagccaggctgtgtaaaatacagctgtgacatccagacagaaggctgggctggctgtcaggtctcagatgacagtttcaggtgccaggmactatttccattctgtatttatccgagagttattaaaatttaaagttgcamamarwhvwmdwarmmatgctttttcccctgaggtttaaattatgtgtacacaaatgtgttgctctcaaagattattcagaaatcactttggctactctttggtaattcttggactttttgattttcgaataaatataaaccctcttcatgtaaaawaaaawaaaawaatctgtagtatmamgrgrccaaaaattaaaattccatagaagcagattttccaggcagtctgcagctcacctcatttagagtctgaatatgttggactctatccttgtctggatgggaattagttttaagagagaaatactttaccgctccaaaagaacaaatggaatatatgagtcttctcttggaggctctctgagcaaatgcagtcctggggctgtgctagcatcgttactgtagcaaaacagctgaggtgattaayttatgcattttttaaaaagggttaattgggttcagcatttcatgtttctgtcatgatcctattgcgttgaaactatagagaggcagcacaacacggcaggggcatgtggtagagtcaagctgctccctttctggctaagagagagggcaatgtgcagtcttgtccaggggtctgggcactctcacaaggacccaccccgtaaagaccamtctrcagccttgggtttagttactcttctgggtgctacatcaaacacccaacaagaagcaacytgagggaggagggtttatttgggctyytggttcaagcagggagtccttrrtggcagggagggtatggcsttagagtgtggggmyccwtcccgcagtatagggratcgggaagcaaaggaagcaatgtaggactcagctttctccctctttcccttttyatttattmtgggaccccaacccttggggaggtgccacccacaataagggtgagttttctttcctcagaaccctctggaaacttstggytaatagatatgtgcagagktgtgcccctaagtagtcaactccatccggttccaagacatataagcgwkacgcactaactytgccacatagcaccgagtccctcttaaaascctttacttytcatccgargatwtcacagaaaagagatgtcgaaacatttagaaaagacaataaatgtacttgmtgaarwmwaaaaarawawaaaaaaaaaaaaaaa

SEQ ID NO: 693 - DNA, 3104 bp, Rattus norvegicus
ccggcccctgccccttggcctcaagcccccggcgagtctggagccctcgccgtcgccggtcgcgtccttcgggcatggaaggcggcggcaagcccaactccgcttccaacagccgcgacgatggcaacagcgtctacccctccaaggcgcccgcgacggggccggcggcggccgacaagcgcctggggaccccgccggggggcggcgcggccgggaaggaacacggcaactccgtgtgcttcaaggtggacggcggcggaggagaggagccggcgggcagcttcgaggatgccgaggggccccggcgacagtacggtttcatgcagaggcagttcacctccatgctgcagcctggggtcaacaaattctccctccgcatgttcgggagccagaaggcggtggagaaggagcaggaaagggttaaaactgcaggcttctggattatccatccgtacagtgacttcaggttttattgggatttaataatgcttataatgatggttggaaatttggtcatcataccagttggaatcacattcttcacagagcaaacaacaacaccgtggattattttcaatgtggcatcagatacagttttcctgttggacctaatcatgaattttaggactgggactgtcaacgaagacagctctgaaatcatcctggaccctaaagtaatcaagatgaattatttaaaaagctggttcgtggtggacttcatctcctcgatcccggtggattatatctttcttattgtagagaaaggaatggattcggaagtttacaagaccgccagagcacttcggatcgtgaggtttacaaaaattctcagtctcttgcgtttattacgcctttcaaggttaattagatacatacaccagtgggaagagatattccacatgacatatgatctcgccagtgcagtggtgagaatcttcaacctcattggcatgatgctgctcctgtgtcactgggatggctgtcttcagtttctggtccccctgctgcaggacttcccaccggattgctgggtttctctaaatgaaatggttaatgattcatgggggaaacagtattcctacgcactcttcaaagctatgagtcacatgctgtgcattggttatggcgcccaggcccccgtcagcatgtctgacctctggattaccatgctgagcatgattgttggggccacctgctatgccatgtttgtcggccatgccacagctttgatccagtctctggattcttcaaggaggcagtatcaagagaagtacaagcaagtagagcaatacatgtcattccacaagttaccagctgacatgcgccagaagatacatgattactatgagcaccgataccaaggcaagatcttcgatgaggaaaatattctcagtgaacttaatgatcctctgagagaggaaatagtcaacttcaactgccggaaactggtggccaccatgcctctctttgctaacgcggatcccaatttcgtgacggccatgctgagcaagctgagatttgaggtgttccagcccggagactatatcattcgagaaggagctgtggggaagaaaatgtatttcatccagcatggtgtggctggtgtcatcaccaagtccagtaaagaaatgaagttgacagacggctcttactttggagaaatatgcctgctgaccaagggccggcgcactgccagtgttcgagctgatacatactgtcgcctttactccctttcggtggacaatttcaacgaggtcttggaggaatatccaatgatgagaagagcctttgagacagttgctattgaccgactagatcggataggcaagaaaaactctattctcctgcagaagttccagaaggatctgaacactggtgttttcaacaaccaggagaatgagatcctgaagcagattgtgaagcatgacagagagatggtacaagcgatccctccaatcaactatcctcaaatgacagccctgaattgcacatcttcaaccaccaccccaacgtcgcgcatgaggacccaatctccaccagtctacacagcgaccagcctctctcacagcaacctgcactcacccagccccagcacacagacgcctcaaccctcagccatcctttcaccctgctcctacaccacagcagtctgcagtcctcctatacagagccccctggccacgcgaactttccattatgcctctcccactgcatcccaattgtcactcatgcagcagcctcagccgcagctacagcaatcccaggtacagcagactcagactcagactcagcagcagcagcagcaacagcagccgcagccgcagccgcagcagccgcaacagcaacaacagcagcaacagcagcagcagcagcagcagcaacaacagcagcagcaacagccacagacasytggtagttccacaccgaaaaatgaagtgcacaagagcactcaagctcttcataacaccmacctgaccagagaagtcaggcccctctytgcctcgcagccttcrytgccccatgaggtstccactatgatctccagaccgcatcccactgtgggcgagtccctggcytccatccctcaacccgtggcaacagtccacagcaytggccttcaggcagggagcaggagcaccgtgccacagcgtgtcaccttgttcagacagatgtcctcgggagccattccccccaaccgaggagtgcctccagcacccccrccaccagcagytgtgcagagagagtctccctcagtcttaaataaagacccagatgcrgaaaaammmmrwwwwrmwwcgaatttatgattcttgctgattgtcaaagcagaaaagaaatactctaataaacagaatattctcagatattattttattctatctcatgatagagccctatagcctactctaaaaagatattttagaagctctggcgtacatgcaaatgtaaaaacatatatacatatattattaaatatatatatatatctaaatgcccaagagaagttcaaaagacttgtataactttcagtgttatgtcttcctttctttaaaaccattaaaggatttaacacattgttgtaagatcaaaaaaaaaaaaaaaaa

SEQ ID NO: 694 - DNA, 1803 bp, Rattus norvegicus
cggccgcarctgccgccagtakgggcctgtgcggggacttccagggcccggaggcgggctgcgtgcactcggcgccgccgcagcccccaccgaccgggccgctgtcgcagcccccaccggtgcctccagccgccgcggggccactcgctgggcagccgcgcawgaccagttcgtcgcgccgcaacgcgtggggcaacctgtcgtacgccgacctcatcaccaaggccatcgagagctcggcggwgaagaggctcaccctgtcgcagatctacgagtggatggtgaagagtgtgccctacttcamggataakggcgacagcaacagctcggcgggctggaagaattcaattcgccacartctgtccctacacagcahgtttattcgagtacagaatgaaggaactgggaaaagktcttggkggatgctcamtccakagggaggcaagagtgggaaatcaccccggagaagagctgcatccatggacaacaacagtaaatttgctaagasccgaggacgggctgctaagaaaaaagcatctctccagtccgggcaagagggtcctggagatagccctgggtctcagttttctaaatggcctgcaagccctgggtcccacagcaatgatgactttgataactggagtacatttcgtcctcgaaccagctcaaacgctagcaccatcagtgggagactttctcccatcatgacagagcaggatgacctgggggatggggatgtgcattccctggtgtatccaccctctgctgccaagatggcgtctacactgcccagtctgtctgaaatcagcaatccagaaaacatggasmwcstkctggataatctcaatcttctctcatccccaacatctttaactgtgtcaacccagtcctcgcctggcagcatgatgcagcagacaccttgctattcgtttgcaccgccaaacaccagtctaaattcccccagccccaactacgcaaagtacacgtacggccaatccagcatgagccctgtgccccagatgcctatgcagacacttcaggacagcaaatcaagttatggaggattgaaccagtataactgtgccccaggactcttgaaagagttgctgacttctsacwskcctccccacaatgatattatgtcaccagtcgatcctggagtggctcaacccaacagtcgggtcctgggccaaaatgtactgatgggccctaactcagtcatgccagcctatggcagccaggcacctcataacaaaatgatgaaccccagttcccacacccaccctggacatgcacagcaaacttcttcagtcaatggccgtgccctgccccatgtggtgaacaccatgcctcacacatctsccatgaaccgcttgaccccagtgaagacacctttacaagtgcctctgtcccaccccatgcagatgagtgccctgggcaactactcctctgtgagcagctgcaatggctatggtaggatgggtgtcctccaccaggagaagctcccaagtgacttggatggcatgtttattgagcgcttggactgtgacatggagtccatcwttcggaacgacctcatggacggagataccttggattttaactttgataatgtgttgcccaaccaaagcttcccgcacagtgtcaagactacaacacacagctgggtgtcaggctaggagttagtgagcaggcaacatttaaaagtccttcagattgtctgacaccgggaactgaggagcagtccaaagatgcccttcacccctccttttagttttcttgattaaaaaaaaaaaaaaaaaa

SEQ ID NO: 695 - DNA, 6118 bp, Rattus norvegicus
tgagacccacattgtagcccatgctgacttcacactcatcaggcagcccaggaaagccctccacacactcccacatgctgagatttcaggtgtagactgcgggtgccaagatctgaatccagatatttggttctagtgtttacactgtgtaactccccactcccaaataccaggggaaaacaaaccaggtctccttcctgaagggtgctactcacccccaaccctgtgtcctgttctcattacaggggccgcatggaagctcctgtcaggcgtccgggaaggccagacgcaggtagacacaccccagacaggggacatggcttactggtcccaccccattgacctgcactttgctacaaaaggtctccaaggtacgtacaggatgacaggaagggaaggggcagtcaaactaggaagagctgggcttggaacaccctggccgtctctgctccccatactttgtgggtcctttttctggtgcatttgaggcttcactcgagctatgcaaaaccctacctaggccgtggaatgtgccagaggtcggggtagaggagatagcagggggaggggggtcaagtggcagaggagaaggcagtgaggaggccgggtagggtgaagagagctggatgggaaggcgagggacaggaaatgggccagttgccgctgctcacacacggacagaggtcctgctcaaaggggaagtgagtgtaggagggaggaggtagcatggcagtgctgctttgccgggaagctgcccgggtatttcagcaatgtcagtcagttgtcagtttgctgagtctgtgcctgcccagcttgagaagggatgtccccaactaagacaggaccctccaagccctgtcttcagggcctctattctaggtagaagatggacccgtttctagatggggccagcccagaggccgtggagacccagaagtcatctctggttggtcccatggccttatatggcagaggggttagagctctgctgtaaaggccaggagaagctaactagtcccaaggacaagggcagagggtggaggcagagagccggagacgtgggtattagacgacgtgggtattagacgtctgcgggagagaacagcaggggatggggaggtagggacagaatgtagggccttggctgcaaaggtgctaagactctctcctgaaggctctggggagcccaggaagaaatggatgggtcagattttccccttggacagcatactagtttctgtgtgagcactgagtccttgttgcctcagttctggcctttggtagcttcctccctgcttgcttgcttcttagtctctctcacttagctgttcaccagcaaaccctaggggctctgaaacccacttctgcttctcaccccattccttctgcttctcaccccagccaccccactgagccctctctgcccttcttctctctttttttttttttttgttttttgttttttgggtttttttttttttttggagttggggaccaaacccagggccttgtgcttgctaggcaagcgctctaccactgagctaaatcctgcccttcttctcttacctggaccattcttccttcccgtcttcactgtgctcccagacccaggcatcagggtctgggactgcaccggaccctgggaggacacaaatacgaccatgttcttcctctgcacagaaccttcctgcagatctcctgtctctcagagcaaacgctggagtcttctctagcatcacatggccccatgtaatctggaggtcacctctgtcctttgtcccccatgactccctgttttagtcccgttgggcccaccaggccagctcctacttcacaactgttgcactgacgatctcgtccccctaggtgcctagctagcccactcctttaagcatttctataccggttgcatcctggttgctttgtttgcttttgagaacatagtgcaggccagcctggaacctcagcagcccaagtgtgcacccttccaggtgaggtcttcctgtatagcctagaactcatgtgtagcccaggctagccttgaacttgcagggatcctcttgcctctacctcccaagagctgacagtccagctgtacactgcagtgctcagcccaaatgtccccatctttagtaaagcttcctttagctgctccccacttttccaagctacatctccacccctccctttctggctgttgtttttccccagagcggttatcaccatctgacataccctataatttacttatttactatgttggttgtctaggatgtcagcttcacagggcaggaatttttgtctgctgtgttcattgctgtgtccccagcctggagaacagggcctgccagggaggagctcagggtagcgggggacctgggctgcacgtccaagcattggactgtcaggctgggacattcagctgtgctctgaggccactaggaacctaaagaatgggagagatggttgcactggggaagaaaggaaacttgagtcaggtgggcgagagcagagcaggtccataaggagagagggcagaaggggtcttagctgaggtcctgacctgggggctttggagagagagaccatgaagggaggtgagatgaggccagccctgatgagttttcacactygagagcttggactttgtactgtggcacaggggagccatggatgggttttgagcaagagggtaatgtggatttctatagatccctgtgactactatgtggagtggatgggagatgagaacacagagaggaaattaaggcaataatccaacgtaaaagggctgtaccttagtctctactggtttcaaggagatgggaacccaggggcaggtctgcctcctttgtccttttttctgacccctcttgtcctgcaggttggcctcgacttcatctccaggtgtggtcccaggacagctttggccgctgccagcttgctggctatggcttttgccatgtgcctagcagcccaggcactcaccagctggactgccctacatggaggcccctgggtagttggagggagcagctagcacgggctttcgtgggtggcgggccacagctgctgcacgcagacaccatctacagcggggccgaccgctaccgcctgcacacggccgcgggtggcacagtgcaccttggtatcggtctgctgctgcgccactttgatcgctacggtgtggagtgttgagggacttcactgccaccagtcaccatcatccacagccctgcgcacacgacggcacagcagtgaaacaggcacatagactctggagactgtcagtcctgatctcacccaagtcatggcccttatgccatggactgcaaggccaggaactacccctgtggcccatgctccactgaattaccgggtaaaagtctgtgagttggagggacttgaggagagcatgctgtttggcactgtcaggggcacttaataaaagcatgcatttctcataggtaaggtgtcccctcgtacccgctgcagwwctcagatgtccgtcttcttatttaagtgacskccttgacgactttcatcrgsaaaccrmaaagtctgcccctrcctttcgctctatgcctcctaggccctctaatataggrccctgttttctcacgaagtcgcaattttccctttgacccttcaacaactcccaaacccacggggggcgcttctgttggtcaccagctctagtagtgytccgccgccaggaggcagcaccctggaggtggggcggggccggggtgcccgccccctccccgcagggctgaagagacccccctcggagcccgcccacgctagatgaagacagtggcccccccatgccctccccctggggctgcccccgccccgcgtgcgcttcctgggtggggccggggcggcttcaaaacccccgccgccccagccggtcccgccgccgccgcccttcgcgccccaggccgtccccctcctcctcccgccgcggatcctccagacagctaggcccccggccggggcaggggggacgccccttcggggcacccccggctctgagccgcccgcggaaccggcctccgctgggagccggcaagggagcagcggaggagccgtccgaggccccagagtctgagaccagccgccgccgccgcagggaggagggggaggaggagtgggaggagggacgagctggttgrgagaagaggaaaaagttttgagacttttccgctgctactgcaagtcagagacggggggactgcttggcgctgcgctgtcccgcaaggaggcaggacctgaggactccagacagccctgctcaccgtcgtggacactcgattgctacccggcgttcctcggacgcccccattccggaccagccctcgggagccacaagcmccgcctcccgcaaagacttcaccccaaagctggggcgcaccccttgcacgccaccctccccccagcctgcttcttgagtcccccgcatcccaggaccctctctcctctgggaggccgatctccctcggacctgctggcaatagcttcctatttaagaacaccccacttttgggtcccagagagcgctcatctcgatttttatcccggtggcatactgagacactctggtgtcagagcgtcaccgcgactcctgctgctttctccctcaacctcaaattattcaggactatcacctacctttccttgggagaccccaccccaccccacaagccctgcaggggcggggcctccgcatcccacctttgcccggggttcgcgctctccgaagttccgtggggcgccgcctcccccatgccgccctcggggctgcggctgctgccgcttctgctcccactcccgtggcttctagtgctgacgcccgggaggccagccgcgggactctccacctgcaagaccatcgacatggagctggtgaaacggaagcgcatcgaagccatccgtggccagatcctgtccaaactaaggctcgccagtcccccgagccagggggaggtaccgccgggcccgctgcccgaggcggtgctcgctttgtacaacagcacccgcgaccgggtggcaggcgagagcgctgacccggagcccgagcccgaggcggactactacgccaaagaagtcacccgcgtgctaatggtggaccgcaacaacgcaatctatgacaaaaccaaagacatcacacacagtatatatatgttcttcaatacgtcagacattcgggaagcagtgccagaacccccattgctgtcccgtgcagagctgcgcctgcagagattcaagtcaactgtggagcaacacgtagaactctaccagaaatatagcmacrakkcctggcgttaccttggtaaccggctgctgacccccactgatacgcctgagtggctgtcttttgacgtcactggagttgtccggcagtggctgaaccaaggagacggaatacagggctttcgcttcagtgctcactgctcttgtgacrgcaaagataatgtactccacgtggaaatcaatgggatcagtcccaaacgtcgaggtgacctgggcaccatccatgacatgaaccgacccttcytgctcctcatggccacccccctgraaagggctcaacacytgcacagctccaggcaccggagagccctggataccaaytactgyttcagctccacagagaagaactgctgtgtacggcagctgtacattgactttaggaaggacctgggttggaagtggatccacgagcccaagggctaccatgccaacttctgtctggggccctgcccctacatttggagcctggacacacagtacagcaaggtccttgccctytacaaccaacacaacccgggtgcttccgcatcaccgtgmtgcgtgccgcaggctttggagccactgcccatcgtytactacgtgggtcgcaagcccaaggtggagcagttgtccaacatgatcgtgcgctcctgcaagtgcagctgaggccccgccyccgmcccgccccgcccctyccggcaggcccggccccgcccccgccccgcccgcagtgcccggggctgtatttaaggacacctgcaccccccccaagcccatytgggggcccattaaaggtgacagrggraaaaaaaaaaaaaaaaaa

SEQ ID NO: 696 - DNA, 505 bp, Rattus norvegicus
agaccgaatccgcataagcatctcccagaagcggacaggcccctccaagcagcatctggcccctccgccgattcccacctcgccaagcagtgagcaggtgggcgaggcatccagccccagcaaggtgcagaaaagctggagcttcaatgaccgcacccgcttccgggcctctctaagactcaagcctcgctgctctgctgaggagggcccctcagaggaagtggccgaggagaagagctaccagtgtgagcttacggtggatgatgtcatgcctgctgtgaagacggtcatccgttctgtcaggattctgaagttcctggtagccaaaaggaaattcaaggagacgctgcggccatatgatgtgaaggatgtcattgagcagtattcagcaggacacctggacatgctgggacgaatcaagagcctgcaagcccgggtggaccaaattgtgggtcggggccctggggaccgcaagactcgggagaagggcgataagggtccatca

SEQ ID NO: 697 - DNA, 426 bp, Rattus norvegicus
accctgccgggcgccagcgggacgtgcccggagcgcgccctggagcggcgcgaggaggaggcgaatgtggtgctcaccggcacagtggaggagatcctcaacgtggacccggtgcagcacacgtactcatgcaaggtccgagtgtggcggtacttgaaaggcaaagatgtggtggcccaggagagtctgctggatggtggcaacaaggtggtaattggtggctttggagaccccctcatctgcgacaaccaggtgtccactggggacactagaatcttttttgtgaacccggcaccaccctacatgtggccagcccacaagaatgagttgatgcttaactccagccttatgcggatcactttgcggaacctggaagaggtggagttctgtgtagaagacaaacctggaatccacttcacaccagcg

SEQ ID NO: 698 - DNA, 5133 bp, Rattus norvegicus
gaattcggcacgaggttgattcagatactctcaagattgttaaaggactaacttctccctctttatgcacttacgtctggaagcattcagaaaaggaggaatggaataacaaaggtgactctgtaagcacattcttyragaaagcccaggcacagtsgaacagcggtttccagaagctgctgatcccatcttgcaaggctcagctcaactcagagccgctgcttcttccaaagtgtacatcttggcggaccttacggaggaaatcggaaagtagagacacktgaggtcgtgatggagctcgaagaagaccttaacggaagagcagacaagaacttctcaaagatgggcaaaaagagtaaaaarraraaraaaraaaagaaaccagcggtcagtgtgctcacaatgtttcgctatgcaggttggctggacagattttacatgctgctgggaactctggcggccattatccatggaattgcgctcccacttatgatgctggtctttggagacatgacagatagctttgcaaatgtaggaaacaaccgtagtaygagtttctacaatgctacagacatatatgccargctggaggacgaaatgaccacgtacgcctactattacacsggcattggtgccggtgtgctcatcgttgcctacatccaggtttcactttggtgcctggcagctgggagacaaatacacaagattaggcagaagtttttccatgccatcatgaatcaggagataggctggtttgacgtgcatgacgttggggagctcaacacccggctcacagatgacgtctccaaaattaatgaaggaattggtgacaaaattggaatgttctttcaggcaatggcaacattttttggtggttttataataggatttactcgcggctggaagctaactcttgtgattttggccatcagccctgttcttggactgtcagctggtatttgggcaaagatattgtcttcatttactgataaggaactccaggcttatgcaaaagctggagcagttgctgaagaagtcttagcagccatcagaactgtgattgcctttggaggacaaaagaaggaacttgaaaggtacaataacaatttggaagaagctaaaaggcttgggataaagaaagctatcacggccaacatttccatgggtgcagcttttctgcttatctatgcatcatatgctctggcattctggtatgggacttccttggtcatctcaaaagaatacactattggacaagtgctcactgtctttttttctgtattaattggagcattcagtgttgggcaggcatctccaaatattgaagccttcgccaatgctagaggagcagcttatgaagtcttcagtataattgataataagcccagtatagacagcttctcaaagagtgggcacaaacccgacaacatacaaggaaatttggaattcaaaaatattcacttcagttacccgtctcgaaaagacgttcagatcttgaagggcctcaacctgaaggtgaagagcgggcagacggtagccctggttggcaacagtggctgtgggaaaagcacaactgtccagctgctgcagaggctctacgaccccatagagggcgaggtcagtatcgacggacaggacatcaggaccatcaatgtgaggtatctgcgggaaatcattggggtggtgagtcaggaacccgtgctgtttgccaccacaattgccgaaaacattcgctatggccgagaaaacgtcaccatggatgagatagagaaagctgtcaaggaagccaatgcctatgatttcatcatgaaactgccccacaaatttgacaccctggttggtgagagaggggcgcagctgagtgggggacagaaacagaggatcgccattgcccgggccctggtccgcaaccccaagatccttttgttggatgaggccacgtcagccttggacacagaaagcgaagccgtggttcaggccgctctggataaggctagagaaggccggaccaccattgtgatagctcaccgcttgtctacagttcgcaatgctgaygtcattgctggttttgatggtggtgtcattgtggagcaaggaaatcatgatgagctcatgagagagaaaggaatttacttcaaacttgtcatgrctcagacagcaggaaatgaaattgaattaggaaatgaagcttgtgaatctaaagayggaattgataatgtggacatgtcttcaaaagattcrggatccagtctaataagaagaagatcaactcgcaaaagcatccgtgggccacatgatcaagacggggaacttagcaccaaagaggctctggatgacgacgtacctccagcttccttttggcggatcctgaagttgaattcaactgaatggccttattttgtggttggtgtattttgtgccataataaatggaggcttgcaaccagcattctccataatattttcaaaggttgtaggggtttttacaaaaaatgacacccctgaaatccagcggcagaacagcaacttgttttctttattgttcctgatccttgggatcatctctttcattacgtttttccttcagggcttcacatttggcaaagctggagagatcctcaccaagcgactccgatacatggtcttcaaatccatgctgagacaggacataagctggtttgatgaccctaaaaacaccacaggagcgctgaccaccaggcttgccaatgacgctgctcaagtgaaaggggctacagggtctaggcttgctgttattacccagaacatagcaaatcttgggacaggcatcatcatatccctgatctacggctggcaattgacacttttactcctagcaattgttcccatcattgctatagcaggagtggttgaaatgaaaatgttgtctggacaagcgctgaaagataagaaggaactagaaggttctgggaagatcgctacagaagcaattgaaaactttcgcactgtcgtctctttgactcgggagcagaagtttgaaactatgtatgcccagrgcttgcagataccatacagaaatgctttgaagaaagcgcacgtctttgggatcactttctccttcacccaggccatgatgtatttctcctatgctgcttgtttccggtttggtgcctacttggtggcacgagaactcatgacatttgaaaatgttctgttagtattctcagctattgtctttggtgccatggcagtggggcaggtcagttcattcgctcctgactacgcgaaagccaaagtctcggcatcccacatcatcaggatcattgagaaaatccctgagattgacagctacagcacggagggcttgaagcctaatatgttggaaggaaatgtgaaatttaatggagtcatgttcaactatccyacccgacccaacatcccagtgcttcaggggctgagcctagaggtgaagaaagggcagacgctggccctcgtgggcagcagtggctgcgggaagagtacagtggtccagctgcttgagcgcttctatgaccccatggccggaacagtgtttctagatggcaaagaaataaagcaactcaatgtccagtggctccgcgcccacctgggcattgtgtcccaggagcccatcctgtttgactgcagcatcgccgagaacattgcctacggagacaacagccgtgtcgtgtctcatgaggagatcgtgaaggcagccaaggaggccaacatccaccagttcatcgactcactgcctgagaaatacaacaccagagtgrgagacaaagggactcagctgtcgggcgggcagaagcagcgcatcgccatcgcgcgcgccctcgtcagacrgmsksrsatcttamwkmkggrtgwwkcsacatyarctctkgrtrcggakwgtgaaaaggtcgtccaggaagcgctggacaaagccagggaaggccgcacctgcattgtgatcgcgcaccgcctgtccaccatccagaacgcagacttgatcgtggtgattcagaacggccaggtcaaggagcacggcacccaccagcmgctgctggcccagaaaggcatctatttctcsatggtcagtgtgcaggctggagcaaagcgctcatgaactgtgaccatgygagatgttaaatatttttaatgtttgtattaatatatgacacttaatcaaagtcaaaaggaaaacacttactagaatagtcagttatctatttcctgtcacaaaggaaagcatttagtccattttagagtcttcagagactttgtaattaaaagaacaaaaatagatacatcatcaartggagagtaatagtttaaaatgcactataaaatttacaaaagagttaaaagtaaatatttgataatatatacttttatttatactttctcatttgtaactataactgatttccttgcttaacaaattatgtatgtatcaaaactactgaaatgtttgtataaagtatatatatatrgygaaamwraawrwwwawawwwwwwracttgttttgctcaaaatgcatgtgaaattatatattctaccaactggagtattgtacataattttagcctttaaaacttagtctatgggggaggggtcactctatgggtaatgtgcctgataatacacaaacatgagtatctgagtctagatccctagcacctatgtaagcagaaaggtgtggtatgtttgtaatgccagggctagaggcagaaacagacagatcctatgggctccgtggtcagctagcctagccagcatagggagctccaggttcagtgagaagacttgtctcaaaaataagagggaaaaagcaaatgaggttgtcacaaatgtgtactcgtcatacaaatgccatccatgcaaatgtatacacacacacactcacacactcacacacacacacacacacacacacatacacacacacacacacatacccattaacagaggactagcaaggaaaaggaaggggattaacaggagtgggaccaggacaaaggaggttacttggatgaatatgactgaaggatgttatgtacatgtatgaaaatgccgtactgaaacactatgatgtatacttaatatatgctaataaacatttttaaaaggaaaaaaaaaaaaaaaaaa

SEQ ID NO: 699 - DNA, 855 bp, Rattus norvegicus
ggcttgtgggtttcggggattacgtaccaggcgatggcaccgggcaaaactctccagcctaccagccgctggtgtggttctggatcctgtttggcctagcctacttcgcctcagtgctcaccactatcggcaactggttgcgagcggtgtcccgccgaactcgcgcagagatgggtggcctcacggcgcaggctgctagctggaccggcacagtgacagcacgagtgacccagagaactggacccagcgccccgccgccagagaaggagcaaccactcctgccctcttctttgcctgcacctcctgctgttgctgagccagcccacaggcccggctcccccgcacccgcagagaaggtcgagactccttccccgcccacggcctcagctctggattaccccagtgagaatctggccttcatcgacgagtcctcagacacgcagagtgagcgtggctgtgccctgcctcgtgcgcctcggggtcgccgccgccccaacccaacgaagaagccctccagaccccggggtcctgggcgtcttcgagacaargccgtkccggtgtagragmcaggatctctggcccgcgaccctacgccagggcttcgcccaggcatgcttagcttatttgaccaaagagccctcttttgttccacggaattgcaacccggagaggagtccaatggttgccaaatgccaccgctcttccctggctggttcttcacatccaaccatttccaaagcccaccatccaaggctttctgtcttgcttccctgccgattttgcccccacacctcacgactgtgcctcaaaacctgcatcaataaaacaaaaagtctgcaaaaaaaaaaaaaaaaa

SEQ ID NO: 700 - DNA, 1069 bp, Rattus norvegicus
tggtcatcccccaccccctcccccaccacccgactatggcccccacgctgacagccctgtgctcatggtctatggcttggatcaatctaagatgaactgtgatcgagtcttcaatgtcttctgcttgtatggcaatgtggagaaggtgaaatttatgaaaagcaagccgggggccgccatggtggagatggctgatggctatgctgtggaccgagccattactcacctcaacaacaacttcatgttcgggcagaagatgaatgtctgtgtctycaagcaaccagccattatgcccgkycagtcakakgggctagaagacgratcttgcagttacaaagacttcagcgagtcaaggaacaatcggttctctactccagagcaggcagytaagaaccgcatccagcaccytrgcamkrkkctgcacttcttcaatgctcccytgraggtgactgaggagaacttctttgrsakmkgcgatgaactgggagtgaagcsgccaacctctgtgaargwwttttcaggcaaaagcgagcgtagctcctctgggctgctggagtgsgactccaagartsacgccytggagaccttgggctkcbtgamccattaccrgatgaaaaacccaamtggccmgtatccatacactmtgaagttgtgcttytccacmgyacagcacgcctcctaattagatgctgggaaggaagactcyatccgagcagraagatgtttctttcctttatrctgktggtttctwtgtwytgkctttattkttgcagttctttttttccatttaaatgytaggtcagtagaggcttaaccacaacaaatgstggaactctgraggkggggaggggaaytrgtatctcccaagattaaccttcacttwttaaaataactgtatgtgtgattctttttttcctgttcatacatttgtgctgcccatgtatcttggcmcatttcaataaaattgtttgrraahhaaaamwawhmrmwrrrraaaaaaaaaaaaaaaaaaaaaaaaaaaaaaaaaaaaaaaaaaaaaaaaacccaaaaaaaaaaaaaaaaaaaaaaa

SEQ ID NO: 701 - DNA, 193 bp, Rattus norvegicus
gaggcgtggtgagcatcttcggagtggccagccggttcttcgtggctatgagcagcaggggcaagctcttcggtgtgcctttctttaccgacgagtgtaaattcaaagaaatacttctccccaacaactacaacgcctacgaatcctacgcgtaccccggtatgttcatggccctcagtaagaacgggcggac

SEQ ID NO: 702 - DNA, 2028 bp, Rattus norvegicus
tcgccgaaatgttccggtgtggaggcctggcgggtgctttcaagcagaaactggtgcccttggtgcggtcggtgtgcgtccagaggccgaaacagaggaaccggcttccagttgtgcagtgtcatctcctaggattcccttctagatcactagcgtctgcaggtgcttctgggaaagatggcagcaacctagtatacttcttaattgtaggagcaacagtgactggggcaggaatttattatgcctacaagactattaaagaagaccaaaaaagatataatgaaagaataatgggattaggactgtcaccagaagagaaacagagaagagccattgcctctgctgcagaaggaggctcagttcctccaatcagggtaccaagtcacgtccctttcctgctgattggtggaggtactgctgcctttgcagcagctagatccatccgggctcgggatcctggggccagggtcctcatcgtatctgaagaccctgaactaccatacatgcgacctcctctttcaaaagaattgtggttttcagatgacccaaatgtcacaaagacactgcagttcagacagtggaatggaaaagagagaagcatctatttccagccaccttctttctatgtctctgctcaggacctgcctcatattgagaatggtggtgtggctgtcctcaccgggaagaaggtagtccacctggatgtaagaggcaacatggtgaaacttaatgatggctctcagattacctttgaaaagtgcttgattgcaacgggaggcactccaagaagtctgtctgctatcgatagggctggagcagaggtgaagagtagaacaacacttttcagaaagattggagattttagagccttggagaagatctcccgggaagtcaagtcaattacagttattggtggaggcttccttgggagcgaactggcctgtgctcttggcagaaagtctcaagcctcaggcatagaagtgattcagctcttccctgagaaaggaaatatggggaagatccttcctgaatacctcagcaactggaccatggaaaaagtcaaacgagagggagtgaaagtgatgcccaatgcaattgtacaatcagttggagtcagcggtggcaagttactcattaagctaaaggacggaaggaaggtagaatctgaccacatagtaacagctgtgggcctagaacccaatgtcgagttggccaagactggtgggctggaaatagattccgattttggtggcttccgggtaaatgcagagctccaagcacgttctaacatctgggtggcaggagatgctgcatgcttctatgatataaagttgggtcgaaggagagtagaacatcatgatcacgctgttgtgagtggaagactggctggagaaaatatgactggagctgctaagccatactggcatcagtcaatgttctggagtgatttgggtcctgatgttggctatgaagctattggtctggtggatagtagtttgcccacagttggtgtttttgcaaaagcaactgcacaagacaacccaaaatctgccacagagcagtcaggaactggtatccgttcggagagtgagacagagtctgaagcttctgaaatcacaatccctcccagtgaccctgcagtcccacaggtccctgttgaaggggaggactacggcaaaggtgtcatcttctacctcagggacaaagttgtggtggggattgtgctatggaacgtctttaaccgaatgccgattgcaaggaagatcattaaagacggtgagcaacatgaagacctcaatgaagtagccaaactcttcaacattcatgaagattgaatccctatcatggaatacacaagcacttttccatccctgacagggaatgggtggataaaagaacattttttattcagcatactttttctttatgtaggagcaggaatcgaacaagcctctgtgaatattttcatctgtataaatgcacatcacaaattaaaatctgattctttwmaaaaaaaaaaaaaaaaaa

SEQ ID NO: 703 - DNA, 708 bp, Rattus norvegicus
atgagcacrgaaagcatgatccgagatgtggaactggcagaggaggckctccccaaaaagatggggggcctccagaactccaggcggtgtctgtgcctcagcctcttctcattccygctcgtggcgggggccaccacgctcttctgtctactgaacttcggggtgatyggtcccaacaaggaggagaagttcccaaatgggctccctctcatcagttccatggcccagaccctcacactcagatcatcttctcaaaactcgagtgacaagcccgtagcccacgtcgtagcaaaccaccaagcrgaggagcagctggagtggctgagccagcgtgccaacgccctcctggccaatggcatggatcycaaagacaaccaactggtggtaccagcagatgggctgtaccttatctactcccaggttctcttcaagggacaaggctgccccgactaygtgctcctcacccacaccgtcagccgrtttgccayttcataccaggagaaagtcagcctcctctcygccatcaagagcccttgccctaaggacacccctgagggagctgagctcragccctggtatgagcccatgtacctgggaggagtctyccagctggagaagggggacctgctcagcgctgaggtcaacctgcccaagtacttagacatcacggagtccgggcaggtctactttggagtcattgctctgtga

SEQ ID NO: 704 - DNA, 393 bp, Rattus norvegicus
tactggactctgtttggtggcctggctctctgcagccactctagtcttgccactcacgtttcatcggcagaccttcctattggctggctccgatcgcatgctgtgtcatgatgcgctgccattggcggagcagacctcccattggagaccggccttcatctgcctggctgtcctgggctgctttgtgccactgctggccatggtcctgtgctatggggccacccttcgtgcactggcagccaatggtcagcggtacagccatgcagtgagactgacagccctggtcctgttctcagcagtggccgctttcacacctagcaatgtgcttctggtgctgcactattcaaacccaagccctgaggcctggggcaatctctatggagcctatgtgcc

SEQ ID NO: 705 - DNA, 169 bp, Rattus norvegicus
cctcctcatccatgtgattttcaccatctgctttgcccccaccaacatcatactcataattcaccacgccaactactactacagcaacactgatagcttgtactttatgtatctcatagctctctgcctgggcagcctgaatagttgcctagatccattcctttacttt

SEQ ID NO: 706 - DNA, 2058 bp, Rattus norvegicus
tcttgatgcttttggccagtaccttggagaatactttagatatgccttaaactttctctgatctctctgtgtctgcttcaaatgtagacagcaattgtctgggtakgaccatcttataaagaagcatggctttgttaargaagtcgtattcagagcctcagctkaaggggatagtcaccaaactstacagccgacaaggctaccacttgcaactgcaggcagatggaaccattgatggcaccaaagacgaggacagcacttacactctgtttaacctcatccctgtgggtcttcgagtggwggctattcaaggagttcaaaccaagctgtatttggcaatgaacagcgwgggatacttgtacacctcggaacatttcacacctgagtgcaaattcaaagaatcagwgtttgaaaattattatgtgacatactcatcaatgatctaccgtcwgcagcwgtccggccgarggtggtatctgggtctgaacaaagaaggagagatcatgaaaggcaaccatgtcaagawgaacawgcctgcagcacattttctgcccawaccactgaaagtggccatgtacawrgagccctctctgcatgatctcacggagttctcccgatccggawgtgggaccccgaccaagagcagaagcgtctctggtgtactgratggaggcaaatccatgagccacaatgaatcaacgtagccagtgagggcaaaacgagggctctataacagaaccttacctccaggtgctgttgaattcttctaacagtccttcatccaaaagttcagacttatcagtgaggtttaccaaacacacaggcagagttccctattctatctgccattataccttgttatcatccgtactaaagccccataatttagattaagcttgtgcaaaaagaatgccaagcattatcaatgaactaaacctggaagaaggactgccaaattttctcatgatctcacctatactttgtgaatagataacagagcaaaaatatttaacagcacgaatgctggtcaatttgcttcccaactaagaaaatgtaaaagaccacagtaattattaacaaaacaaaacaaaacaaaacaacaaagttaactgcttaaatgttttgtaggggcaaacaaattctgtgaactgtgctgttttcttggcttcgtgttttctatctctgcttgattcaaatgtactctttactttcatatagtgcaactttatggtttctgaaaattaatggttctattgactctatcacttaatccaaatcaaccgaggtcagggttgaatctgaattggcatctgagactcagagtaacggcgttcttaaggtttttcctctttctccctctccttcctactgtccctcttcctctctctcctttttctgtgtcaattagaactgtagcattctggtcaagttcttgtgctgtactttgtgcgtagaaattgagttgtatcgtcaaccccagtcagtaagataagttgaaacaagattatcctcaagtgtagatttctcttaattccattcgtgtatcacgttamksyaykrkkgtggcttcttgtgtaaagacaggaactgtggaacagtggcattgtctttctcgtgtgtttaaataagaaatgtytcatctgtacatgtaaaagtccttctgtcattggatttggcacgtgaacattgtgtacaagacaatgttaagactggttccccctaaacaacatatattatacttgctactggaaaagtgtttaagacttagctaggtttccatttagatcttcatatctgttgcayggmasrargwyrgaatcttrgcatakmrttgcaykmtatgyaagatktgtgcmttaataattgttaaactctgtgttccaaaagtgaacatagcatgtacaggcagttttytgccctgtgcataaaaagttaaaaaaaagttgtttaatatttgttgttgtatacccaawtacgcaccgaataaactcyttwtwttcattcmaaramaaaaaaaaaaaaaaaaaaaaaaaaaaaaaaaaaaaaaaaaaaaaaaaa

SEQ ID NO: 707 - DNA, 6277 bp, Rattus norvegicus
ctggcatggacgtacacacccgctggaaagctccgcgcccgggcgccccgctgctgtcctcgccgctgctcctgctcctgctgctgctgtgggcgccgcctccgagccgcgcagctcagccaacagatcttctggagatgctagattttcacaatttgccctcaggcgtaacgaaaaccacaggtttctgtgccactcgacgatcttccaaagagccggatgttgcctaccgagtctctaaagatgcacagctcagcatgcccaccaagcagctgtaccctgagtctgactttcctgaggacttctccatcctgacaaccgtgaaagccaagaaaggcagtcaggccttcctggtctccgtttacaatgagcagggcatccagcagttgggactggagctgggccgctcccctgtcttcctctatgaggaccacacagggaagcccgggcctgaagagtatccactcttccctggcatcaacctgtccgatggcaagtggcaccgaatcgctatcagtgtatacaagaaaaatgtcaccttgatcctcgactgtaaaaagaagatcacgaagttcctcaaccgcggcgaccaccccataatagatgtcaacggtatcatcatgtttggctcccggattctggatgatgaaatatttgagggtgacatccaacagttgctcttcgtctccgaccaccgagctgcctatgattactgtgagcactacagccccgactgtgacacagcggtccctgacacacctcagtcacaggaccctaacccagatgaatattacccagaaggagagggtgagacctattactatgagtacccatattatgaagaccctgaagacccgggaaaggagcccgccccctctcagaagccagtggaagccgccagagaaaccacggaggttcctgaggagcagacccagcccccatccgaagcccctacagtgcctgagaccagtgacacggctggcaaggaggacaatccagggatcggggactacgactatgtgcccactgacgactactacactacatccccgtatgaagacttcggctatggcgagggcgtggagaaccccgaccagcccaccaaccctgactcaggggccgagatccccaccagcaccagtgttacctccaattcctccaatccggctccatctccagaggaagggaaggatgacctgggaggtgagttcaccgaggagaccatcaagaatctagatgaaaactactacgacccgtactttgacccggactccgactccaatgtctctccatcggagatagggccaggcatgcctgctaaccaggacaccatctatgaagggattggaggaccccgaggtgagaaagggcaaaagggagaaccagccatcattgagccgggaatgctgatagaggggccccctggccctgaaggccctgctggtcttccaggacctccaggaactacgggtcctactggccaaatgggtgaccctggagaaaggggtccccctgggcgcccaggtcttcctggggctgatggcttgccaggtccccccgggaccatgctcatgctgccgttccgttttggaggtggtggcgacgccggttctaagggccccatggtctctgcccaggaatcccaggcacaggctatccttcagcaagccaggttggcactaaggggaccagctggtccaatgggtctcaccgggagacctggccccatgggtcctcctgggagtggaggtttgaagggtgagccaggagacatgggacctcagggtcctcgaggtgtgcaaggtccacccggcccaacagggaagcctggaagacggggccgtgctgggagtgatggtgccagaggcatgcctggacaaacaggccccaagggtgaccgtggctttgatggtctggctgggttgccgggagagaaaggccatagaggtgaccctggtccttctggcccgccgggactcccaggagatgatggagaaaggggtgacgatggagaagttgggcccagggggctgcctggggagcctggaccacgtggtctgcttgggccaaaaggcccccctggcccacctggacctcctggtgtgacgggtatggatggccagcctggccccaaaggaaatgtgggtccccagggagagcctgggcccccaggacagcagggtaatcctggtgcccagggtcttcccggtccccagggtgccattggtcctccaggagaaaagggtcctttggggaaaccaggtctcccaggaatgcccggagctgatggacccccggggcaccctggcaaagaaggtcctccaggagagaaaggaggccagggtcctcccggcccccagggtcccattggctacccaggtccacgaggagtcaagggggcagatggcatccgagggctgaagggcaccaagggagagaagggtgaagacggcttccctgggtttaaaggcgacatgggaataaagggtgaccggggggagatcggcccacccggcccccgaggagaagatggtcctgaaggcccaaaaggtcgaggtggtcccaatggtgatcctggtcccctggggcccaccggggagaaggggaagctcggagtgccaggattaccagggtacccaggaagacaagggccaaagggttctattggattccctggcttcccgggcgccaacggagagaaaggtggcagggggacacctggaaagccaggaccacggggacagcgaggcccaacgggcccgaggggtgaacgaggcccacggggcatcactgggaagcctggccctaagggcaactcaggaggtgatggcccagccggccctcctggtgagcggggacccaatggaccccaaggccccaccggcttccctggacctaagggtcccccgggtccaccaggcaaggacgggctccccggacatcctgggcagagaggggagactggtttccaaggcaagactggccctccaggccctccaggagtggttggccctcagggtcccacaggcgagacgggtcccatgggggagcgtggccaccctggtcctccaggcccccctggtgaacagggcctcccaggtgctgctgggaaagaagggacgaagggtgacccaggtcctgctggcctccctgggaaggatggacctccaggattgcgtggattccctggggaccgagggctccccggccccgtgggagcactcggactgaaaggcagcgaaggcccccctggccccccaggtcctgcgggttctccaggggagagaggaccagctggtgctgctggacccattggaattccagggagacctgggcctcagggacctccggggcctgctggagagaaaggggttcctggagaggaaggtccgcaaggcccggctggccgagatggcctgcaaggtcccgtggggctccctggaccagccggccccgtgggtcctcctggagaagatggagataagggagagatcggagagcccgggcagaaagggagcaagggcgacaaaggcgagcagggtcctcctgggcctaccggtcctcaaggccccactgggcagccaggcccttcgggagcagatggtgaacctggccctcgtggacagcagggcctgtttgggcagaaaggagatgaaggttcaagaggtttcccaggaccgccagggccagtgggcttgcagggtttaccaggacctccaggagaaaagggtgagacaggagacgtgggccagatgggccctcctggtccaccaggcccccgaggaccctctggagctccaggagctgatgggccacagggtcctccaggagggattggcaaccctggtgcagtcggagaaaagggagagcctggcgaagctggagagcctggccttccaggagaaggaggtcccctgggacctaaaggagaaagaggggagaagggagaggctggcccctctggtgctgctggaccccctggacccaaaggcccacctggagatgatggccccaaaggcagccccggccccgtgggctttcctggagaccctgggccccctggagagccaggcccagcaggtcaagatggcccacctggtgacaaaggggatgatggagaacctgggcagacgggatccccaggcmckaskggtgaacctggtccatctgggcctccaggaaagagggswcsascgggccctgcaggccctgaaggcaggcagggggagaaaggagscamgggagaagctggcttagaaggccctcctgggaagactggscccattggtccccaaggggcccctgggaagyctkgycctgatggtcttcgtgggatccctggtcctgtgggtgagcaaggcctcccaggatccccaggccctgatggtccacccggccccatgggtcctccaggactccctggcctcaaaggagactccggtyccaaaggtgaaaagggccatccggkcctgattggactcatcggayctcckggcgaacaaggtgaaaaaggtgaccgaggactcccaggcccccagggctcatctgstcctmarksaswwyagskcattacarkwmmttctksyymkmttkgsmmwcctggtcccccaggcttgccgggccctccaggtcccaaaggtgctaaaggttcatcgggtcccactggcccgaagggcgaggcaggccatccaggactccctggtccacccgggcctccaggcgaggtcatccagcccctgccaatccaggcgtccaggactcggcggaacattgatgccagtcagctcctggatgatggggctggggagagctacgtggattatgcagatggcatggaagagatctttggttccctcaactccctgaagctggagattgagcagatgaagmggmcactgggmacacagcaraacccagcccgtamctgcaaggaccttcaactctgccatcctgatttcccagacggcgaatactgggtcgatcccaaccaagggtgctccagggactccttcaaagtctactgcaatttcacagctggagggwccacgtgcgtcttccctgacaaraagtctgagggarsyaraatsrcybsytggcccaaagarmasccwksywcctggtwyagtsartwcaagcgkggkwmmctgctctcctatgtggatgctgaaggcaaccctgtgggcgtggtacaaatgaccttcctgcggctgctgagtgcctctgcccagcagaacatcacctacaactgctaccagtccgtggcctggcaggatgccgccacaggcagctacgataaggctatccgcttcttgggctccaacgrtgaggaaatgycttatgrtmacrasscctacatccgtgccctggtggatggctgtgctacmaagaaaggctaccagaagacggtgctggagattgacacgccmaaagttgagcarktccccattgtggacatcatgttcaccgactttggtgaagcctcacagrmaykwggatytgaagtaggsccascttgcttcytaggctaggagctgctgagcccaccggtytccagagcaacctygtgacytcagcaccccacctgtgggcgtcctgtgcacggcccatcccggacagtgaacctttctcacccctgcctgcctgactcatstgtgcmtcggagcctccgtggcgttggaccccatgcccagasrgmacmrvgggrwwkwkyyktktyymmayggwgccgartcacatgacvtagccacamcacagcytcttgccacgmttcagctctccggataggttcatcgaaggtgttaatggaccgttggccgggagtggggcgggacagtatttgaaaatcactttttaaaaaaattcaacttgaagatatgtattccccctgaccttcaaaagatgttctgaggtggtyttgtaaaggtcrccaaagcctccatwwaaaaaaraaaaaawraaaaaaaamcaascskcmrcatatccactcagaggccaaatgtcattccacatgtgcctttccgatggattaaaggtgcttatgtttttgtgaraawwwwaarwaaawatttgtattgtattgttataaatgttaagtgtgcctggctttcagtcttgcatggaaacccagcctcaggsccatggggaaagcgggcagctgggacaaggcacccgcatgggcttacatccggctctcggtagagggcatctccttaaccccaaaccccacaagaatgtgcaataaattggaaattcgcccagtcagcaaaaaaaaaaaaaa

SEQ ID NO: 708 - DNA, 1791 bp, Rattus norvegicus
gagggtggggccggctcccgaagctgcccgcaccggctgcgcaagttcaaagactgctgcgagccgcccagctacccttgcgtgtgtgcacggacgccagcggccagccggggtttctgcgcctttcggcgatcaagccagtcagagggcctccgagttcctgagacgcaagactccgccactggccttctcttccccggctggagggaccactgctctttgaagatctggatgtgtatttttctcaagaggaatgtgtgagtctgcactcttcccagaagaccctcagcagagaagccccgttggagtcttttgaggatttgaacttgacaaggggaagaccggactgagaccagtcagaagttaagcctagagcctctagaacttgaagagctgtccctagaaacgtactccactgctgtaccccttgtccgctacttagagcagcctgaggaggatgttgaagtacatgaaaggaaaatgtcaggcggaactttgacttgcaagaccaagcttgtaaacctcttggttactattgacaaccaaactccattagaagagttatctcagtgtttaggagtcaaaacactttcagatattattgaagttccctgggaagaagccaaaaatgtgttccagtgtcctgactgtgaccaaagcttcagtgataatacataccttgttttgcatcagaaaattcattcaagagagagaaagtataaatgtggtacctgtgagaagaccttcagtcaccgaaccaacctgaagacacacaggcgaatccacaccggagagaagccttacaagtgtaccgagtgtgctgccagcttccgacagcagtcacacctgacccggcacatgaatagccatttaaaggagaaaccatacacatgtagtgtatgtgggagaggttttatgtggctccccggattggcagaacatcagaagagtcatactgatacggagtcttacgagagtgctgaccatgatcaggaaacaagtctggctttgctgaagaaagaggctcttcagacacaccatcccagcacgcacagtgtgtggggacctcggagcagccctcagagcctgctctccccgacaaagacaaccataaggagaatgctaaacactgcagcatcgatgatgaagacttcttttccttctccagattcaaaacccttacagtgtcttgattgtgacatgacttttccttgtttctcggagcttgtctctcaccaaaccatccacgacatggagaaaactcataagtgcaaaacatgtgcaaagacctttgctttagagtccgacctcgcgagtcacgagaagagccacagaagagaggagccctttaaatgtacagtgtgtgggaagagcttcagagtaaacgtgcagctcatcgctcataaacgaacccataggagaaacagcaagtaaatacaggcttttgctactgttgggctgctcggtgtctgtctgatggtaaactgctctgcctctgtgcagggccctgtgctaagcaagcactttacacacattccatggagtgtcgcagtattacttactactgattagatctgaggagataaatcagtgttaatacatagtgggcgaagccgggatttgaactcggtttctgatcaaattccatttatatgagccagagaaacatcaaactttaaaattcagtattcgactgctgggcatggtggcctacactttaagtcccaagcactcaggcagcagagacaggagggtttctatgatatagaggccagcctggtctctcgtgcc

SEQ ID NO: 709 - DNA, 2411 bp, Rattus norvegicus
ccgttgctgtcggtcaataaaatcgatagctggaacctgcctgtgttttaggcagcggtggtgcaggagcggcgccgccatcttccccgaaggcatcttccggtgcttctcacccaagttccagcaggagttccctgaataacggggcggtctgtgtctggccgcccggcccctcaggcagccgattcagatttcctcccggccgaaggccgggcttctaagtctcggggtacgcggtgcccggggcaaggccggggagcaggtccaatggcgccgccttcggccccgctgcttgagcaggcacccggagaggttggacctactcggagaaggggcaggagaccaagggccttgaagttcgcggatgtggccgtgtacttctcctcggaggagtgggggcgtctgcggcccgcgcagaggactctgtaccgggatgtgatgcgcgagacctacggcctcctgggcgcgctcggatgcgcaggtcccaaaccagctctcatcacctggttggaacgaaatactgatgattgggaacccgcagccctagatccgcaggagtaccggagatgggtaacattccagagaaaaaccaggaccaggcagaagaatgaagagaaggaagtattcccacctaaggatgtaccccgaaaggggaagcgagggcggaagcccagcaaaccccggctgattgccaggcagacatccggcggccccatctgccctgactgtggctgtaccttccctgacctccccgccctggagagccacaagtgcgcccagaatctgaagaaaccctacccctgcccggattgtgggcgccgcttttcctacccatccctgttggtcagtcacaggcgggcacactctggtgagtgcccttacgtttgtgaccagtgtggcaaacgtttttcccagaggaaaaacctgtctcagcaccaagtcatacacacaggagagaagccctaccactgccctgactgtggccgctgctttcsacggagscggtccttggccaatcaccggaccacgcacaccggtgagaagcctcatcagtgccctagttgcgggcgtcgcttcgcctatccatctctgctcgctatccaccaacggacacacacaggagagaagccctacacctgcctagaatgcagccgtcgtttccgccagcgcactgccctggtcatccaccagcgcatccacactggagagaagccttacccgtgtcctgactgtgagcggcgtttctcctcttcctctcgcctggttagccaccggcgtgtgcactctggggagcggccctatgcctgtgagcactgtgaagcccgcttctctcagcgcagcaccctgctccagcaccagcttttgcacacaggggagaaaccctacccctgcccagactgtggccgtgccttccgaaggagcggctccttggccatccatcgcagcacccacacggaagagaagctgcacgcctgcgatgactgtggccgccgctttgcctatccctcgctgctggccagtcatcggcgtgtgcactcaggagagcggccytatgcctgtgacctttgctccaaacgctttgcccagtggagccacttggctcagcaccagcttctgcacastggrgaaaascctttcccttvccttgagtrtggcaggtgctwccrccagaggtggtccctggctgtccacaagtgctgccccaacacccacaatggcagccctagaccacttataggagggcccaatcagaggagcagtgctctwtagcatgacaaagattatggaaagtcactttatgggggcgtgcaaaactcagaggagaagacctaaagccmtggccccctgcwccacaccctgaactccaccacactggctgccctatagcatgtstgaaacagttatcaggagacatgatgccatttgattaaagttttccgagctaamwwrwmwwaaaahaawrwrrrwrwrwwmttcccgcagtctcttttagggccttctttgtgtatacagattaccttcagtcaggagaatctcatttatagaggcagaatctcctgctctgcctctactccatatcatgtggaaaacctgagtttgggtccatatttgcaacacttctgccaagcgattggctatttctgaaaactgactggagtcactccctccttgtgggtggcgttcagttttggaaggctgcttattgcgttctccatggtaaaccctgtctacagtgcattcagtattctacccacaggagctcgtaggaaacctaatcactttattttgtgcccaggttgtgtgtgtgtgtggggggggggggggaggatgttccccctcttgtggttcagtgattcccccactgtagtcttctgagtaattggagctaccacatctggtcaatggttctt

SEQ ID NO: 710 - DNA, 2768 bp, Rattus norvegicus
ctgaccctccgtggccgtgagccgccgcggggctcatggaggccctgggagcagacatgggctctgtgacctttgaagatgtggctgtaaacttcactgtggaggaatgggctttactgggtccctcccaaaagaagttacacagagatgtgatggaggagaccttcaggaacctggctgccataggaaaaacacaagaagaccagaacatagatgatgaccatagatattctagaagaaatcaaagaaatggagttgtggaaagactgttggaacaccgcaaaggctgtgagtgtaaagcaatcttcagacagattccggacaccacaggaaacaggaaaacttctcacaggacagtgctttgtgaaaaccatgtgtacaaggacaacatgctcatcagtcacgcatctcttaatgtatctgtacctcttcagactgcacacaaacctcccgcctatgagctctgtggagagaacctgtatacatttggagaatgtgagaaagccttcatttatccagaatgccttctgaagcatgaagacagtgacagcagacagagatcctgtgagtttaaccagtgtgggaaaatcttcaaaagtagtgatcacattcaaatgcgtgttagtgatgaaactagggaggaaatgtgcataagtaagcagcatggcgatgcctttccttaccctgattttcttcagtatgttgaaaagatctacactgggaaaaaaccctatgcatgtaaacaatgtgggaaaaccttttcttttttgagcaacattagaagacatgaacgaactcacactggagagaagccgtacagatgcaatacatgtgataaggctttcacttgtttgactaactttcaagaacatgaaagaactcacactggagagaaaccctatttatgtacacaatgtggtaaagccttttcttttctgagtaacattcggagacacgaacgaacccacactggagagaagccgtacagatgtaatatctgtggtaaggctttcagttatttgacaaactttcaagaccacgagagaactcacactggagaaaagccttacgtgtgtacgcagtgtgggaaagctttcacttactactattcctttcagacacataaacgatgtcacaccggcgaaaagccttatgtatgcaagcaatgtgggaaagccttcagttattacaattccattcaaacacataagcgttgtcacaccggagagaagccctatgtatgtaagctgtgtgagaaagccttcactaccctcagttctcttcgatatcatgagaggattcacagtggcgagaagccccatgtatgtttgcaatgcgggaaaggtttcaattcttctagcaccctccgaattcatgagagaactcacactggagagaaaccctataaatgtaagcagtgtgggaaagtcttcagtgttgacagttccctccgatgccacgaaaggattcacagtggggagaagccctatgtatgtaagcagtgcggaaaagccttcactcgtcatacctcccttcggtgccacgaaaggattcactgtggggagaaaccctataaatgtaagcaatgtgggaaaggtttcatttcttccagtaactttcgaaaacatgagtggactcattctgragmkawryastrtgtatgtaaattgtgtggtaaagccttcacgggtcatagttcacttcgacgccacgaaagaattcacagtggagaaaagccctatgtatgtaagcactgtgggaaaggkttctcttctttgagtggctgtcagagacatgaacaaattcacactggtgagaaaccccatgtatgtaagagttgtgggaaagcctttactaatcccagtgccctccgaaaccatgaaaggattcacagtggtgaaaagccctgtatatgtgagcagtgcgggaagggtttcatttcttttagtaagkttagaatacatgaacggattcacactggagaaaaaccgtacaaatgtaagcaatgtggaaaagccttcactggtcacagwtcccttcgacgtcatgaaaggattcacagcggggagaaaccttttgtatgtaaacagtgtgggaaatccttttatactttaagtgattgtcaaagacatgaacaaattcacactggtgagaaacctttcatttgcaagcagtgtgggaaagcttttacccggtccagctcccttaaaatacatgagaagactcacagtagaagaaattcctaagtgtagaacacgtcattcttagcatgacagtgcgtagggcagagaaccagggccatgttgtctgtaggaatgcctctagtcatcttggtggtagtcacaaacataatagctcataccatagcgggaagttcccacatgatgtcaagagagacacataccttaaacggatgtatatagaagtcttcagttggccaacctctgagaaggtacccagtatcaaaagttgtttaacaaagttatcaaaacagttcacaaagctttatgaaaacccctgaagtaacagaattcattagtcctttttaagatcccagtgaataaacattaaatggtcagtaattcacaagataaatctctagaatgtttacttctaattttgtaaataaattttcaggtgacctaatctctgagcgtctttaagcaggaaggtgtggatttaatgggctgtgtctttacacatcatgtctattccttctcttcttgtgttggatacatagatgtatccctgatatgtttttagagtaa

SEQ ID NO: 711 - DNA, 1630 bp, Rattus norvegicus
cgggtgtctgagaatgcaaagtgccatgttcctggctgtccagcacgactgcgtacccatggacaagagcgcaggcaacggccccaaggtcgaggagaagcgggagaaaatgaagcggacactcttaaaagattggaagacccgtttgagctatttcttgcaaaactcctctactcctgggaagcccaaaactggcamgaaaagcaaacagcaaacttttatcaagccttctcctgaggaagcgctgctctgggcagaagcatttgatgaactgctggccagyaaatatgggctkgctgcattcagrgcgtttttaaagtccgagttctgtgaagaaaatattgaattctggttggcttgcgaagacttcaagaaamccaaatcaccacagaaactgtcctcaaaagcaaggaaaatatacaccgacttcatcgagaaggaagctcycaaagagataaacatagactttcaaacaaaaactstgattgcccaaaatatccaagaggctacaagtggytgcttcaccacagcgcagaagagggtgtacagcytgatggagaacaactcttatcctcgtttyttggaatcagaattttatcaggacttgtgtaaaaagccacagatcaccacggagccccaygctacatgagacagggagacccccaccgaggacattccattytgtctcccgagagcaaaggctgtaacctgccavrarraaaaarmmaamwgaccttgaattcagcctgagtgttaggaaaacatcgctcagaactattgattcaatgttgggtagtgaatcaggaagccagcaacctakgagagtctctgtgagaagtttcccttgctgtgtgaagagcagagggrrggaacagggttctgaatgggttcgtccytgtcaggaaagcagggtgtgagatgaaagatacaatggaatgttgttggagcatttaaaatcaataggtctgggattatgtggccttagctarctggctgtacacctttccctgaactagtccatgttmccacgtagtggttttagtycwagttttaatattttagtactaagtaacawtataatgtttactgtgtgcmagggwgttgactgacgttcttaggactacagatcattaatactattgtgtcaygtaksactgaaactgamaaagcgtgtttgcattgttaaatggtgtgtgtgatagagtgaatgctgtgccgtgctgtagaaccagtgtccgttccgagtgccaaaaactgtcttgcgggcagctaaactctgaagtggtttttkwwtwyttttgaataaatttattttgctaaawaawrwmmwwraamawwwrraarwmmavatgtggttctgttgttcgatttcagtaactggaaacatgtcasatataagagagaatgactttctagtaaagaggtatcagtgtgggttaattgttgtgcctgtccactgakaaatcgacagccctgagaagtgaagaatgattgcttccaggaagatgttctctttaatcctatagacatgatgtagtcttaagaaaatcagatcacattcctaggaccactcattgtgaaagtcaaatgtgttatttaataaaaraaaarraaaaammmvmwmrwrmmg

SEQ ID NO: 712 - DNA, 2192 bp, Rattus norvegicus
gcggcgaagctggaaacgatttcggctcgacattgtaagaacaggcttgtggctgtccacagaacactggggatccaaaccactgctagctaggtgaagcctcgtgcactcgaggcggagtgaggtctcgcggaagcgtctccgagagcggcgagggccgcgagagcaacaccaagcagcccggggcttgggctattctcactgatccgaacatctctcttcgctggtaggaagaagccattgctcctgtgttaccrtgggaattcaaggccttgccaaactaattgctgatgtggcccccagtgccatccgtgagaatgacatcaagagctactttggtcgcaaagtggccattgatgcctccatgagcatttaccagttcctgattgctgttcgtcagggtggggacgtactgcagaacgaggagggggagaccaccagccacctgatgggcatgttctaccgtaccatccgcatgatggagaatggcatcaagccggtgtatatctttgatggcaaaccaccacagctgaagtcggsssagctggccaaacgcagtgagcggcgtgcagaggccgagaagcagctgcagcaggctcaggaggcgggggcagaggaggaggtggaaaagttcaccaagcggcttgtgaaggtcaccaagcaacacaacgatgagtgcaaacacctgctgagcctcatgggcatcccataccttgatgcgcccagcgaggcagaggccagctgtgctgccctggcaaaggctggcaaagtctatgccgcagccacggaggacatggactgcctcacttttggcagccccgtgctaatgcgacacttaactgccagtgaggccaagaagctgcccatccaagagttccacctgagccgcgtcctgcaagagctgggtctgaaccaggagcagtttgtggatctgtgcatcctgctgggtagcgactactgtgagagtgtccgtggcattggacccaagcgggctgtggacctcatccagaagcacaagagcatcgaggagatcgtgaggcggctggatcccagcaagtaccctgttccggaaaactggctccacaaggaagcccggcagctcttcctggagccggaagtagtggacccagagtctgtggagctgaagtggagtgagccaaacgaagaagagttggtcaaatttatgtgcggtgaaaagcagttttctgaagagcggattcgtagtggggtcaaacggctgaataagagccgccaaggcagcacccagggacgcctagatgatttcttcaaggtgacaggctcacwskcctcagccaagcgcaaggagccagagcccaaggggcctgccaagaagaaagcaaagactggggsagcaggraagttcmgaaggggaaaataaatgtgtccttcccctccactgtcccttggccccaggacagtgttttgtaccctcagctagagcacatccctctcgccctgcgtcttgaggacaagttcattgcttcccagcgctgcccttcagagctttccctcgcttgaccctgtgycaggaagcccgtagctctgcttttcctcatttttagctcaggaaagatgtcaggctcaaaccacttctcaggttaatggaccctgtccgttgctctgtgcaactgctagcagtattttaagggrgaagataagscmgggagagagtaggaggtaatttcccasytgsccagctggtgggggacaggtgactagrgcgcggctggcgactgctctttytaatttcastgtgcshtggaakmcagccatcagtstgggattarctgatgagagasccgcaaaragaaacagaggagtytggcgacaacagakkyamdastgactggctgttttgtrgacttgctgtmtgrtgagcccagtagttgcgcaagggagtgaaaacacagtgtttaggtttaggtttgtagtgtttggttttgtgcctcccctctccagtgttgggaattgaacccagggcaaaggcattaagtgtaccmctgacctgtagctccaagtgatgttctgaggctccaagtgatgscctttytgaggcagtcaatttaattgaggttttggaagaaaaaacttgttcatgggctgtttctattttaaaagatgtgaagaaaaaaammawwaaaawwwtwaamgcrmaaaaaaaaaaaaawaaa

SEQ ID NO: 713 - DNA, 2124 bp, Rattus norvegicus
atgaggttaggaaagccccaaaaggggggtatttctcgaagtgccacccaaggaaaaacctatgagagcaggcgcaagacagcccgccagcgacagaaatggggggtggccattcgcttcgactcagggttaagtagacgtagaagaaacgtggatgagaagccttacaagtgtactaaatgttctaagagtttcagtcagagctccactctttttcagcacaagaagatccacactgggaagaaatcccataaatgtgccgattgtgggaaaagtttctttcagagttctaacctcattcagcatcggcggatccacacgggggaaaagccctataagtgcgacgagtgtggagagagatttaaacagagctccaaccttatccagcaccagaggattcacaccggggagaagccctattactgcgatgagtgtggccggtgctttagccagagttcccacctcattcagcaccagagaacccacaccggagaaaagccctaccagtgcgaggaatgtgacaagtgcttcagccagaactcccacctgaggcagcacatgaaggtgcaccaagaaaagaagtcgcataaaaggggtaaaaatgccagggcgaaaactcacccggtgtcctggaaacgtggtaaaggaaggaaggcagtggctgggctccgcaggtaaagggagccgcttcgggccttttcaaaaagaagaagtgaatctcgtagcggtgaaagcctctcccaagagggaggacactttacagtagatagagcacttagatactggtcctccctagcatggagatgtcaggagtttcatgacaatgggctgaaactctgagtctagccatcctcatttcctttcagaataaataagtaaatttatgtgacatggagcagaaaactgaaaaaaaagtttggtaagaatttaacatccttggcctcagttgaaatttcttccctacgttttgataaaaagcgtcatgttttcatgattcactggtgtgccaatgattactcttggttttaggaatttctgtatacaaaatcattaaagagaaggaatgagttttcaagttctaggaccgactatatttttaatgttttgtagttttttttaaccattagtatcagcattgattcagtatttgacataataaaatgcattcaagttcatagatttttgtattttttattagcgtatattgtatgaagtaatgagttcgttttccttaatgtgtacgatgtatctgtatgatgtgctttgattatatccattgctcttaccctcacctccacctcctggttctcttcttcctcccagagagttcccttcccacttgaattgttgaccctgggattctgtgaatgacagaaawtgtctttggttatttttccmcatctgctttactgtgtttactgtaatgttcyccagttctatccatttttcgccaaacaacaggattttggcttctttttttttttttttttwwytwwttyyaactaatawgttyktcatagtgtctgatgcyttaatgaaggggtraaaaggtcymmawrwrrmwwwwmwhhtgwtygtttyyttgwttaccatattcctyagagatttcaargaatccmamgtgagaaaytgcrgacctcctcctaagaccattacttgcratsctgatgccctgcytcttgctttcttgaaatgggaatggtttatgttgaatcatgccagtgscytctkggcgttcctttgttctcttgcaaacagggsctgcatgaataawctatgttmccaagaaagcctgacttacttctggctaaagaactacagtgtcataractgagctttgactgccgctgactgagwcagatgtgtgtctacaagttcctggagccctgttagaacttaactgttctttactttttagcagttgtttaagaagactagcggacatcctttttcgaatgctaagcctgagttcctagttaacccttagttcaagtttttgtttattgaatgctaatgttttctgatttttataatctcacttcttcctgtattaatgacaattatccyyaaaataaagattgagatwtttttgcstmvwdaaaaaaaaaaaaaaaaaaaaaaaaa

SEQ ID NO: 714 - DNA, 2255 bp, Rattus norvegicus
aggactactgccttcccgttgttccgatgctaacacactttatatttttgcacctagtccacaaagcagggaccggtgggtgaagaagttaaaagaagagataaagaacaacaataatatcatgattaaatatcatcctaaattttgggctgacggaagttaccagtgctgtagacaaacggaaaaactggcgcctggatgtgaaaagtacaatctttttgagagtagtataagaaagaccctgcctcctgcaccggaaataaagagaaggcctcctccaccaatccctccagaggaagaaaatactgaagaaatagttgtagcgatgtatgacttccaagcaacagaagcacatgacctcaggttagagagaggccaaaagtatatcatcctcgaaaagaatgacacccataggtggagagcaagagataagtatgggagtgaaggatatatcccaagtaattatgtcacaggaaagaagtccaacaacttagatcaatatgagtggtattgccgaaacaccaacagaagcaaagcagagcagctcctccggacagaagacaaggaagggggttttatggtgagagactccagtcaaccaggcttgtacacagtctccctttacacaaagttcgggggagaaggctcatcaggcttcaggcattatcacataaaggaaacagcaacatccccaaagaagtattacctggcaaaaaagcatgcttttgggtccattcctgagatcattgggtatcacaagcacaacgcagcaggacttgtcaccaggctgaggtacccggttagtacaaaggggaagaacgcgcccactactgctggcttcagctatgataagtgggagattaaccctcaagagctgacctttatgagggagttggggagtggactctttggagtggtgaggcttggcaagaggcgggcccagtacaaagtagccatcaaagctatccgggaaggcgccatgtgtgaagaggatttcatagaggaagctaaagtcatgatgaagctgacacaccccgagctggtacagctctacggcgtgtgcacccagcagaagcccatttacatcgttaccgagttcatggaacggggctgccttctgaatttcctccggcagagacaaggccatttcagcagagatgtcctgctgagcatgtgccaggatgtgtgtgaagggatggagtacctggagagaaacagcttcatccacagagacttggctgctagaaattgtctagtgaatgaagcaggagttgtcaaagtatctgatttcggaatggccaggtacgtcctggacgatcagtacacaagttcctctggtgccaagttccctgtgaagtggtgtcccccagaagtgtttaattacagccgctttagcagcaagtcagacgtctggtcattcggtgtgctaatgtggaagatattcacagaaggcaggatgccctttgagaagaacaccaattacgaagtggtaaccatggtyacksgaggtcaccgacttccccggccaaagttggcttccaaatatttgtatgaggtgatgctgaggtgctggcaagagagaccagagggaaggccttcgtttgaagacttgctacgtacgatagatgaactagtcgaatgcgaagaaacttttggaagataaacggcggcmccagtttccaaggcaagaggaagaaacggcgtgccattggaacragactcccttggtgcttgsgaatagagactgctctgctcacagtgtggaagctggaaagcgtccgctcctgatccagcctcagctaygtggctgctttgcaggatgcacagatggtctcttagagctggggacttgaagcactcattttgctcatcccttcaagagtttgagcaccagccatgcaccaggcactgtgcccaggcctcgggagatgagcatgggtctgtgctagctggcgctagtagaaagccagggtgttcgagatgagaaggagccatgccccaacattcttctgtgccctttggcttctaataaaatgggcctggggtgttgtctaccgccgagttytaggtaaagcaggaacccacctcgacaagtagtaatcctttgktttgaaaacatctctttccaaacctgttcttagtagtacgtttaaaaatttgtatactgtatatattgtaaatgcatataatatataaagttatatatttwtarrwaamawrarwwwawmwmwwwagctgaaaaaaaaaaaaaaaaa

SEQ ID NO: 715 - DNA, 3965 bp, Rattus norvegicus
cggcacgagcggggagccagagcgcgcgggcgccggcaggctggccgagctccgtttccacagtcgcccttgatggcggcgcaggcgaggcagccgtggcacggagcggcagccacgcgctagagagtccgctcggccccgcccggccggcccgcccgtgccctgccctgcccgcctctctcctcgcgccctccggcagacgtcggcgccccggctcagtccctcgccgcgtgcagctccgccsgctccgggccggcagggagggcactgatcttcgatcgcgaagatggctgctggctgcctgctggccttgactctgacacttttccaatcttggctgatcggcccctcgagcgaggagcccttcccttcgcccgtcactatcaagtcatgggtggataaaatgcaggaagaccttgtcacactggcaaagacagcaagtggagtgactcagcttgctgacatttatgaaaaataccaagatttgtatactgtggagccaaataatgcacgccaactggttgaaattgcagctagagacattgagaaacttctgagcaacagatctaaagccctggtgcgcctggctatggaagcagagaaagtccaagccgcccaccaatggagggaagattttgcaagcaacgaagttgtctactacaacgctaaagacgatcttgatcctgaaagaaatgagagtgagtcaggcagccaacggattaaacctgttttcatcgaagacgctaattttggacgccagatatcctatcaacatgcagcggtccatattcccacggacatctatgagggctcaaccatagtgttaaacgaactcaactggacamgwgscttagatgaagttttcaaaagaaatcgagatgaagaccctacattgctgtggcaagtgtttgcagccsaccgcctggcccgatattatccagcttctccgtgggtggataacagcagaactccaaacaagatcgatctctacgatgtacgcagaagaccatggtacatccagggagctgcatcccccaaagacatgctcattctggtggacgtgagtggaagtgtgagcggattgactcwgaaactcatccggacatctgtctctgagatgttagaaaccctttccgatgatgatttcgtgaatgtagcttcatttaacagcaatgctcaggatgtgagttgtttccagcacctggttcaagcgaatgtaaggaacaagaaggtgctgaaggatgcggtgaataacatcacagcamaggggataacagattacaagaaaggctttassttcgcgtttgaacagctacttaattataatgtttccagagccaattgtaatamgatcatcatgttattcacggatggaggagaagagagagcccaggagatatttgccaagtacaataaagacaaaaaagtccgcgtgtttacattttctgttggtcaacataattatgacagaggacctattcagtggatggcttgtgaaaacaaaggttattattatgagattccctctattggtgcaataagaatcaatactcaggaatatctagatgttctgggaagaccaatggttwtagccsgggacaaagcawagcaagtccagtggacaaatgtgtatttggatgctctggagctgggacttgtcattactggaactctaccggtcttcaacgtcactggccagtctgaaaataagactaacttgaagaaccagttgattcttggtgtgatgggcgttgatgtgtctctggaagatattaagagattgacaccacgttttacactgtgccccaacggttactattttgcaatcgatcctaatggttatgtcttactgcatccaaatcttcagccaaagaaccccaaatctcaggagccggtcacactggattttctcgatgctgagttagagaatgatattaaagtggagattcgaaataaaatgatagacggagaaagtggagaaaaaacattcagaactctggtcaaatctcaagatgagagatatattgacaaaggaaatcgaacatacacatggacacctgtcaatggcacagattacaggtatttggccttggtattgccaacctacagtttttactatataaaagccaaaatagaagagacaataactcaggccagatcaaaaaaggggaaaatgaaggattcagaaaccctgaagccagacaattttgaagaatctggctacactttcatagcaccaagggaatactgcaatgacctgaaaccttcagataataacactgaatttcttttaaatttcaatgaatttattgataggaaaactccaaacaacccttcctgtaatacagatttgattaatagaatcttgctggatgcgggttttacaaatgaacttgtccaaaattattggagtaaacagaaaaatatcaaaggagtgaaggcacgctttgtggtgactgatggcggaattacaagagtttaccccaaagaggctggagaaaactggcaagagaacccagagacgtatgaggacagcttctacaaacggagcctagataacgataactacgttttcactgcgccctacttcaacaaaaswsgasstggtgcctatgaatctggaattatggtaagcaaagctgtagaactgtacatccaaggaaaacttcttaagcctgcagttgtgggaattaaaattgacgtaaactcctggatagaaaattttaccaaaacttcaatcagggatccgtgtgctggtccagtttgtgactgcaaaagaaacagtgatgtaatggactgtgtcattctagatgatggtggatttcttctgatggccaatcatgatgattacactaatcagattggacgtttttttggagagattgacccgmgcatgatgagacacctggttaatatatcactttatgcattcaataaatcatatgactatcagtctgtgtgtgatccaggggcagcaccaaagcaaggagcaggacatcgctcagcctatgtgccatcaattacagacatactccagattggctggtgggccactgctgccgcctggtctattctccagcagctactcttgagtttgacatttccacggctccttgaggcagttgaaatggaagaggatgacttcacagcttccctgtctaagcagagctgcatcacagaacaractcagtacttcttcaagaacgatactaaatcattcagtggtttactggactgtggaaactgttccaggatctttcatgttgagaagcttatgaacaccaacctagtgttcataatggtggagagcaagggaacatgtccgtgtgacacgcggcygctcatgcaagcagaacagacttctgatggtccagatccttgcgacatggttaagcagcccagataccgaaaaggacctgatgtctgctttgataacaatgtgctggaggattataccgactgtggtggtgtttctggattaaacccttccttatggtctatctttggactccaatttatactcctttggctggtatctggcagcagacactatctatggtgaccctctaaacccatgatctgcaacttaattccatgccctgccaaaacatgagccctcagttacattaaaatagagccckttgaagaagctccacagarccttagctgggcctytaccctgatgtaactgtgaggcttagattcctgaccatcgctggctgcatgtcagggtgttggaaactgaaactcgtgtgaacatgctgcatcatctgtgtccaacatcaaagcaaagctstactcattctctgtgggaggtttgggagttcgctgttgcactgttggagattacgtggaaaaggctcccccacgcaggccttatgaaaagaagcagtcttgactttgacctagcatttcaacytgytgcagttttmccawgaararraarraaaaaaaaaaaaaaaaaa

SEQ ID NO: 716 - DNA, 2061 bp, Rattus norvegicus
ctctttcagactttcgasamgaskaggggtttagacacagagaagaaaggaagacaaataaaaggccaccatgaagaggaaagtggcmgtcattggggctggtgtcagtggtctggctgccatcaggagctgtctggaggagggactggagcccacgtgctttgagaggagtgatgacgttgggggcctgtggaaattttcagaccacacagaagagggcagggccagcatttaccaatcggtcttcaccaactcttccaaagaaatgatgtgttttccagacttcccctatcccgatgactttcctaacttcatgcataacagcaagctccaagaatatatcacttcatttgccacagaaaagaaccttctaaaatacatacagtttgagacacttgtaaccagaatcaataaatgtcctgatttctcaaccactggcaaatgggaagttaccactgaaaagaacagtaaaaaggaaacagctgtctttgatgctgtaatgatttgttctgggcaccatgtatatccccatctaccaaaagactcctttccaggtctgaaccgtttcaaaggcaaatgcttccacagcagggactataaggagccaggaacatggaaaggaaaacgagtcctggtgattggcctggggaactcaggttgtgacatcgctgcggaactcagtcacgtggctcagcaggtcatcataagctccagaagtggttcttgggtgatgagccgggtctggaatgatggctacccttgggacatggtggtgatcacacgatttcaaacatttctcaagaacaacttacccacagccatttctgactggtggtatatgaagcagatgaacgcaagattcaagcatgaaaactacgggttgatgcctttaaatggaacactcaggaaggagcctgtgttcaatgatgagcttccagcccgcatcctgtgtggcactgtgtccatcaagcctaatgtgaaggagttcacagagacctccgctgtgtttgaggatgggactgtgtttgagggcattgactgtgtcatcttcgccacaggctatggttatgcctaccccttcctggatgacagcatcatcaaaagcagaaacaatgaggtcaccttgtacaaaggcatcttccctcctcaactagagaaaccaaccatggcagtgattggccttgtccagtccctgggtgctgccatccccacaaccgacctgcaggcacgctgggcagcacaagtaataagaggaacttgcattttgccttctgtaaacgacatgatggwtgryakwgrygagaaaatggggaagaagcttaaatggtttggcaacagcaccaccattcagacagattacattgtttatatggatgaattggcctccttcatcggagcaaagcccaatatcctatggctgtttctcaaggaccccaggttggccatagaagtgttctttggcccttgcagcccytaccagttccggytggtaggcccagggaagtggtcaggagccaggaacgccatcctaacccagtgggaccggtcactgaagcctatgaagacccgtgwcgtcggtggtattcagaaacctkgcttgtattcccattttctcaggctcctggctgywcsagkgctcattgctttgttcctygtgttgatctgattgagattccctctagaatgtctgcgagtcaccgacaataaccagacaagaactttgctatttaaaattaaggttttcatacctctymmwwwmmwrwwmaarawmatttgccagaactctagacatttattagtaagcaagacaatgttttgctctggcmttgtaaataagtcacctttcagaatcatgctgacccgcagtgagcataagtcatttctcctaagttccactaacaatttgtaacargaatggtatttttatggacaacttgaatcatctcctgaaagkgttgaacagattccatttctcttttaaacratgcttaaaagatatacttcagatcyrgacagggaataaagtacagcatttagaawawraaaaaaaaaaaaaaaaaa

SEQ ID NO: 717 - DNA, 16525 bp, Rattus norvegicus
caatgctactgaattaccaattatgttcacaggtttatgtggtaaatcatctgttgcttcatgaagaaaagcagaccaaaaaaacagtcattccatttgagattgcatgtgtgtctgcaggaggagctcaccctgaaagccctcccagtttcttctccagcttctggaactctgcaagcaacaccagggaggtccagcatgttcccaccagcctgtatgatgtcaccacttaacaccctgctcttcccccttgggacacttttctatctctgcctgcctgattttattcctcatcttgcttcatctcatgacatcttggttgttgggacaaggtccttttatgaaactcaggctggcctgtaatttactatgtagcccagtctggcgtacaatccttctgcctcagccttctgagtgttaggattatagacataagacaccacaccatctgcataactcatccatccatccatccatccatccatccatccatccacccacctatgcatccttctgccagggtcctgctctgacgggtaggttcccggggaaggtagtgaagacatttaactctttcttgctattcagggaccaaaaactgatggcttctggccattaatgcctgttaatagccacaggggaaaagaaactttatttgtgttcttttctctttgactcagggacccctccctggccaggtgagagacttagagtttggtaactcttctgagtcagagagaaaaaaaaaagaagggtaaaggaagaaaggaaggaaggaaggaagaaagacagacagacagaaagaaataaagacagacagaaaggcgagaaagaaagaaagagagagagagaggaagaaagaaaggaaggaaggaaggaaggaaggaaggaaggaagacaggcacagagacaacacacatactagatgaagcaggaaaagggctctgccactgtttttgctgttcttagttttcatagcttctcaggacaaccaatcacatggttttggagcagtgttaatggctttccataagttcatagtaagtttaagcaatagttcatgtcacaggatgttagagcttaaggaattacagccgaactgtttacatgtctttccattaaaactagtacctaaccattcattatctgttttctagccccccaaaagatcactataagtttaaagcaataatttttatgtcataaattagcaaagttttgtcaagagacaaaccatctgccttatgtctcattattttgaagtcttgtatagataaactagcccatcatttatttttcatccttgtacctataataaattgcccattcccagttatgacctttagttactagatagtggcctcattcctacccggaaggaatgttttccttgagatcataaatgtgttccaaacctgcattcttttcctaatgacaattagcccatgtctgttaaggttcacagggctctgttgcagcttttgttctctagggggcttgagataacttgcatcaacttagcagttctataaaatcattttcatgagttatgaaatcatcagttcatctacacagcattactacatcaaagtacatcttcatattgattcttcaggaaatctacccaatagggtgggtcgatgcccagaaatcattaggctacgtgataccagcagtaagaggcgttcctgagatgaagtctctgaggactctgcatcccagagctcaccccttacagccatacagaatggctctagaaaactcactttcttggcatagcctttcctaaatggcttctgatgggcaacccagtcatgatagcgttacaaactatacaggatctaggatcacctaggagacaaacctcaatgcacacctatgagggattacttaaattggcttagcctcatgcctataggggattatcttgattagattgactgaagtgagaaagcccaccattggtggtaccatcccccaggttgggacactggctgcatacaaaagaggaaagggagctaagcccaagcaaacattcattgttctctgatttttcttttgctttgtttttatatttgttttatttatttatttatttatttatttatttatttatttatttatttatttatttatttatttgagacagtgtctcaataggtagacgtagctatcctggaactcattatatatattgagctatctgagaatgcacagagatccatctgcctctgcctctgcctcctgactgctgattggaagcatgcaccaccatgctcggctgtccctgcttctcagttgtggatacaatatgctcagttgctttaaactccttctgtcttgacttccccagcatgatgagctgtatctttaaagcataaactaaatagacccttccccgcttaggttgcttttgcccggctcttttattggcaacaggaaaagaaagacaatcggcagtactggtgtatcatgtaggggattattgtttcttataggagacctgcggaacaaaatcagtagccaacaaaaatgtgagcccacggctaaaggaggggaagcacaaacaaccttgaggggttgtgcaagacacccttgataacgtcacctccctggaggggcctgttgccttcatttctccaggcatgcaccctccaaatctttcaataataactgggctgcagctgacctgacgcaccccatgaacatcttcctggcacatctgagcaggagactccctggctcctggctcctggctcctggctcctggctcctggctcctggctcctggctcctggctcctggctcctggctcctggctcctggctccagaaaggatatggagatggaatatagtctccctgaacatttggaatggccagtgtttcctcagtgggaaaagagtctctgtgtccagaaatccaggaggtggggactgcagggagggctgctggcctgccaggagtgacaggaaggtgaaaagggtaggctaaatctcaccagatgttcgtcgctgctggtggagtagggaggctcctgtttctcccacagggcccatttctgggcttagaggagaacggttctatcttatgaaaggatgcagtttcatgaactcatttgctaaaagctcaagggtgccgtaagttttccggcactgaaggctttcatttactggggaaagcaagttcatttcctagcgcattggctcatgggagaagtgactgatgtgtctcatgactttgtggcaaagtggtgggcaatttctctgacttggctgacatgaaaaggtgaagcctgggattcaggaggtgttccttctggccatgctatttagccttggctgtgtgacccagagcaagaatctctctcctttccgggctttagttttgctcaactcgaagggcccgcagccccggtgttctgtatgtaggagaagctgagaactggtaggaggctgggctcaatcactgagcgtgaagaggtggcgttggttggtggaggcagaatgtggatgctccatcagtccctacctgccgtccgaggtgggagagagccggagtgactgaagaagcgggctcaacaacaagagaaatccctatcttctttcccctaagcatatgcatctgccaggaactaggaagaaagcagacagtgacaggttgtctgtgctgggtatctacaaatggggctggagtgagcggaaatgccagggaccgttgtccatttcacccctggccaggatccacacagccggacaacggctgctggtgtggcagactaacctgcaggttacaggcggacgctgaagggagtgagggaaagagacagagatctacaaaggacaacgcccactgactgtagaggacgggcaagcatggatgctgggtcctaagctgtgctgtgtgggggaaggaaaattgactcaagtcagaagccctaccctagttctgtgttcttccttcagaagcaaagcagcccctcttgcttacattctctttccagaattcttttctactacacagctggcaggacaagaatcatcttgtcctttcaaaagaaagaaattttcctaagagtataggcaaatagatttgaacctcattcctgctgactatgggattgtttttttaaaaaatcattttcagtaattctgatttacgaaaagagaacagcacttgcttagtcagcagtaaacaggaagccgttctctacgtcccaggctcaggtttactttggaaatcctgaataacaataacagctcaggaggcaggggagacaactccgtggcgcagaggcttgctgcagaggcttgctatgcaagcgtggtcactttagcttgacagccagtaatactgagagccaggagcataccagtaatcccagctttgggaaggcagagactgaaggatacctggcacttgctggctagccaatctaaccaaatccgtgagccccaggcttagtgagagaatctgtctcaaaaacaatgtgaagaatgatagaagacaacgcctgacaccagcctctggctgccacatgcacacctatacacatgcgtgtgcacccacccagatgaacacagacacacacatcgaccacccacaccagagtggatttagagcaagatgtgctcgttcagtctccaggtgaatctggtaggggacatcagggattattttataacacaggatgaagaatgctatcattagtatctgagaaacaaattttgctcaagtgcgaatgttgctttaaggtactagtgagggggcggtgaggcggctgagagggtccaagtgcttagggagcaagcattacagactgagttctatccccagaacccatgccaggaggagagaactggaccccaaaagtcgtcctctgacctccacacacacacatgcatggcacatgtgcactcatatgtcccctatgtgaacatataccagtaagcaaacatttttaaagatttccatgaggtttccattcacatgctgacttgtgtgagcctctgacagcccttggtacttggtgctcctgctcaggttttcttttcatgtgtgtgtgtgtgtgtgtgtgtggtttaccacttctggtttttaggagaagtctcacactattgcctggttcttgaactccctctgagacctgaccattcccctccgttgcactcagaggagttcgctttctttgcaaagccggtgttattaggctacagcccacgaatttgaattggaaaataaattaaatctctatttttcacaatttctcacttggttatttcagctcctcctggttatcttctacctaaacctaaagttatgctagcaatacctgtaatttcattcccgtgttacagctgatgcaggttccatgaaatgttgtatgtactcaagagtcctttaaaattagaccttaggtcgagtatcttatatagcatatattccaggcgtttaaatattttcatagtcttaataatgggctttcttttttgattccttacattttatgcatttggacctttctttcagagatggacgcacagatttcaccagtagacttttggggacacactcatcataaactggcccagagcatcagcacagcttcctgagacacgaggctgtagtcagggagtttttctaaggacacacacatgattattctacacctagggcggcatcatgttctcaccccttctgtgggagcctagagcctgtgggcactggcctcttcctcgggctcttccttgtctcggctacagggcatgtctgctcatgtctgtctccctagttccttacacagtgactggtccagagcagggtcctatgaaacacaaaatagacttatatccctgttcaaatgagcccagccactcctgtcagacgaggtgggcatacgggcacatgtacaaacaggctagaaacttaggggttattatagggatgtggggtacatgccgggggacttctaaaaattaattcaaaatagcctctggcgctttattttttttaagaatcttgctggcagtgtgagtccaatcctcctatccccccatggctggtccaacccagcttcatgtgatcacctctccctccctccacacagggctggctccccaggatatataaacctctttggatttcaggcttgagccagcagggccacccatccagacaccttgcagcagagccttctagaagaagcctcacccagccttcataccgatgccctcctgtgcacgctgctgcagctgcggtcccaagatgccagctctccagctgctgtttctggcctgcctggtatggggaatgggggccaggacagcacagttccgaaaggccaacgatcggagtggtcgatgccagtacaccttcactgtggccagccccagtgaatctagctgcccaagggaggaccaggccatgtcagccatccaggaccttcagagagatagcagcatccagcatgcagacctagagtccaccaaggcccgggtcagatccctggagagtctcctccaccagatgacctcaggcggagttactgggacccaggaggtccaggaggggctacaaggccagctgggtgccctgaggagagagcgggaccagctggagacccaaaccagggatctggaggtagcctataacaatctcctgagagacaaatcagctttggaggaagagaagaggcagctggaacaagagaataaagatttggccaggaggctagaaggcagcagccaggaggtagcaaggctgaggagaggccagtgtccctcaacccaccacccctctcaggacatgttgccaggctccagggaaggtaagaatgcggggtggaggggctgactgacccggaaggtagcaagtttgcgggtgacctattacaggactcccaggcttctccttttgttttgtcttttctctcagtaaactgaaagtccagtatgcagtagtttcattaaggaaagcgaagcaaacactttttcatgtttcctgcaagttgactcgttgtttaggccagtggatctgaactcttgtcctcagtcatgacaaaatgatcacagccacagccaaatgagaaacacggggccaagtgagaggtgcacatggtgaatagaaaatggcctgctgtgccctttgggtcattttcaagctttgcttaggaattgcaattcctgcaaaaatgacccccatttgagatgccaaatgatttgtgcaacaaaaactagtatattattattactactactattgttgttgttattgttattattaatgtatttggtttttcaagacagggtttctctgtgttgtcctgactgtcttgaaaccctctacagacttaactggccttgaactcaaaggtctgcctgcctctgcctctcaagtgccaggattaaaggtgtgcaccactatgcctggcggtgttctatttttgaatctcctaccttggtaaagaatgaggagacaatttctctctcgggtcccttggtgtgtggctttggaaattttgtcttttgttgctgaatcaaagactgtctgctttcaggtcaccagagagctctgcaacgagtggcccttatcacaaacggcctgtgtgtgtcctggttcctgctggagatgggtattcagtgcatgagagatgtgcacattgtttttgatggttagaaaacagtatttgtgccacttcttatgagtgttttgttcccaagtagtcacttgtttcatgaacaaacacattcagatgtgggataattagtcttggctacttaaaagtgttagtgacaagcaccacattaagaggaagggttgattttaaacaaaggagcctaagaaacctggtaaccaaacacgtgggcaccctccatcagctccccatgtcacagggtccatggtcaggtgacagttgcggaagggatgctgggatggttggggagaaaggcacctattagaggttgttagattagcattgcctttctcaggtaatggtgtatgtatgagggacatgtgtttaagtgcctagaaccgaacgaactgtcaggacaaatctatacagtttactgtctgtgaaaggaggagaggccacactaaacctgcagtaactggattccagtaaaccatgtaccacggggagcatgatctcaagtgtcctaccacctccttgggcttgaaaaacctgcaaaatggtgtgatggaataaattattttctaaaagagatctttttaaaaggtaagatctggaggactgtaaaggcttcagacacagagttgatgctgaactcggcaggaggcaagctatttccttctccgcctgttttcttatccgtaacgtgacaaagaatttactctgtaatcacttttgtgactacaactgaacaactgtataaagaactataacataggagtgatgtttcctgttactgaaactgaagttagaatacagaatcacagacttacctgatgttaagacatgatactgtactcttctacctccctgtgcccctcctgacgtctaccttccctgctggtgcctgcttctgcttttacagtgcgtgtcttctatcgcactctctcttcctcccgctaatgattacctaattaaatatttatatttaggctggaagaaatccaattctgaattggacgacagaggaaggttgaggtcccaagtggctaagggtagcaaggactaccctgctgcccagtggtggctaagatttcaactgggttctgagaggacagacagggaaataccatcactaaaagttatatgcaaatttcaggcttgaaggtacactttcaacaaaaaaatcctatgtaattgtctatatgtggaatgtatgtgtgcacgtaaaatcaaggcagtgctttatgccttgactgtctatggtcttttgactaaaagggcatgcttggccttagaaatttattggatgtattctctaaatttatttccattctcctttgcagctactctacttttgacataggtcaacagcccattataataaatttcaaatgtggaagtctttttctatagtggagaattatcagaccagggattgtatctggacatgaacagataactggagaggaaccttgaaagcatttagccatgggctcatttgtgaaaactgaggccagagagcctgctagtccatggccacccagtcgttaatatacaatgagaatcagaattctgccttttctaagaatgatgactttcatgacccctgctgtcttcaagcttaaaaatgtcagagcgccaggtggtggcaatgcatgtctttaactccagcactcagaaggcaaggggagtggatctcagtgagtttaaggtctgcaaagcaggttccagcacagccagggctacacagagagagaacttagttgggatggggtggtgggagaaaaagtcaaagagctaaagaaatacttggaataaagtctgtttccaggccccaggcttggagatcagtagtactctgaggggctagaactcaagtggcaagaactgaggtatgaaggtctggggtatgagtctcagtagataaaggcaaggctgaggaggtaggcttcttcctaccccaacacagttcaaacccagaccaccacattagctgtaattgtcacatagaaaaataatctcctcagaaccacagagatcactcatgtgtctgcatatggagttaagcatgtgcgcctacacaaatgtaaactgaagataaagtgcaacaacagtttccgctgagactgaggagttggacccagacatcagtgagggcctgtgggcaagtggtttgcatgggccctgaggccaggaaaagaaatgggacacagaggagagtgattcaaggaatgaaaataggaagggggaggggtgtcatcaaattgattgccacatgagaaacaaaagctcagctccacgaaacacttagtcctggatctgatagtccatctgtgagaaataagatgccaggctggtcctcacagaactcctgcacagtcagagagacttgggcaggaagctgatatgtggtcctggcagctgatacctctaagagtcaggttgccatagcaactgctggggaaagatggacaggaagggcttgagcaccagagtattcagcaggacgctgggctatcatgctggtagcagtgaaaggaggaagcaacctgggccatttctgacagagtggccatccaggcaatggactgcaattgtactgttttcttctcgttgagtcctaccattgtgtgcaaatgtcaggcagtccttaagaaccttggccacacttaacataaagtctctgtggcacactgcatctagagttaatacccaggacaactgacaaccaggctagcagctaaacttcctttttcctaagtattatttgtgtcaacatggaaataccatggcattgttttgacctattctttccacttaaataatactattttttcacagtaatagaaaatatttacaaacatctttatggtgacatctgcatgcaaattagttaataatttaactggtccatagtctacctccactacagtatgaggttaaagacagagcaggcagagtgtttcaacaaattttaacaatagaggaatgaatctcaataccattaaggataaaaataagcaaaaggcatgaaagcttcaaatatctgacataatacagacattactttccacaatcatttgctttccttctatattcaaaattgaatgatagtggtttaaaatagtccccaaaaaatcagagtttgggcatctctttatttgggattatttgatcatggtactatttaatcttcaaaaacaagctgacatgtttgtacagttcagaatgctagtgttcagagaggttgactcatttgtccaaagtcccacagctgggactcagtggaagcggaggaaactacaacttctggcttaggccggccccctttgcgcagactttgccagatggctgtcctctgggaatctgaatgctgccagcagctcctggctgagatgactgccaagccaccaggagtttcctaatccaaccaccacacctgccaagtggaaatgagtcaagtggtctctggaaggctttccgtgatcttctgcgttactctggctcttgtttaccacaaggaaagtgcatgaggtgtagttccctgtgaagagcaagggaagacaggaagagagccagagctgaggtctcctgttcccaaccttggtgggggtcatgttgggaccaggatgggaacacaatcccatgttcctgtgcatctgcctctctgacaggagagctgatgggcgactgtgctctgtggtatgttgagccatcatctagaacctgagctctgccccaggagggggtcattctacaagagtgcactggctctcctgaagcctctagccactctctgggcccaatgaagctgcagaagccactcagtccattaatccagggaagtttaccagaaggaattatagcttcttttactgacagatttttttttatacaacatattctgatttttccctccttgttcctgcctcccctctcatccagatccatctctttctttctctctttagagaacaaacaggcatctagagaatagtaataaaattaaaaaggtgaaataagattaaatcaggataggacaaaacacagaagggaaagagcccaagagaaggcacaagagatagatacagatacagaaacacatatcaggaatcccaaaacaccacacaattggaaggcataaaatatatgcaaaatatatgcaggggaaaaagccctgctgccatatttccagacaaggaaactcaagacaccattgagctcattctctgttggctgtgtctctactgctgggcatgtggcctatacttaagagtaatttgtttccccagtgacagtcccctggagaaaattatttagttgcaaatggtttttcaatgggagattctgcattagagttggggcaaggtccacttctcagctctaggactccatcggtgcagacccgtgcaggccctgtgcatgctgcttcatgtatatcggaactctgtgacttcatatatgagtcattcttcttgacttaatggaccttgttttcttggagtcctccatcctctctggctcttatactttttctgccctcttcttctacagggttcctgagccctgaaggaaggggtttgatggcgacaccccctttagggctgagtgttacaaggcctctcactctctgcatattgtctggctgtgggtcgctgtaattatttacatctgctgcaggaggaagcttctctgatgatggctgagtggccctgatctatgagtatagcagactgtctttaggagtcattttactgctcttttccttttgtagaatagtagtgcttagtttttccctgggtccctgggctatctggcctcaggttcttggtcactcaagtggagtcaggtatgggttctatctcatggagcaggttgtaaatcaaatattagttggttatttccacaagctttgtgctaccattggctggtagatcttacaggtaggacatcattgtaaatcaaagggtttgtagctgggttggtgtttatggttctcctttggtagagtgcctgagtaccttctggtaccaagaacactagccagtagggctttaagtaggcaccagtttaccttctccatgttcaataagttgtataggtgtaggacagttctgatgctaaggtcatgttccccagttggttcttgagctgtaataaggaaagccatgggccaaaggctaggcagaaggaataggaaggacttccaagtttgtggaggaaaagtagacagaaacaaggggagaggaggagagtttagcatcttgatgaagaaaagttgaccagccatgtgagatctcaaaatggagtggctacacaggctgctcctgcaggtgggtggtcagggatatttaacagggatgaaatttaactgagtaactaaagttaggggaggtgggaggagggcagggggggggagcagagataagattatcagcaagtacacacttttcaggcaggagatagcagtgcccagaagttgggccaagaaggcaagttgaaaatgaaccactgtgtgtcgccatagattctagggaagctgagtgggggctggcagtgtggccagatcctggggcaaaggcaggtagcaaaagctaaacacaacatataggcaatgcttttagcaataggataaccttcacaacagcctgagttgtttggaggtttatatgggaccccttttaccaacaacccattcccaatcgtaaagcttcattcggtgatgtgagatgtttccttggggctttctctcccctgatatttggtgatttcacttaaatcacctttgtatatgtatgctaataaccaagttctattccttgaagccatactttactaacaattttcctagtggaatttatataacataaaactctaattgtacttttactttgtactgaatattcaacccagtgttaaacagagagctgtgcaatgtattatttgtaaggtttttaattatgcaaatttcccaagagaaagaataacccctagtgaagccatcaccccagttccgatgagctaccaatgtgattcagtctgctacaccttccctttccaggttcccaaagcaaatttcagatatcaagtctttgggaacatatcaaacataccctccacagagtccattcttgtgccctttcttctccaagtatcattgatttctttcttcgaatacagtctctcagtggaatttggacacgttggctttccaggaactgaagtcagaactaacagaggttcctgcttcccaaatcttgaagaatcaatctggtcatcccaggagcaaagagggagacaaaggtatcaagttagatttctcccttttgagcttacctgcttacctgagcactctcgctcgtgctctctctccctctctctctctctctctctctctctctctctcactcacacacacacacacacacaccttgttatgtgttcagtttggatagaacaacggttaacctagaagagaagataggtgactcccaagaggcagagctggggagagggaagctgaaacctccctgctgccttttctagacccatgtacagggagccaaccttggagggctaggtatatactatagatcatctcagcatgtctgttatgaaagggatttttctgatctttgtctatcaaggaaaagtgaatttgtccctcaaaaaaatgtttcatggaatacagttgctgtttccagaaaataacattgactgtgttattagcaatccctgctgacactgaagagtatggaggggggccctgaagcatttacagtaggactccctgagagataagcatcactgttgtcttttgtgaggaaatcaaaggcacccgtgaatgaagagaaattgatcttaactccactaatctgaaattctcaactatctattattcatttcactaaaaaaccatagtatttatgacatttaaatggatgcatcaagtatgtggcccatcaagtaaaaatggaaaaactttgctatatagattatgcttacaatgagcggatttctctttttaaataaaataaacccagttttaaagccatgaagtacaaaggaatcaataccctctgtctctctctgctatgcttacggagagagtttggacagagtcaaagctctacacagccttctatctcccgggtgagagagattcactcgccccacagactcatgtttgctgtgctatagggaaagcacttgggcatgtctaatcacctctacattgacaacctcattaccccaaacctttatccccctatataaatgagaaagccaggagatggctcaggggttgaaagcattggctattcttccagaggacccaggtataattcccaacacccacatggcagctcactgctgtctgtaattccaattccagaggttcgaacaccctcacacagacatatgttcaggcaaaacaccaatgaacacaaaacaaaacaaaaacaaatgagaaagtcaaggctcccagagctaagtacctcactggttacatggtcagtgggtagcagggttcagatgtctatccactgtctccaccttctctgcttcactcctaccatcctgctgtctgtatttgggagacttatagatattaaatacatggcaactttttttttttaattcatcaggatgtggagtgctaatgtgggtaggagagccagtcaccctgaggacagctgagacaatcactggaaagtatggagtatggatgagagaccccaagcccactcacccctacacccaggagaccacttggaggattgacacggttggcacaggcatccgccaggtgtttgagtacagtcagataagccagttcgagcagggctatccttcaaaggtccatgtgctcccccaggcactggaaagcacaggtgctgtggtgtatgcagggagcctgtatttccagggtgctgagtccagaactgtgctcaggtatgaactgaacacagaaacagtgaaggcagagaaggaaattcctggagctggctaccatggacagttcccatacgcatggggtggctacacagacatcgacttagctgtggatgagagcggcctctgggtcatctatagcacagaggaaaccagaggagccatagtcctctccaaattgaacccagagaacctggmacwkgagagtacctgggagaccaacatccgtaagcagtctgtggctaatgcctttgttatctgtggcatcttgtacacggtgagcagctactcttcagtccatgcaaccatcaactttgcctatgacactaacactgggatcagcaagaccctgaccatcccattcaagaatcgctacaaatacagcagcatggtcgactacaaccccctggagaggaaactctttgcctgggacaacttcaacatggtcacctatgatatcaagctctcagagatgtgaggagcctctatccctaccagagaaggcagaaaaagggggaagttccaggctcccaggtgaagcagctgcaagaggaggcagccagatgctgggggcttctgcttctcaagattttgtttgtccaggtcaatacctcggggcttgtacagttgcatatattctgctctcttctgtcagctttcaaaggggtgttcayctkkwaaaaawmawatagtgtagcagtccagagaaaaactagaagtgttgtttcctcatgaaaccattgcttttgcaagctgtatggttactacaaaccttgagaggcagcaacagttctaccaagaggagggagataacggggagggggtgaccaccactcctgtggttagaactgctcctgcagtatttactccagtttctaaggctacagatatagcatgtacattaaaccctttgccctgtgaaataaagttatcttacacg

SEQ ID NO: 718 - DNA, 190 bp, Rattus norvegicus
  misc_feature (135)..(135): n is a, c, g, or t
  misc_feature (164)..(164): n is a, c, g, or t
cctgcggaaaggccttctccaggccctggctgctccagggccacgcccgcacccacactggtgagaagcctttctcctgctcccactgcaaccgtgcctttgccgaccgctccaacctacgtgcccacctccagncccactcggatgtgaagagataccagtgncaggcctgcgcccgaaccttcctccc

SEQ ID NO: 719 - DNA, 1389 bp, Rattus norvegicus
gggaccgaactctgaggccctgcctgaagtcatcctcgccwykaskgtcaccctgaaccaggcagtagagaaagcatggagccgatgccttcggccaccgacggcggggacaggtccgcgrcgccctcgggcctgwcggcttctcagcgtcgagcagagctgcggaggaggaagctgctcatgaactccgagcaacgcatcaaccggatcatgggctttcacaggcccgggagcggcgcggaagaaaatcaaacaaagtcaaagccactggacagtgacatactgaatcccctcggcgttccttccgtttccaagagggtagtgcttggcgattcagtcgatggaggagtaactgactaccagcccagtggtggcgccgacatcaggggagcccagctgggagacaaactggactcattcattaaagcaccagagtgcartagcaaggatggagttgagcttcggsagcggaacagaggtgacctgacggcagactcggccccgaggggttctcaccacggcctagaacagtacctctccagattcgaagaagcaatgaagttgcgcaaacagctgatcagcgagaagcccagccaggaagatggacggacgacggaagagtttgactcttttcgaatatttcgactggtggggtgcgccctgcttgctcttgttgtccgagcttttgtttgcaaatatttgtctatattcgctccatttcttactttgcaacttgcgtacatgggactgtacaaatattttcctaagggtgagaagaaggtaaagacgacagtgctgaccgccgcactgttgctgtccgggattccggctgaggtgataaaccggtccatggacacctatagcaagatgggtgaggtcttcacggacctctgcgtctacttcttcaccttcatattctgccacgaagtgcttgagtactggggtccggaagtgccctgaaacctgaggaacttggaagtttacgagtgaaarctacttcccttstacactgcagtgtctytaaagggggcaaatcggtttrtaacttcatcaaattskktggctytacagaaaacccagttaatcgtttcmccgatttaaaaggswygartktctatcaktycaggtbtgagttaccacatagggtaacaatggcattawcaatttktcttgtttaattarragtccagccttacrcctctcccstaatgtbtgwgatttgtgacccccccttacaggcccagghtggtacttgtargggaccagacggacaggtytcagctggcctaaarkcstaaaccttgtayttgtgtcattccttcctgagaartgaamccwtcctaaaaataaagcaaatggaactgrawwrwmwaawaaaaaaaaaaaaaa

SEQ ID NO: 720 - DNA, 1113 bp, Rattus norvegicus
atggcggcccctgacttgctggatcccaagtctgctgctcagaactccaaaccgaggctctcgttctccgcaaaacccaccgtgcttgcttcccgggtggagagtgactcggccattaatgttatgaaatggaagacggtctccacgattttcctggtggtcgtcctctacctgatcatcggagccacggtgttcaaggcgttggagcagcctcaggagatttctcagaggaccaccattgtgatccagaaacagaacttcatagcccagcatgcctgcgtcaactccaccgagctggatgaactcatccagcaaatagtgacggccataaatgcagggattatccccttaggaaacaactccaatcaagttagtcactgggacctcggaagctctttcttctttgccggcactgttatcacaaccataggatttggaaacatctccccacgaactgaaggtggaaaaatattctgtatcatctatgccttgctgggaattcccctctttggttttctactggctggggttggggatcagcttggaaccatatttggaaaaggaattgccaaagtggaggacacatttattaagtggaatgttagtcagaccaagattcgtatcatctcgaccatcatcttcatcctgtttggctgtgtcctcttcgtggctctccccgccgtcatattcaagcacatagaaggctggagtgccctggacgccatctactttgtggtcatcactctgaccaccattggatttggcgattatgtggcaggtgggtcggacattgaatatctggacttctacaagcccgttgtgtggttctggatcctcgttgggctggcctactttgcggctgttctgagcatgattggagactggctacgggtgatatctaagaagacgaaggaagaggtgggagagttcagagcgcatgccgctgagtggacagccaatgtcacagccgagttcaaggaaacaaggaggcggctgagtgtggagatctatgacaagttccagcgtgccacgtccgtgaagcggaagctctctgcagagctggcgggtaaccataaccaggaactgactccgtgtatgaggacctgtctgtga

SEQ ID NO: 721 - DNA, 2005 bp, Rattus norvegicus
ggatctctctccctctcagtgccatctgggcccctgatatcatcattaatgagtttgtggatgtcgaaaggtctcctgacctgccctatgtatacgtgaactcttccggaacgattagaaaccacaagcccatccaggtggtctccgcatgcagtttgcagacatacgctttcccctttgatatccagaactgcagtctcaccttcaatagcatcctgcatacagtggaagacatagacctgggcttcctgaggaaccaagaagacattgagaacgacgaaaggtcttttctgaatgacagcgagtggcagcttctttctgtgacctccacttaccacatccggcagaacagcgctggtgacttcgcacagattcggtttaatgtagtgattcgcagatgtccattggcctatgttgtgagcctcttgattcctagcatcttcctgatgctcgtggacctgggaagcttctacttgccccccaactgtcgtgccagaattgtgttcaagaccaatgtgctggtgggctatacagtcttcagggtcaacatgtctgatgaggtgccaagaagcgcagggtgcacatctctgattggggtcttctttaccgtctgcatggccctcttggttctcagtttatccaaatccatcttgttgatcaaattcctctatgaggagcggcacagtgagcaagaacggcctcttatgtgccttcgaggggactctgatgccaatgagtctagatagatgcagcctccacatgcccctcaacacggtccagctctgccacgttccctgggagttccctcggcgtagctgtgcctcctctaaccagccatggtgagagtcctcaactccagcaaagacttttccttaaagaataagaacaagtagttcctggttcattcagagtgtttccctctatcacacagagtccccggttcgtcaggagcaccaggtcccatcagatactctgaaggatttctggttccagctccaatccatcaacaactctctccgaactcgggatcaggtttaccagaaggaggtggagtggctcgccatcctgtgccactttgatcagctgctcttccgaatctaccttgccgtgctggggctctatactgtcaccttatgctctctctgggcactgtggagcaggatgtgacaatggagactgctggtctcgcttgatatgaggtcataacacgtagggaaagctgaacagtgtttggagagggtctgaagagggagggatgggtaggtttaaaagacgcctctgggatgctattgtctcttttcagtgactccagagacaagcatctcattggctattgactgaagcagtaaacatatatgttcctaataaagatgtataaacagaatagggtatgcagcaacaagcaagctttcactcttcgaaccatcagccactgcttacacttgggtttaagcaaggtctcttacagtccaggctaaccttgaacccctgacactcaaagcctctaccttccaagtgctaagactgcatgtattgtaccaccatgcccagcttcatttggtacagtctgcttcaacagtccatatgtcagtaagctgctcaaaccagcttaaatcctccaggatcaccaatacatggctgtcttcctcaattctgtctttgacctcacgttgccttatatccttttcccttggtagcctctttaatccctgtgtgtatatgaggaggaagagggacagacagatgacagacagacagacaaattatctaataggccacatgctyccagccccccatgctgagcctgcttctatcactgttcatttgggagacctcagacttcagtttgccttatttaaagcaagggctgctaatatttagtctctccacatcatagaattatgagggcaaaatcaagctcaatggcatcttgaaaagtacakarctmgatgatgaaaataaatgtgagacttgcctgctgtcamcararaaaaaaaaaaaaaaa

SEQ ID NO: 722 - DNA, 453 bp, Rattus norvegicus
gaagatgctgccaaaagacgacagatgcaggaagcagaagccatctatcagagcgggatgaagatcctgaacggcagcaccaggaagaaccaaaagagagaagcatatcggtaccttcagaaggcagcaggcatgaatcacaccaaagccctggagagagtgtcctatgctctcttgtttggtgattacctcacacagaatatccaggcagctaaagagatgtttgagaaactgactgaggaagggtctcccaaaggacaaactggtcttggctttctctacgcttctggacttggtgttaattcaagtcaggcgaaggctcttgtgtattacacttttggagctcttggaggcaacctgatagcacatatggttttgggttaccgctactgggctggcatcggagtcctccagagttgcgagtcggcactgacccattatcgtcttgaatcc

SEQ ID NO: 723 - DNA, 630 bp, Rattus norvegicus
catctctctggaaaagaacagttgaccttcctggcccctctgaattctgtgttcaaagatggtgtcccccgcattgacggccaaatgaagactttgcttctgaaccacatggtcaaagggcagttggcctccaaatatttgtactccggacagacagtggacacactgggtggcaaaaagcttcgagtttttgtttatcgaaatagcctctgcattgaaaacagctgcattgccgcccatgacaagaagggacggtatgggaccctgttcaccatggaccggatgctgacaccccctatggggactgttatggatgtcctgaagggggacaaccgttttagcatgctggtggccgccatccagtctgcaggcctgatggagaccctcaaccgggaaggggtctacactgttttcgctcccacgaacgaagcgttccaagccatgcctccagaagagctgaacaaactcttggcaaatgccaaggaacttaccaacatcctgaagtaccacattggggatgagatcctggttagcggaggcattggggctctggtgcggctgaagtctctccaaggggacaaactggaagtcagctcgaaaaacaatgtggtgagtgtcaataaggaacct

SEQ ID NO: 724 - DNA, 3531 bp, Rattus norvegicus
cacgaggttcattttcacgctcaacacaaatgtgcagtgtcgcaggtccaatctggagackgyaaksagtggctaaacacagtgcctaagagggctgggaccgcgagagcacagtaactcaggaggcgtacccagtccagccttcagccgcccctctccccttgcaccmtgcggcttctaaccccgcccctcccgagaccccgcccagatgccgacgtcagttrttatgtctygaytggggccgcagctgcagcgggtccagtgctccgggggcgacggccgtggcctgmrgaggcggcagggacggtggccgcggttggcgcgcgcatccgcacrgggctagtccccgcgcagctacgcaactgacaggaagcctccctggagagccgcgtcggggcctagtgttatttgctttttgctttttctcccccttcacgactgtggtctcgcgctcttcckcagcgggagccgccgcgacgccccctcgcgggccgccggcctgagaggcgccgcccgcgggaacctggagccgccgccgggcctgggcggccgcyggggcctgaagcctgggcgttcggcgcggcgctgcgacgaccgctccaacccgcgctgggcgcgccgggccccaggcctggcccagccgagcaccgcgccttccggactggggccacgtagtccggcgccaaccgccctccgctggcccgcagtctatcggagctgcctcctggtcacccctggtgggctcttgccctcttccagccttccgcrgttcgatgggtggagtgcttttgaacgtdmcctcttctccctttctcagctcttgaccgcaaggccagagccggsgscctcagccgcacgcacgcagcgatccacctgcctccccgcggggatggcccgcgggtgccgccaccgccgcgcgccctcgctgccctcgccgccctcgccaggctacgctcgtcgccccgcactcgaccccctcttcttgtccacggcgtcccggctcccggcgacgccaagagggcgaagatgtggctgaagctgtttttcttgctcctgtatttcctgrtcctgttcgtcctggccaggttttttgaggccattgtgtggtacgagactggcatctttgctactcagctggtggatccggtggcattgagcttcaagaagctgaagaccattctggagtgtcgagggctgggctactccggactacctgagaagaaagatgtacgggagctggtgragaagtcaggtgacttgatggaaggtgaactctattctgctctcaaggaagaagaagcatctgagtctgtttctagtaccaatttcagtggtgaaatgcatttctatgagcttgtagaagacmcaaaagatggcatctggctggttcaggtcatagcaaatgacagaagtcctttggtgggtaaaatccmctgggagaaaatggtaaaaaaagtgtcaagatttggaatacggacaggcactttcaactgttccagtgatcccaggtactgcagaaggagaggctgggtacgttccactctcatcatgtctgtcccacaaacaagcacatctaaagggaaagtcatgcttaaagagtacagtgggcgcaagattgaagtagaacacatttttaaatggataactgcccatgcagcttctcggatcaaaactatatataatgttgagcatttgaaagaagaatggaataaaagtgatcagtactgggtaaaaatatacctgtttgcaaaccttgaccaaccaccagctttcttctctgcattaagtataaaatttactggaagagttgagtttatttttgttaatgtggaaaattggaacaacaagagttatatgacagatattggtatttataacatgccgtcatacatacttagaactcctgaaggaatttacagatatggaaatcacacaggtgaatttatatcccttcaggccatggattcatttttacgctcattacaacctgaagtaaatgatctgtttgttttgagtttggttctagttaatcttatggcttggatggacttatttattacacaaggagcaaccatcaagcgatttgtggttctcataagcactttagggacatacaattccctattaattatttcttggctacctgtgttgggctttctacagctcccttacttagatagcttttatgaatatagtttaagattgctgcgatactctaatacaaccacactggcttcgtgggtaagggcagactggatgttttactcttcacacccagccctgtttctcagtacataccttggacatggtttgctaattgattactttgagaagaagagacggcgcagcaacaatgatgaagttaatgcgaataatttagagtggttatcaagtctgtgggactggtacaccagctacctcttccacccgattgcttcttttcagaactttcctgtagactctgattgggatgaagaccctgacttattcttggagcggttagctttccctgacctttggcttcaccctctgataccaactgattatattaaaaacttaccaatgtggcggtttaaatgtcttggggctcagtctgaagaagaaatgtcggagagttctcaagacactgaaaatgactcagatagtgacaacacggacacttttagtagtagtaaggatgtatttgaagataaacaaaatgttcacagttctccaggaagaacaagtcgctgcgatactgaggcttgttcatgtgccaataaatgtgtcagcagcccatgtgaaaggaagaggaggtcatatggctcacataatactaaggaagatatggagccggactggctaacttggcctgctggtacgctgcactgtactgaatgtgttgtttgccttgagaattttgagaatggatgtytgctgatggggttgccttgtggtcatgtgtttcaccagaattgcattgttatgtggttggctgggggccgacactgttgccctgtttgccgttggccttcatataagaaaaagcagccatatgcacagcaacagccgttgtcaaatgatgctccatcttgaccatgtgcaagttgtccaataagctttgagtatcttacagcttgcctttttaatgttagtcacaatgtttttgtggtttgaagtttagtttaatgttaskgcagwgrcaggaaatacacattatgctgatgttgatgacagaatttatttggatgccttgtgtgtcaattgaatgcatacyaaactgtwaawaaattatttacagcattgaaaattcagaagttaatggttttttgtaagcacaaaasargwatggtagaaatttatcttagcaagactttatgaggcaggatcaaatcctagtgggcctgagctgatttcttaccctaaatgttttttccctttttacaatctmtgtccagcacmtyttggttaaataatgtatgctmtgwgacatgaaattaaaacagatctrtaaaataaattattttaaargcaaaaaaaaaaaaaaaaaaa

SEQ ID NO: 725 - DNA, 3974 bp, Rattus norvegicus
catatgatagctccccctgcacacactgacctccttctcacgttcctgtctgtcagggaggaatactcactagagagtaaaaaatgaggacaatggaagttgtgttgcattttgtgctcgcaagtgcaacagatctcattgaatcgccaattgttgttaaagacattctgtcattgtgtttgaaggaccggtcctctgaggaagttgaagaatgtatgtagatgacacaagcctgggaagaagggtgtggtgagggaagtattagtcacacaggcgagctgaagagtcctcatcttgtggctactaactagcctactgagaaggaagaagctctcacatttatactgagaaatggcttttgggaaggagaaaatgatcatttatttccaaaccctgccatttccatacagtacgctatctatatcatagtcgtgggcctgttcaatgacaggaacaataatttctcatcttcctgctcaagaaataattttattgatcttcattttttttatttttcccatgattcagcaggtcaggaatgctcccttttcagtagcttcctgccgttcagcaaatcatccagagtgtgaaaatgcctttacaaagtaaaaaggaagtgcaaagccatttcagcaccacggagagtgcctctgctttttcttccaccactggcatttgcacttcggactgtgcaggaaacaaaaaagaaattttaaggtgtaaattagtagctaccaaaaaacttaccaatgggcaaaatcttagttttaaaattagacagtgtttcatacatgttcatgattgcaacgatttttttttcatctctgagatggaattatctatttctagctatttttaaatacctcaaccacaattcctacatgagtttagactgatacaatgttagtacagtaaagttcagtgttgtacattaaaagtcctaggacttatatccctaaggctttttctccagtgcagtgcagatgctcagtatatatatatacatacatacacacagttgtggcttttttggagttccatccacttcaccacagctctgtatgattttccaaagaggggataggttagtataaattactgtaaaacagatagtgagttattattgattggataagagagtgagatggattaaaagattcatatctatcttgactgatgccttttattaatatatatattaatacatatatatgtatgaattgagaaaaattggacatttgctaaatgttttttaagtgaatgaataaatgaataagtaaatgccttgtttataatttgtttcaaagttcgttgcacttcatactgcttaatctgactgtgaatgcagggaaaccattcctagtccaggttctcctgctctcttgcatcatgtccttaggtggaatttatatccctgtgcccaagtagccaacagttctctcctctatgttagagaggaaaggccaggccacccccctctactaggaaactttcctgagattatggactatgaagcccaactatgcaagaagggaaaacgagtagccctggccatatctgagctactaccacaatcagacgtgggctagtttgggaattccatcacctattaggaaggtcaggatctaccaagggcaaggccaaaggtgaaagagaaaacaagaaacagtaataacataagctttaaaccacttttccgacactcggcaactggggtgagttttcaggcccctgggccttctctttgccaatctatgcagtgacacatgtttgaagcaaagtatagcctcctgggtacagataagcacagcccagtccttagctcctaggaggcttcctggctaaggcaccactgcacttggactgtactatcgggctccaaactgggggggagcttccaggcaagagctgatttccatttcaaactgcattctggtactttgtactccagcaccattggccgatcaatatttaatgcttggagattctgactctgcaggagtcatgtcaggggaccctgagagccaatctgcttgagcgttctgcgtgataattattcatgggctcctgcctctcgctctttctctagcacggtcccactctgcagactcagtgccttactcagactcctctctcgctctctccgcggctacagctggacccttctccttcgcctttgccaccgctccgagcgtgcacatccctacaatggctaaaacagcaatggcctacaaggaaaaaatgaaggagckgtctrtgctgtcactratctgctcctgcttctacccggagcctcgyaacatcaacatytacacctacgatgacatggaggygaagcagatcaacaagcgtgcttccggccaggctttcgagctgatcttaaagcccccgtytcccatctcggaagctcsacgarctctagcttmtccaaagaagaaagacctgtctctggaggagatccagaaaaagctgvaggctgcagagskgcgaaggaagtctcaggaggsccargtgctgaagcarhtgscagmgaasarggagcacsagcgagaagtcctccagarggctttsgmgkasaatmrsmashkmagcaagatggcggasgagargctgatcctgaaaatggaacawattaaggaraaccgkgagsytaatctagctgctatcattgaacgtctgcaggaaaaggagaggcatgctgccgaggtsygcaggaacaaggaactgcaggttgaactgtctggctgaagcaatggcgggtatggcacgcccctyccatagtaaatccccctgcctatattataatggatcatgcgatatcagtatgggaaaatgkatgacatggkttaaaaagaactcattatgaaaaaaaaacagratcaaaaataaaataaatcaatgcggwmwmwwwrmaraawrwwttgctkgatgtttaaaaaagwmccttkgatcttattttgtaaatatttacatttttkktaaaaaatacargtattgsattatgcargktatttcataatcttacatgkcctgkaacargcattcgatgtkgkgtcttyccactyaaawgaatttgctagctctattcttttggaagcwcmsscatgtkgaamtmarkccctgccctttwywttccmcccaaaaatgaggkcaskagamarkctatkgkgstagaamcccmccattgcytagtgacctarawgactccatacyytycgrgcttggscaagamcacacmtaratygkggggaccgtgtgcccatkkgaacctscacatttctctgctcataatctgcttcctgcctagaaaccacaaagccaggctaaggaaatycaccagtyctagcactgasctctgsttctcgtgragkgtgtgcytcactcgtgtttgggktttagaaagagatgaatgggaagacagagctgtgctcaatgagggtagaagggcgaggctgaaccttctaatgggccgaacacaaacacaaagctagagggttcgagcggccatgacgttgttcttcatgaagtgggctttcttctcttatttcggttattttgatggaatgacttaatcaacatgtcgatggcttatctgtgggtgccatgggtgacgatgttcgttttaagcttttgcctgtagtacaagcacatgatgctactaaatattttkccmcttgsarrctgtgagctggttgttgcattaaacacrcaaacgmaatcmcaaacamwrwrramwwwtactcaagctggtctttcattcccagtgtagggaatcctgcctataaacaagagcaatcactccactgtgacgctgcgcagttagggggctaggcgggcattgtgcactgtagatcagagagaccagatcgtcctttgcagttgaagtgttttcccatcccaatccgaaggggggcgggaaatacatccgcggggaacctggtttgcagggaccccggctggaaaaatcggctccg

SEQ ID NO: 726 - DNA, 3016 bp, Rattus norvegicus
cggccgcggcgtgcarccgggcgattgtgaccggcggcggagccgggccggccgcgggcgctccctccgtgcggcccccctgagcgccccccctccccgggccgggagggaggcggggggcacccggggcccgccatgaacccgggcttcgacctgtcccgccggaacccgyaggaggacttcgagctgatccaacgcatakgcagcggcacctacggcgacgtctacaasgcacggaatgtcaacactgsagaattagccscaattaaagtgataaaattggraccassagaagacttcgcggttgtacagcrmgaaatcattatgatgaaagactgcaaacatgcraacatcgttgctyatktkkgaagttatctcakgcgagayraactttgkatttkcatggaattttgtggaggtggctcttwacaggacatctatcatgtaactggccccctttcagagctgcagattgcatacgttagcagggaaacactccagggattgtattaycttcacagtaaaggaaaaatgcacagagatataaagggcgctarcatcctactaacggataacggtcatgtgaaattagctgattttggagtttccgcacasataacagctacaattgccaaacggaagtccttcattggtaccccatattggatggccccagaagtcgcggctgttgagcggaaaggagggtacaatcagctgtgtgacctstgggctgtgggcatcactgccatcgagctggcrgagctccagccacccatgtktgacmttcacccaatgagggcattgtttctaatgacaaaaagcaatttccagcctcvtaaattaaaagataagttgaagtggtcaaatagtttccatcattttgtgaagatggctcttaccmwmrwkccaaaaaaaagacccactgcagaaaagctgctacagcatccctttgtcacacagcctctgacgaggtctttggcaatcgagttgctggacaaggtgaataatccagatcattccacataccacgactttgacgatgatgacccagagcctcttgttgctgtaccacatagaattccttcaactagtaggaatgtgagagaagaaaagacacgctcagagataaactttggtcaggtaaaatttgacccgcccttaaggaaggagacagagccgcatcatgaacttgatctacaattagagtacgggcaaggacaccaaagtaattactttttaggtggaaacaagagtcttctgaagtctgttgaagaggagctgcaccagcgaggacacgtggcacacttagaagatgacgaaggggacgatgacgactctaaacattcaaccttgaaagcaaaagtcccacctcctctgccaccaaagcctaaatccatctccataccacaggatacacattcttctgaggacagtaatcaaggcacaatcaagagatgtccctcatcagggagcccagcaaagccatcccacgttcctcctagaccaccaccccccaggctacccccgcagaagcctgctgttttaggcaatggggtgagctccttccagctcaatggtgaacgggacgggtcggtgcatcagcagcagagtgagcagagaggcacgaacctctccagaaaagagaagaaggacgtgccaaagccaattagtaatggccttcccccaacacctaaagtgcatatgggagcatgtttttcaaaggtttttaatggatgtcccttgaaaatccactgtgccacatcttggataaatccggacacgagagaccagtacttgatatttggcgctgaagagggcatttatacccttaatctcaatgaacttcatgaaacatcaatggaacagctgttcccccgcaggtgtacgtggttgtatgtaatgaacaactgcttactgtccgtatccggcaaagcctctcagctttattcccacaatttaccagggcttttcgattatgcaagacagatgcagaagttacctgtagccatcccagcacacaagctcccggatcgaatactgcccaggaaatttgctgtatcagcaaagattcctgaaaccaagtggtgtcagaagtgctgcgtggtgagaaatccttacacgggccataagtacctgtgcggagcacttcagactagcattgttctattagaatgggttgagccaatgcagaagtttatgttaattaagcacatagagtttccaatgccgtgtccgctccggatgttcgagatgctggtggtgccagagcaggagtaccctctggtctgtgttggcgtcagtagagggcgagacttcaaccaagtggtgcgatttgagaccgtcaatccaaattctacctcgtcatggttcacagagtcagataccccgcagacaaacgtcacccatgtgacccagctggagagagacaccatcctcgtgtgcttggattgttgtataaaaatagtgaatctccaaggaagattgaaatccagcagaaaattatcttcagagctcaccttcgatttccagatagaatccatagtttgtctacaagacagtgtgctagctttctggaaacacgggatgcaaggtagaagttttagatctaacgaggtaacacaagaaatttcagataacacaagaatcttcagacttcttggatctgacagggttgtggttttggaaagtagaccaactgacaacccaacagcaaatagcaatttatacatcctggcgggccacgaaaacagctactgacactggtgtcgtgacagtgacctgtggagacagggggccacagccgctgcaaccttagtggatccgcgaagctatgcgggcgctgcaggaacctggctctgttccttatagtttactgtggcgaggcagatgggagaaggctttgttttaagtggtatggatctgtttagcatattgaacacacaagtgcttcagccattgttatgtaatctttgtacatagaagcagtatttttctgtgagacttcatattgctgaag

SEQ ID NO: 727 - DNA, 1337 bp, Rattus norvegicus
gacaagagcataaccactgtcccttccagcacattccctgccccctcaaagccttcagccacctcagccactcaggagctagatagactgatggcatcgctctctgactttcgtgtccagaaccatcttccggcctcagggccacctcagcctccagcagtgagccccacccgtgagggatgcccatctccaccaggacagaccaacaagggcagtctggacaccatgctgggcctgctgcagtctgacctcagccgccgtggtgttcccactcaggccaagggcctctgtggctcctgcaataaacctattgctgggcaagtggttaccgccctgggtagagcctggcatccggagcacttcctttgcagaggttgttccacaaccctgggaggcagcagtttcttcgagaaggatggggctcccttttgccctgagtgctactttgagcgcttctccccacgatgtggcttctgcaaccaacccatccgacataaaatggtcaccgccttgggcacccactggcacccagaacatttctgctgtgtcagskgcggggagccttttggagaagagggtttccacgagcgggagggccgcccctactgccggcgggacttcctgcagctgttcgccccgcgctgccagggctgccaagrmcccattttggataactacatctcggcactcagcgcgctctggcacccagactgcttcgtgtgcagggaatgcctcgcgcccttctccggaggcagcttctttgagcacgagggtcgcccactgtgtgaaaaccatttccacgctcagcgtggttcgytgtgtgccacgtgtggcctccctgtgactggccgctgtgtatctgctctgggccgccgcttccacccagatcactttacctgcaccttctgcctacgcccactcaccaaaggctccttccaggagcgtgccagcaagccttactgccagccttrcktyctgaagctctttggctgacctcytcttgkgatcacagacctccaaaaccacgcctccaaaaacctgttctccctgaaaaagactgggccctccagatccctagctctggagctgcccaggcattcttgsctgtactyccacctycatycccactatggsmcgrssrctgkarrgtgctccaggtttgtcaagctcagcaagggccccactagctctcactttgacacgattctggttttmtaatctgacggattagaggccaagatgtcccwgttcacccatrgctcactgttctgtactttttttttytacaaacataaaaacacgctccmcawmwmammrwraaaaaaaaaaaaaaaaaa

SEQ ID NO: 728 - DNA, 768 bp, Rattus norvegicus
aactacccactgcgagacggcattgatgatgagtcctatgaagccatcttcaagccagtcatgtccaaagtaatggagatgtttcagcctagtgcagtggtcctacagtgcggctcagactccctgtctggggatcggctaggttgcttcaatctgaccatcaaaggacatgccaagtgtgtggagttcgtgaagagtttcaacttgccaatgctaatgttgggaggagatggctataccatccakarkgtcgctcggtgctggacttacgagacagctgtggccctggacacagagatccctaatgagctaccrtacaatgactactttgaatactttggmccagatttcaagcttcacatcagcccttcmaatatgactaaccagaacactaatgaatacctggagaaratcaagcagcggctctttgagaacttgagaatgctgccccatrcccctggggtccaaatgcaggccatcccwgaggatgccatcccagaagagagcggtgatgaggatgaggaagaccctgacaaacsaatttccatctgctcctctgacaaaygcattgcctgtgaggaggaattcyctgattctgatgaggagggagaaggaggtcgmragaactcttctaacttcaaaaaagccaaaagagtcaaaacaraarawraaaaaraaaaagatcccgaggagaaaaaagaagtcacagaagaggagaaaaccaaggaggagaagccagaagccaaaggggtcaaagaagaggtcaaa

SEQ ID NO: 729 - DNA, 1811 bp, Rattus norvegicus
  misc_feature (1771)..(1771): n is a, c, g, or t
cacgagggcgtcsggcggcgggcgggcggctgagtcggggcctggtcccccagcaccatggccaagaccgtggcgtatttctacgaccccgatgtgggcaacttccactacggagctggacacccgatgaaaccccatcgcctggcattgactcatagcctagtcctgcattatggtctctataagaagatgatcgtcttcaagccttaccaggcctcccagcatgacatgtgccgcttccattctgaggactacattgacttcctgcagagagtcagccccaccaatatgcagggtttcaccaagagccttaatgccttcaacgtgggtgacgactgccctgtgtttcccgggctcttcgagttctgctcccgctatacaggcgcatctctgcamgrggcrrcacagctaaacaayaagatctgtgatattgccatcaactgggctggtggtctacatcatgccaagaagtttgaggcctctggcttctgctatgtcaatgacatagtaattggtatcctggagctgctcaagtaccaccctcgggtgctgtacattgatattgacatccaccatggtgacggggttcaggaagccttctacctcactgaccgggtcatgactgtgtccttccacaaatatggaaattacttctttcctggaacaggtgatatgtatgaagttggagcagagagtggccgctactattgtctcaatgtgcccttacgggatggcattgatgaccagagttacaagcaccttttccagccggtcatcagccaggtggtggacttctatcagccgacstgcatcgtgctgcagtgtggcgctgactccctgggctgtgatcgattaggctgcttcaatctcagcattcgaggacatggggaatgtgttgaatatgtcaagagtttcaatatccctctcctggtgctgggaggtggtggttacaccgtccgaaatgttgcccggtgctggacatatgaaacatctctgctggtagaagaggccattagtgaggaacttccctatagtgaatacttcgagtactttgccccagatttcacgctccatccagatgtcagcacccgcatcgagaatcagaactcacgccagtatctagaccagatccgccagaccatctttgaaaacttgaagatgctgaaccatgcacccagtgtccagattcatgatgttccagcagatctcctgacctatgacaggactgacgaggccgatgctgaagagaggggtcctgaggagaactacagcaggccagaagcacccaatgaattctatgatggagaccatgacaatgacaaggaaagcgatgtggagatttaagagcagcatggatgccgtgtccccaagagttccttgtcacctctgtggtgggaaggaaagtattgctctcccaggtctgaactgggtatccccagggtgtttactaactctggtaacgggtttggaaaccacatctggttctagagtcaactaccccctttcctcaaactctcatatacccgatggacaggtctctggaacattatgggtaatgagccctagcagctgaccccagcccctcttccccttatttgttcctctgtccttccagcacagagactgttagagatgaaagtctggacggtactaaggtcccctctgacttccttctgggttctctactgcagttcttgcttccatgcaaggtgaacctgaggggaggaaggcatgccaaccggctttatgtccattttactgtttttgatcntaataaaccaattggtattttttgtaaaaaaaaaaaaaaa

SEQ ID NO: 730 - DNA, 817 bp, Rattus norvegicus
tttggttttactcaagagcaagtggcgtgcgtgtgcgaggttctgcagcaaggagggaacctggaacgcctgggcaggttcttgtggtcgttgcccgcctgcgatcacctgcacaagaacgagagcgtgctcaaggccaaggcggtggtcgccttccaccgcggcaacttccgcgagctctacaagatcctggagagccaccagttctcgcctcacaaccatcccaaattgcagcagttgtggctgaaagcgcactacgtggaggccgagaaacttcgcggccgacccctgggtgccgtgggcaaatatcgggtgcgccgaaaattcccgttgccgcgcaccatctgggatggcgaagagactagctactgttttaaggagaagtctcggggcgtgctgagggagtggtacgcgcacaacccttacccctcgccgcgggagaagcgggagctggccgaggctacgggcctcaccaccacccaggtcagcaactggtttaagaaccggaggcaaagagaccgggccgccgaggccaaggaaagggagaacaccgaaaacaataactcctcctccaacaagcagaatcaactctctcctctggaagggggcaagccgctcatgtccagctcagaagaggaattctcacctccccaaagtccagaccagaactcggtcctcctgctccagagcaatatgggccatgccaggagctcaaactattctcttccgggcctaacggcctcacagcccagccatggcctgcaggctcatcagcaccagctccaggactctctgctgggcccgctcacctccagtc

SEQ ID NO: 731 - DNA, 624 bp, Rattus norvegicus
atggtagccacttgccttcaggtggtgggcttcgtcactagcttcgtgggttggattggcatcatcgtcacaacgtccaccaatgactgggtggtgacctgcagctacaccatccccacctgccgcaaaatggacgaactgggctccaaggggctgtgggccgactgcgtcatggccactggtctcyaccactgcaagcccctggtggacatcctcatcctccctggttacgygcaggcttgtagagccctcatgattgctgcctcagttctgggcctgccsgscatcttgctgctgttaacagttctcccctgtatccgaatgggccacgagcctggagtggccaagtacaggcgagcccagctggctggggtgctccttattctgctggctctctgcgccattgtcgccaccatctggtttcctgtatgcgcccaccgcgagatcaccatcgtgagctttggctactcgctgtatgcgggctggatcggtgctgtgatgtgcctggtgggtggctgtgtcatcgtctgctgctccggggatgcacagtcgtttggagaaaaccgtttctattactcttctggttccagctcgccaacgcatgccaagagtgcccatgtctaa

SEQ ID NO: 732 - DNA, 2135 bp, Rattus norvegicus
ttttctccgagttttckgaactctggctcatgatcgggcttactggatacgagatcctggaggaccgtaccctgatytccatctacctctgactttgagcctttctaacccggggctcacrctgccaacacccgggccacctggtccgatcgtcttacttcattcaccagcgttgccaattgctgccctgtccccagccccaatgggggagtgagagaggccactgccggccggacatgggtctccccatcgtgcctggcctgctgctgtcactggtgctcctggctctgctgatggggatacacccrtcaggggtcaccggactggttccttctcttggtgaccgggagaagagggataatttgtgtccccagggaaagtatgcccatccaaagaataattccatctgctgcaccaagtgccacaaaggaacctacttggtgagtgactgtccaagcccagggcaggaaacagtctgcgaggtgtgtgataaaggcacctttacagcttcgcagaaccacgtcagacagtgtctcagttgcaagacatgtcggaaagaaatgttccaggtggagatttctccttgcaaagctgacatggacaccgtgtgtggctgcaagaagaaccaattccagcgctacctgagtgagacgcatttccagtgtgtggactgcagcccctgcttcaatggcaccgtgacaatcccctgtaaggagaaacagaacaccgtgtgtaactgccacgcaggattctttctaagcggaaatgagtgcaccccttgcagccactgcaagaaaaatcaggaatgtatgaagctgtgcctacctccagttgcaaatgtcacaaacccccaggactcaggtactgccgtgctgttgcctctggttatcttcctaggtctttgccttttattctttatctgcrtcagtctactgtgccgatatccccagtggaggcccagggtctactccatcatttgtagggattcagctcctgtcaaagaggtggagggtgaaggaattgttactaagcccctaactccagcctctatcccagccttcagccccaaccccggcttcaaccccactctgggcttcagcaccaccccacgcttcagtcmtcctgtctccagtacccccatcagccccgtcttcggtcctagtaactggcacaacttcgtgccacctgtaagagaggtggtcccaacccagggtgctgaccctctcctctacggatccctcaaccctgtgccaatccccgcccctgttcggaaatgggaagacgtcgtcgcggcccagccacaacggcttgacactgcagaccctgcgatgctgtatgctgtggtggatggcgtgcctccgacacgctggaaggagttcatgcggctcctggggctgagcgagcacgagatcgagcggctggagctgcagaacgggcgttgcctccgcgaggctcattacagcatgctggaagcctggcggcgccgcacaccgcgacacgaggccacgctggacgtagtgggccgcgtgctttgcgacatgaacctgcgtggctgcctggagaacatccgcgagactctagaaagccctgcccactcgtccacgacccacctcccgcgataaggccacacccccacctcaggaacgggactcgaaggaccatcctgctagatgccctgcttccctgtgaacctcctctttggtcctctagggggcaggctcgatytggcagccacttccttggtgctaccgacttggtgtacatagcttttcccasctgccgaggacagcctgtgccasccacttgtgcatggcagggaagtgtsccatytgctcccagacagctgagggtgccaaaagccaggagaggtgwttgtggagaaaaagcacaatctatctgatacccacttgkgatgcaaggacccaaacaaagcttbtcagggcctcctcagttgatttctgggcccytttcacagtagataaaacagtckttgtattgattatatcacamtaatggatgaacggytgaactccbtaaggtaggggcaagcacagaacagtggggtctccagctggagcccccgactcttgtaaatacactaaaaatctaaargtgmmwaaaaaaaaaaaaaaaaa

SEQ ID NO: 733 - DNA, 3986 bp, Rattus norvegicus
  misc_feature (3371)..(3371): n is a, c, g, or t
  misc_feature (3888)..(3889): n is a, c, g, or t
  misc_feature (3901)..(3901): n is a, c, g, or t
  misc_feature (3911)..(3911): n is a, c, g, or t
  misc_feature (3937)..(3937): n is a, c, g, or t
gtggggcgggctgaaagcagctgaagcggcggccgagtcgtaggctccgacataggggcggcagctgagcggtagcggaccggctggcgggctacgaaargmsgmgggatggtggactatcacgcsgcgaaccaggcgtaccagtacggcccaagcagcggcggcaatggacacgggcggcggcggaggcatgggcgactacatgcgcccaggaggagactgggaccgggacctgctgttggacccggcctgggagaagcagcagcgcaagaccttcacagcctggtgcaactcccatctgcggaaggctggcactcagatcgagaacatcgatgaggacttccgggatggcttaaacttcatgcttctgctggaggtcatttcaggggagcggttgcctaagccagagcgggggaagatgcgagtgcacaagatcaacaatgtaaacaaagccctggacttcatcgccagcaagggagtcaagctggtgtccattggggcagaagagatcgtggatggcaatgcaaagatgaccctgggaatgatctggaccatcatcctcaggttcgccatccaagacatctctgtggaagagacctctgccaaggaaggactcctcctctggtgccagagaaagacagccccgtataaaaacgtcaacgtccagaacttccatatcagckgsaasgatggtctggccttcaacgcgctcatccaccggcacagacctgagctgattgagtatgacaaactgaggaaggatgatccagtcaccaacctaaacaatgcatttgaagtggctgagaaataccttgatatccccaagatgttggatgctgargacatcgtgaacacagsccggcccgacgagaaggccataatgacatatgtgtccagcttytaccatgccttttcaggvgcscagaaggcgagactgsygccaaccggcatctkbaaggtgctggytgtgaaccaggaaaatgmgcacctgatggmagaytacgarcgsctggcagtggatcttctagagtggatccggcgcaccatcccctggctggaagaccgtgtgcctcagaagaccatccaggagatgcagcagaagctggaggacttccgagactatasgcgtgtgcacaagccscccaaggtrcaggagaagtgtcagctggagatcaacttcaacaccctgcagaccaagctgcggstsagcaaccggcctgccttcatgccctccgagggcaggatggtctcggacatcaacaatgggtggcarcayctggagcaggctgagaagggctatgaagaatggctsytgaatgaaatccskaggctggaacgrctgaycaacctggcagagaartyccggcagaaggcttccatccaygargsctggaccgatgggaaggaggccatkctgmagcaccgggactaygagacagccaccctgtcagacatcaaagctctgatccsaaaacatgaggcctttgagagtgacctggckgcgcaccaggaccgcgtggagcagatcgcggctattgcccaggagctcaacgarctggactactatgactcccacaacgtcaacacacggtgccagaagatctgtgaccagtgggataacctgggctctctgacmcacagtcgcagggaagccttggagaaaacagagaaacagctggagaccatcgaccagctacacttggagtatgcyaagcgggccgcgcccttcaacaactggatggagagtgccatggaggacctgcaggacatgttcatcgtccacaccatcgaggagatcgagggcctgatctcagcccaygaccagttcaagtccaccctgccagatgccgacagggagcgtgaggccatcctggccatccacaargaggcccaaaggatcgctgagagcaatcacatcaagctgtcgggcagcaacccctacaccagcgttacaccccagatcatcaactccaaatgggagaaggtgcagcagctggtgccgaagcgggaccacgcactcctggaagagcagagcaagcagcaatccaatgagcaccttcgccgacagtttgccagccaagccaatatggtggggccctggatccagaccaagatggaggagattgggcgcatctccatcgagatgaacgggactctggaagaccagctgagtcacttgaagcagtacgagcgcagcattgtggactacaagcccaacctggacttgctggagcagcagcaccagctcatccaggaggccctcatcttcgacaacaagcacaccaactacacaatggagcacctccgtgtgggctgggagcagctgctcaccaccattgcccgcaccatcaacgaggtagagaatcagatcctcacccgagatgccaagggcatcagccaggagcaaatgcaggagttcagagcctccttcaaccactttgacaaggaccatggcggggcactggggcctgaggagttcaagggctgcctcatcagcctgggctacgacgtggagaatgaccggcagggtgatgctgagttcaascggmkcatragtgtggtcgaccccaaccatagtggcctcgtgaccttccaagccttcattgacttcatgtcaarggagaccacagacacagacaccgccgatcaggtcatcgsctccttcaaggtcctggccggggacaagaacttcatcactgytgaggaacttcggaragagctgccccctgaccaggctgagtaytgcatcgcccgcatggcsscctaccagggccctgatgctgctccaggcgcccttgactacaagtccttctctacagccctctatggggagagcgacctgtgagccctcagccaccctgaacagactcccttggcctccggaggrhtgaggagccytgccccaccytgactcagkmwckakgcwaagagctctktgtggtytctagggkvwsaggcagggaggggctaggcaggcctcttttctcagtctgryagggragatgrrggcwtgtcgatcagcgcttctggtctgctaaatatatatgttgtattgtgggttcttagcmtatatgaaagraacaacrracamvwrarycmytmwrrvmmmmararasawmkwwhwaaammcagstymmmtstgcccmtgaggccagccccktcaaagcctctcacatmcaggccaaagccccatgtgccttgthcaggaaccgcmtgccmtaagaagtccagcagagggcacccagctyccstggaccagattvtagtggctcctcccacctychtgccctgtgtcacaccaggagcagaggacctgccataacccctctctgcctccacagtggstgmtggggcaatcgmyyyykyyswyntggcmktgtttcacmtgggctmtgagtctcagattttytaaggrccawarccaacaaaacmcamagaayggmacmgaaacaaacmaacmaaawaatcmttwrmrrmamrarrarrraaagaaaaaaaaaagcttaaaaaamkscwmkadwwwwttwwwwyyttyywgagaattactatttmctttattaamttmcggakwkrytatataawtatatatccatmtagctgcawatmtctgccacctctcycactmtsatamtgaaracatakctratyygctgccytcccasccccmtcytgattttcccmwyatgrcgstgggcagggktmwacggkgacctcctgaggtggaggtggscgmtggcytgcctgcmtggtcgttaatgggtttctctcmayccasccccttgrgwtyattctgattgattwwwawwtwmwtgshtyvtggataaaccaccctctggggatgggagaataaaacmagkaatattwwtwrrarrramwmdrvwvdmrdvnnvkccstgcgtcnccgtcattcnccagggagcttgcagtgctcactggnccagtgcctgtgtgtggtttatgggcctccatgcagggactgacatgca

SEQ ID NO: 734 - DNA, 1932 bp, Rattus norvegicus
atgtaccgggacccggaggcggccagcccaggggcacccacccgcgatgtcctgctggtctctgcaatcatcaccgtcagccttagcgtcactatcgtcctctgcggcctgtgccactggtgtcagcgcaaactgggcaaacgctacaagaactccttggagacggtgggcacgccagactcggggcgtgggcgcggtgagaagaaagccatcaatggcacactcctgtcaggcgccaaagtggccactgcggcggcggggctggcggtggagcgggaaggccggctcggggagaagccggcgccggtgccaccacccggagaggacgccttgagaagcggcggggctgcccccagcgagccgggcagcagtggcaaggcggggagaggccgctggcggatggtgcagagccacctggccgcagggaagctcaacttgtccaatttcgaggactccaccctgtccacggccactacccttgagtctatccccagctccgcgggagagccgaaatgccagcgaccccgcacactgatgcggcagcagagcctgcaacagccgctgagccagaaccagcggggccgacagcccagtcagcccaccaccagccagagcctgggccagctgcaggcccacgcggcctcggcaccgggctccaacccccgggcctatggtcgaggtcaggctcggcagggcacctcggccggctccaagtaccgggcagctgggggccgcagccgctccaacccaggcagctgggaccacgtggtggggcagattcgaaaccgaggcttggacatgaaatccttcctggaaggccggatggtggtgctatccctggtattagggctttcggaacaggatgactttgccaatatccctgacctgcaaaacccaggaacccagcagaaccagaacgctcagggggacaagaggttgcctgcaggagggaaggctgtgaatacagccccagtgcccggccagacgccacatgatgagtctgaccgcagaacggagccccgttcctctgtctcggacctcgtcaactcccttaccagcgagatgctcatgctctccccaggctccgaggaggatgaggcccatgagggctgcagccgagagaacctgggccgaatccagttcagtgttggctacaacttccaggagtccacactcaccgtgaaagtcatgaaggcccaggagctgccggccaaggacttcagtggcactagtgacccctttgtcaagatctacctactacccgacaagaagcacaaactggagaccaaggtgaaacggaagaatctaaacccgcactggaacgagacctttctatttgaagggtttccctatgagaaagtggtacagaggatcctctacctccaggtcctggattatgaccgtttcagccgcaatgaccccattggggaggtgtccatccctctcaacaaggtggacctgacccagatgcagaccttctggaaggatctgaagccatgcagcgatgggagtgggagccgaggggagctgctcttgtctctctgctacaacccctctgccaactccatcatcgtgaacatcatcaaagctcgcaacctcaaagccatggacatcgggggcacatcagacccctatgtgaaggtgtggctgatgtataaagacaagcgggtagagaaaaagaagacggtgacaaagaagaggaacctgaatcccatcttcaatgagtctttcgcctttgacatacccacggagaagctgagggagaccaccatcatcatcactgtcatggacaaagacaagctcagccgcaatgacgtcattggcaagatctacctgtcctggaagagcggaccaggcgaggtgaagcactggaaagacatgatcgctcgtccccggcagcctgtggcccagtggcaccagctgaaagcctga

SEQ ID NO: 735 - DNA, 652 bp, Rattus norvegicus
ctcctggaggtcattgacacgagaacacagattcttgctgcctcttacgaacttcataagttttaccatgatgccaaggagatctttggccgcatccaggacaaacacaagaaactccctgaggagcttggaagagatcagaacaccgtggagactttacagagaatgcacaccacctttgaacatgacatccaagctctgggcactcaggtgaggcagctgcaggaggatgcagcccgcctccaagcagcctatgcaggggacaaggctgacgacatccaaaagcgtgagaacgaggtcctggaagcctggaagtccctgctggatgcttgtgagggtcgcagggtgyggytagtagacacgggagacaagtyccgcttcttcagcatggtgcgtgacctcatgctctggatggaagatgtcatccggcaaatcgaggcccaggagaaaccccgggatgtgtcatctgttgaactsttaatgaatartcatcaaggcatcaaagctgaaatcgatgctcgtaatgacagttytacagcktgcattgaacttgggaaagccctgctggcaaggaaacactatgcttctgaggagatcaaggaaaagttactgcagttgwcggagaamaramawraaaaaaaaaaaaaaaaaa

SEQ ID NO: 736 - DNA, 2475 bp, Rattus norvegicus
  misc_feature (2010)..(2010): n is a, c, g, or t
ttcggcgtggtggaccagcccgcggtggccggcactcggctggagctgctgctcgcaggatcgcggcccgagttggggcgctgggagccgcgcggcgccgtgcgtctcaggccggcgggtaccgcggcgggagcggccgcgctggcattgcaggagccgggcctgtggctcgctgaggtggagctggctccggaggaggaggcggccgatggggcggagccggsccgtattgacacgttytggtacaagttcctgcagcgcgagccgggaggcgagctgcactgggaaggaaatggacctcaccatgaccgttgctgcacatataatgaaaacaacttggtggatggtgtttattgtctcccagtaggacactggattgaggccactgggcacaccaacgaaatgaagcacaccacagacttctattttaatattgcaggccaccaagccatgcattattcaagaattctaccaaatatctggttgggtagctgccctcgacaactggagcatgtgaccatcaaactgaagcatgaactgggaattacggctgtcatgaatttccagactgaatgggatatcatccagaattcttcaggctgcaaccgcyacycggaacccatgactccagacaccatgatgaagctgtataaggaagaaggcttggcctatatctggatgcctactccagacatgagcactgagggccgcgtgcagatgctgccacaggctgtgtgtctcctgcacgcgcttctggagaacggacacacggtgtatgtccactgcaacgctggcgtgggccgctccactgctgcggtatgcggctggctccactacgtcatcggctggagtctgcgcaaggtgcagtacttcatcatggccaagaggcctgcggtctatatcgacgaagaagctttggcccaagcacaacaagacttttttcagaagttcgggaaggttcactcttccatatgcactttgtaggtgaccaaccaccccttctaactgccttagtaaggaacttgggggtgtggctagtggaagacctggagacaaagttgccatctgaataggggacggtgttacctggagataccttctattgtggcttggttgggcttaggtgtgaaaatttttcaaaggaaactgaatgccatatgagaaaacttcaaaggccactgacagtgcaatgaatgcccatagttgctgatgccgtgggctgggggcctttgcctacaagcttcacatagatgcatttatagatttgtgactctttggcatgcaaaagacaagagagtggttaagtggatttttatcattactgtgagtgtcacacacacatactgcatgtgtacacacacacacacacacacacatacacacacactcacacacaccacacacacagctttttactgaactgaaattgcagtcgtggctttctgtaatttccttcatcctgtttcatagttgttaacatctctaagacgccaccctcctaattttcctgtcctcccagtatgactgcagaagtagagttcaccctctgtttttctcatctttttattgccttttttttcccttggggcagaatttgtaactacttatttagtgtaatacagaaaactgacccttgaactcatgataatcctcttgccctgacctcctagaactgggatgaaaggtgtgtgccttatactcaatgccactatttttcaattgaggtttgttgagtgtaggctggcttgcccaatctcaaggtgagtaggaaggagacgaagctcacaatccagtttatttggctcagagctgctttcagtgccattgtgggtttttttttaaccagactatcatggctgcagctttgtctatcttggggtaacattgctacccctgctgttgtttctacagtggcaaatgaaacagtgctctgatgcattgccaaagaatgtggaaaaccgttttcttttgttcaaccttctgtaagctgtgtaggttctcaaggctaanttatctgagaggaagggacctgcagaggccatgaccacagattgttgtacagctaggggctaaccttggtactcaattcagtataactgctgctcctcccaaaatatgctcagttctattagattctatcagaagtacaaacatcagcaaaactttgcctcctaagatataaaatctagaaacagagctgtgttccatcctctggaagatagtgcccaaatacaacttatatgttaagagcacagaagggacttatctttagttgaatgccactgtgtgccagtcacttccctatctttaatgccatcaccactctttctgggcaaggtcatcatctctgttcagatggggaagttgaggcccagagaatttacagcacttgtctatttctgttgtcatggatgaagctaggtttgtctctcaaatcccatactgtcaaaagttaaagtatgatgcttctcgtgc

SEQ ID NO: 737 - DNA, 1246 bp, Rattus norvegicus
ggcacatgcttctgggatgtatgccgaggcccagctgaccctcggggctccccccggcagcggacagggaagggttaaaggcccccggctccctgccccctgccctggggaacccctggccctgtggggacatgaactgtgtttgtcgcctggtcctggtggtgctgagcctctggccagatagagtcgttgcccctgggccaccagctggctcccctcgagtgtcttcagaccctcgtgcagatctggatagcgctgtcctcttgaccaggtccctcctggcagacacacggcaactagctgcacagatgagagacaaattcccagctgatggagaccacaatctggactccctacctaccttggccatgagcgctgggacactgggatctttgcagcttcctggagtgctgacaaggcttcgagtagacttaatgtcctacttccgacatgtacagtggttgcgccgggcagctggtccttccctaaagactctggagccagagctgggtgccctgcaagcccgactggaacggctacttcgtcgcttacagctcttgatgtctcgcctagccttgccccaggcagccccggaccaacctgcggtccctctgggccctcctgcctcggcctggggaagcatccgggcagctcatgccatcctaggagggctgcacctgaccttggactgggccgtgcggggcctgctgttgttaaagactcggctgtaactcaggactgaaagccaccatcgacatcgtcctttaaagccagatcttatttatttatttattttggtacttggagcgggggagcatgatgaacaggggcatgccacaccccaaacagccacacccagctagataaagtccttccaggagacctgggtgagggggatcacctatggcttatttatacttatttatttaaagaattggggtgggtgggtgcatctgagaccctgaggagcagggaactgagatcctgggtcctgggtctttacgaagtctattcacagtgtcttcctcacttttttattatttattaaacaattacttttatattaagaggaggaaggagggaagccgggcgtggtggcgcatgcctttaatcccagcactcgggaggcagaggcaggcagatttctgagttcgaggccagcctggtctaagagtgagttcgtgagttccaggacagccagggctacacagagaaaccctgtctcgaaaaaccaaaaagcggccgc

SEQ ID NO: 738 - DNA, 1729 bp, Rattus norvegicus
ctcctgtaggagggagtcttggaggccatgagcactcagtcactgtgattttcaagatgagcagcagccgctcagggctgaccagggtcctggtggccgtggctacagccctggtgtcttcctccaccccctgcccccaagcttggggtcctccaggggtccagtatgggcagcctggcaggcccgtgatgctgtgctgccccggagtgaatgctgggactccggtgtcctggtttcgggatggggactcgaggctgctccagggacctgactctggactaggacacagactggtcttggcccaggtggacagccgtgacgagggcacttacgtctgtcggacgctggatggtgtatttgggggcatggtgaccctgaagctgggctcccccccagctcggccggaggtctcctgccaagcagtagactatgaaaacttttcttgtacttggagtccaggccgggtcagcggtttgcccacccgctaccttacttcctacaggaagaagaccctgccaggagctgagagtcagagggagagtccgtctaccgggccttggccatgcccacaagaccccctggaggcttcccgatgtgtggtccacggggcagagttctggagtgaataccggatcaatgtgactgaggtgaacccactgggcgccagcacgtgcctactggatgtgagattacagaggatcttacgtcctgatccaccccaagggctgcgggtggaatcagtacctggctacccgagacgcctgcatgccagctggacataccctgcctcctggcgtcgccagccccacttcctgctcaagttccggttgcaataccgtccagcacagcatccagcctggtccacggtggagcccattggcttggaggagttgataacagatgccgtggctgggctgccccatgcggtacgagtcagcgccagggactttctggatgctggcacctggagtgcttggagcccagaggcctggggtactcctagcaccggtcccctgcgggatgaggtacctgatgggagccggggacacgaacagaagctagaggcagcagctcaggaggacagccccgctcctccaagcccttccttgcagccagacccaaggccacttgatcacagggaccccttggagcaagtggctgtgttagcatctctgggaatcttctctttccttggcctggctgttggagccctggctctggggctctggctgaggctgaggcggagtgggaaggacgggcctcaaargcctggctkctyggmdccvatgrtcychskgkwcwwgcttccwggaatcccaamcctgcagaggaccccagagaacttcagctratykcatctgcaaccctgtcagactggggyggywmrakggacagbcaggaggaggcaggacagcggatccctatggatggaggtctcasttcsaagtctkgascacttttctttgacacctgaactccaaacttgctgccasctgctcacycyctssacctctgatsccgyccytgagktgraagkccbcytgaggagcgtgtatcgaagtctgtgtccctgtgactgtgtgtgtgtgtgatggggagagcacgttchccgtatgtgtgtgyatmgatgwttggagagtgtgtgtgtggtcttgggcwtgrctctcytggggmgcatggagcgtgaaataarraggcrgacgtttttggararaaaaaaaaaaaaaaa

SEQ ID NO: 739 - DNA, 544 bp, Rattus norvegicus
ggctgaatgtgacagcacccacacctcagcagttacaggccttcaaaaacgaagtcggagtactcaggaaaactcgacatgtgaacatcctccttttcatgggctattctacaaagccacagctggctattgttacacagtggtgtgaaggctccagcttatatcaccatctccacatcattgagaccaaatttgagatgatcaaacttatagatattgcacggcagactgcacagggcatggattacttacacgccaagtcaatcatccacagagacctcaagagtaataatatatttcttcatgaagacctcacggtaaaaataggtgactttggtttagccacagtgaagtcccgatggagtgggtcccatcagtttgaacagttgtctggatctattttgtggatggcacccgaagtaatcagaatgcaagataaaaacccatatagctttcagtcagacgtgtatgcatttgggattgttctgtatgaactgatgactggtcagctaccttattcaaacatcaacaacagggatcagat

SEQ ID NO: 740 - DNA, 314 bp, Rattus norvegicus
gctgagcgcttctgctccgggcacgcatggcgcccgcacacggagtctgacctgatgtagacgcaagggggttaatatgaacgtccctctcggtggaatctggctctggctccctctgctcttgacctggctcacccctgaggtcagctcttcatggtggtacatgagagcgacaggtggctcctccagggtgatgtgtgacaatgtgccaggtctggtgagccgccagcgtcagctgtgccaccgacacccagacgtgatgcgtgccattggcctgggcgtggctgagtggacagcagagtgccagcatcagt

SEQ ID NO: 741 - DNA, 958 bp, Rattus norvegicus
gcggccgcggggcgcggagcccacgcgcgaccgcagaaagcagcgcaggcgcccctttggcgacagtccgagctgcgagtccctcagcatcctccgccagcacccggctggagccgcttgaatactatggttttggaccaagaggacggtgtgccgatgctctccgtccaacctaaggggaagcagaagggctgtgcaggctgcaaccgaaagatcaaggaccggtacctgctgaaggccctggacaagtactggcatgaggactgcctcaagtgtgcctgctgtgactgtcgcctggrcgaggtgggctccacyctstacacyaargckaacctyatcctktgycgsmgmgactacctgaggctktttggyrysacwggaaactgygctgcctgcagcaagctsatcccmgcyttygagatggtgatkcgkgccmrggayaaygtstaycacctkgactgcttcgcctgycarctctgcaaycrgagattttgygtsggagacaaattyttcytraagaacaayatgatyytstgccagacagmctacgaggaaggcctaatgaaagaaggttacgcaccccaggtccgctgatyccgcaacatcacccctaacaacgcaaagcactccatccttttatccgttgtgctcacgtgtatataagaaccgacacaggaacctacaaaatagggtagcgatagagcggcagaatggccgtgtggaagagaaggcggactgcatctgtatgtagtgaaatggccccagtccaagagttgaatgttcattattaaagagagagaaaggaatgtatatattgcgggatttttttgcttgcttatttgtttctgtgtcacttggcatgagatgtttattttggactactgtatataacgtattgtaaatccgaagcacaaatgtaatacagttttattgtgttmccmaaaaaaaaaaaaaaaaa

SEQ ID NO: 742 - DNA, 1690 bp, Rattus norvegicus
cctttcaaagtggtggtgatctcagccatcttggccttggtggtccttactgtcatctctctcatcatcctcatcatgctgtggcagaggaaaccacgctatgagatccgatggaaggtcattgagtctgtgagctctgacggccatgagtacatctatgtggatcctgtgcagttgccttacgactccacctgggagctgccacgggaccagcttgttctgggacgcactcttggctctggggctttcggacaggtggtggaggccacggctcatggtctgagccactcacaggccaccatgaaagtggctgtcaagatgctgaaatctacagccagaagcagtgagaagcaagccctcatgtcggagctgaagatcatgagtcatctcggaccccacctgaacgtggtcaacctgctgggggcctgtaccaaaggagggcccatctacattatcacggaatactgccgttatggtgacctggtggactacctgcaccgaaacaaacacaccttcctgcaacgacactccaacaagcattgtccacccagcactgagctctacagcaacgccctgccggtggggctctccctacccagccacttgaacctgactggggagagcgacggtggttacatggacatgagcaaggatgaatctgtagattacgtgcccatgttggacatgaaaggacacatcaaatacgcggacatcgagtcctccagctacatggccccttacgataactatgtcccatctgcccctgaaaggacctatcgtgctaccttaatcaacgactcaccagtgctcagctacacggacctcgtgggcttcagttaccaagtggccaatggcatggaattcttggcctctaagaattgtgttcaccgagacctggcggccaggaatgtgctcatctgtgagggcaagctggtcaagatctgtgactttggcctggctcgagacatcatgcgggactcaaactacatctccaaaggcagtactttcctgcctctgaagtggatggccccagagagcatcttcaacagcctctacaccaccttgagtgatgtgtggtcctttggaatcctactctgggaaatcttcacactgggtggcaccccttacccagagctgcccatgaacgaccagttctacaatgccatcaagaggggctaccgcatggcccaacctgctcatgcctccgacgagatctatgagatcatgcagaaatgctgggaagaaaagtttgagactcggccccccttctctcagctggtgctgctcctggagaggcttctgggtgaaggctataaaaagaagtaccagcaggtggatgaggagtttctgaggagtgaccatccagccatcctgaggtcccaagcccgcttgccgggtctccacagcctccgatcccctctggataccagctctgtcctctacactgctgtgcagcctaatgagactgacaatgactacatcatccccttgcctgaccccaagcctgatgctgctgatgagggcctcctagagggttcccccagccttgccagctccaccttgaatgaagtcaacacttcttccaccatctcctgcgacagccccctggagctccaagaagagccgcaagcagagcctgaggcacagctggagcagccacaggattcaggctgcccaggacctctggctg

SEQ ID NO: 743 - DNA, 1372 bp, Rattus norvegicus
cacgagggttggcagskgcctggcggtcctgaggagcggctagggcagcggagggaaagaaaagggaacggctcggaatttgctccagcggctgctgcaagacctcggcgccaacctcgcaccagcgagcgccccacagcccttcggctgcccctctatgtgctgctgagccggtcctggacccgacgagcccgccttcggtgttccgagccgaaatcgcaaagacggaaggactggaaatggcagaccatatgatggccatgaaccacggtsgmttccccgacggcaccaacgggstgcaccaccaccytgcccaccgcatgggcatggggcagttcccgagcccgcatcaccaccagcagcagcagccccagcacgccttcaacgccctcatgggcgagcacatacactacggcgcgggcaacatgaatgccacgagcggcatcaggcacgccatggggccggggactgtgaacggggsrcassccccgagcgctctggccscggmcgccaggtttaacaactcccagttcaygrgkccccctgtggccagccarggaggctccctgccggccascatgcagctgcagargctcaacawccagtatttcaaccatcacccctasccccacaascactacatgccggatttgcaccccgctgcabgccaccagatgaacgggacaaaccagcacttmcgagattgcaaccccaagcacagtggaggcakcwgcascybtgkcggbgcgggtgvmagcggcaccccsggsgryyccggcgrcacytcgggcggcgcggkkgscascagcgcggvcgrsrrtgrssktgscarcacmatrvccvcvtcggtggctcacgtcccsgcggcaatgctgccgcccaatgtcatarrcastgakttcatcgrcgaggaaskgcwhrwgkccttartgatagagatgggtttggacmgcatcaaggagctgccagaactcyggywggsccaaamtgagtttgattttatgacggacttvgtgtgcaaacagcagcccagcagagtcagcagttgacwcggttrrcvtmgcggstgaaagaaakcaccytcchtrcccccacccccaasttvktyggkstgarttaaaaaaawtcaaarvmmwvmaawaawmmmmmawrmdrmvamaddsryysscttrgmcgcagtatctyacttttcagatcctgaaaggtttgagaacctggaaacaaagtaaactataaactkgtacaaattggtttaaaaaaaaaaaarrwwrmtgccactttggcctgtgcttggtccgtttttgcagacttgacatccacctcccttatgtagggaaaagtatttagctaacttggtctttgttgtagatag

SEQ ID NO: 744 - DNA, 6066 bp, Rattus norvegicus
gcagatggcccttcaatctccagaagaggatgtcggaatctgaagtcgggaaagacaccaccccagaacccagtccagccaatgggaccggtcctggccctgagtgggggctctgtcctgggcctccaaccgtggggactgataccagtggggcatcgggcctggggaccccaagacggaggactcagcacaacaagcacaagaccgtagtggtggccagtgcgcagagatcacctcgagcactcttctgcctcaccttaaccaatcccattcgtcggtcctgcatcagcattgtggagtggaagccatttgatattctcatcctcctgaccatctttgccaactgtgtggcattgggggtatatatccccttccctgaggacgactccaacactgctacccacaacttggaacaggtagaatatgtgttcctggtgattttcaccgtgaagacagtgctcaagatcgtggcctatgggctggtgctccatcccagcgcctacattcgcaatggttggaacctactcgacttcatcatcgttgtagtcgggctgttcagcgtgttgctggagcagggacctgggcggccaggagatgccccgcatactggaggaaagccgggaggctttgatgtaaaggcactgcgggcatttagggtgctacgaccactaaggctagtgtctggggtcccgagtctgcacatagtgctcaattccatcatgaaggcgcttgtgccgcttctgcacattgccctgttggtgctcttcgtcattatcatttacgccatcatcggactcgagctgttcctcggacgaatgcacaagacgtgctacttcctgggatccgacatggaggcagaggaggacccgtcgccttgtgcatcttctggctctggccgttcatgcacactgaaccagactgagtgccgtgggcgctggccaggacccaacggtggcatcacgaactttgacaattttttctttgccatgctaactgtgttccagtgtattaccatggaaggctggacagacgtcctctactggatgcaggatgccatggggtatgagctaccttgggtgtactttgtgagcctcgtcatctttgggtctttctttgtcctcaaccttgtgcttggagtcctaagtggggagttctccaaggaaagagaaaaggcaaaagcccgaggtgactttcagaagcttcgggagaagcagcagatggaagaggaccttcggggctacctggactggatcacacaggctgaggagttggaccttcatgacccctcagtagacggcaacttggcttctcttgctgaagagggacgggcaggccatcgaccacaactgtcagagctgaccaataggaggcgcggacgactgcgttggttcagccactccactcgctccacacactccaccagcagtcatgccagccttccagccagtgacactggttccataacagacacccccggagatgaggatgaagaggaggggaccatggccagctgtacactctgcctaaacaagattatgaaaaccaaggtctgccgccacttccgccgagccaaccgtggtctccgtgcacgctgccgccgggcagtcaagtccaatgcctgctactgggctgtattgctgctcgtcttcctcaacacgttgaccatcgcttctgagcaccatgggcagccagtgtggctcacccagacccaagaatatgccaacaaggttctgctctgcctcttcaccgtggagatgcttctcaaactgtacgggctgggcccctctgtctacgttgcctcttttttcaaccgctttgactgtttcgtggtctgtgggggcatcctagaaacgacgttggtggaggtgggggccatgcagcccctcggcatctcagtgctccgatgtgtgcgtctcctcaggatcttcaaggtcaccaggcactgggcatccctcagcaatctggtggcatcgctgctcaactccatgaagtccatcgcctccttgctgcttctcctctttctctttatcatcatcttctcccttcttggcatgcagctgtttgggggcaagttcaactttgaccagacccacactaagagaagcacctttgataccttcccccaagccctcctcaccgtctttcagatcctgactggtgaggattggaatgtagtcatgtatgacggtatcatggcctacggtggtcccttcttcccagggatgctggtgtgtgtttatttcatcatcctcttcatctgtggcaactacatcctactgaacgtgtttcttgccattgctgtggataacctagccagcggggatgcgggtgctgccaaagataagggcagagagaagagcagtgaaggaaaccctccccaagagaacaaagtattggtgcctggtggagaaaatgaggacacagagggcacaaaaagtgaaggagcagcaccaggcatggaggaagaggaggaagaagaggaggaggaggaggaagaaaatggtgcaggacatgtggaactcctgcaggaagttgtacccaaggagaaggtggtacccatccctgaaggcagtgccttcttctgcctcagccaaaccaacccgcttcgcaaggcctgccacactctcatacaccatcacgtgttcaccagtctcatcctggtgttcatcatcctcagtagtgtgtccctggctgctgaggaccccatcagagcccactctttccgcaaccatattctggggtacttcgattatgccttcacttccattttcaccgtggagattctattaaagatgacggtgtttggggctttcctgcaccaaggttctttctgccgtagctggttcaatctgttggatctgcttgtggtcagtgtgtccctcatctcctttggcatccactccagtgccatctcagttgtgaagattctccgagtcctccgagtcctgcggcctctccgagccattaaccgagccaagggactcaagcatgtggtgcagtgtgtgtttgtggccatccggaccattggaaacatcatgattgtcaccaccctcttgcagttcatgttcgcctgcattggtgttcagctgttcaagggaaaattctacagttgcactgatgaagccaaacacaccctgaaagaatgcaagggctccttcctcatctaccctgatggagatgtgtcacgacctttggtccgggaacgcctctgggtcaacagtgatttcaactttgacaacgtcctttcagccatgatggccctgttcactgtctctacctttgaaggctggcctgcgctactatacaaagccatagatgcacacgctgaagacgagggccctatctacaattaccatgtggagatatcagtattcttcattgtctacatcatcatcatcgccttcttcatgatgaacatctttgtgggatttgtcatcatcacattccgtgcccagggagagcaggaatatcaaaactgtgaactggacaagaaccagcgccagtgtgtggaatatgcactcaaagctcagccactccgccgatacatccccaagaatccacatcagtaccgcgtgtgggccacagtgaactcagccgcctttgagtacctcatgtttctgctcatcctcctcaacacagttgccctggccatgcagcactatgagcagacggctccctttaactatgccatggacatactcaacatggtcttcactggcctcttcaccgttgagatggtgctcaaaatcattgcctttaaacccaagcattactttgccgatgcctggaatacattcgatgctcttattgtagtgggcagcgtagtcgacattgccgtcacagaagtcaataatggaggccatcttggtgagagctcagaggacagctcccgcatatctatcacgttctttcgcctcttccgggtcatgaggctggtgaagctgctcagtaagggtgaggggatccgcacactgctctggacattcatcaagtctttccaggccttgccccatgtggcacttcttatagcaatgatattcttcatatatgcagtcattggcatgcagatgtttggcaaagtggctcttcaggacggcacacagataaatcgaaacaataatttccagacctttccgcaggctgtgctgcttctgttcaggtgtgccactggtgaggcatggcaagagataatgctagccagccttccaggaaatcggtgtgaccctgagtctgactttggcccaggcgaggaatttacctgtggtagcaattttgccattgtctactttatcagcttcttcatgctctgtgccttcctgattataaatctctttgtggctgtaatcatggataactttgattacctaaccagagattggtctattctgggaccccaccacctcgatgaattcaagaggatctggtctgaatatgaccccggagccaagggccgcatcaagcacttggatgtggttgccctgctgagacgcatccagcctccactgggatttggaaagctgtgcccacaccgagtggcctgcaagagactggtggccatgaatgttcccctcaactcagacggaacagtgacattcaacgcgacactctttgccctggtgcggacatccctgaggatcaagacagaagggaacctggatcaagccaaccaggagcttcggatggtcatcaaaaagatctggaagcggataaagcagaaattgttagatgaggtcatcccccctccagatgaggaggaggtcactgtgggaaaattctatgccacatttctcatccaagattatttccgaaaattccggagaaggaaagaaaaggggctactaggagcagatgccccaacaagcacatcctctgtcctccaggctggtctaaggagcctacaggacttgggtcctgagatccgacaggccctcacctatgcccttgaggaagaagaagaagaagaagaggcccgccaggtcaaggaagctgaggaggaggaagctgagaccaccccagaaacatacaaagactccatagactcccagccccaagctcaatggaactcgaggatttcggtgtctctacccaagttaagagaaactccagattctctttcaactgggcctagtgatgatgatggagtggctcccaactccaggcaacccagtgggctacaggctggatcccaaccccacaggagaggctctggggttttcatgttcactatcccagaagmasgargtactcagctcaagggagttcaagggcaagacaatcagaatgaggaacaggaagtccctgactggacccccaacctggatgagcaggcagggatgccctccaacccagtccttttaccacctcactggtcccagcaacatgtaaatgggcaccatgtaccacgccgacgtttgctaccccccacgcctgcaggtcggaagccctccttcaccatccagtgtctgcaacgccagggcagttgtgaggatttgcccatcccaggcacctaccatcgtggacggacctcaggaccaggcagggctcagggttcctgggcagcccctcctcagaagggtcgactgctctatgcccccctgttgctggtggaggaatctacagtgggtgaaggataccttggcaagctcggsggcccactgcgtaccttcacttgtctgcaagtgcctggagctccttcagatcccagtcaccgcaagaggggcagtgctgacagtttggtggaggctgtgcttatctccgaaggcctaggcctctttgcccaagacccacgatttgtggccctggccaagcaagagattgcagatgcatgtcacctgaccctggatgagatggacagtgctgccagtgacctgctggcacagagaaccacctccctytacagtgacgaggagtctattctctcccgctttgatgaagaggacctgggagaygagatggcctgygtccatgccctctaaactcttacccctcacctatcgctcaataaattccctgcccttccttcccccagagggaggcaagcatggmccacaaaaaaaaaaaaaaaaa

SEQ ID NO: 745 - DNA, 1313 bp, Rattus norvegicus
aaaggatcctcccgcagaccatgttccatgtttcttttagatatatctttggaattcctcccctgatccttgtgctgctgccggtcacatcgtctgactgtcacattaaagacaaggacggtaaagcctttgggagtgtgctgatgatcagcatcaatcaactggacaaaatgacaggaactgatagtgattgcccaaataatgaaccaaacttttttaaaaaacatctatgtgatgatacaaaggaagctgcttttctaaatcgtgctgctcgcaagttgaggcaatttcttaaaatgaatatcagtgaggaattcaatgaccatttactaagagtttcagacggcacacaaacactggtgaactgcacaagcaaggaagaaaaaaccataaaggaacagaaaaagaatgatccatgtttcctaaagagactactgagagagataaaaacttgttggaataaaatyttgaasrgcagtatataarsakmmwwtgtagtagcaacctccaagaaactactgccttgcatacttggagagtttggaaccctcccagaagtttctggatgcctcctggtcaaataaagcaagcaactgggaaatctacagtgatagacataagaaatgcaactgactcctgcggtcagcatatgcctatggaaatttatcaacagtactgattttgtaaagcaaccctgtcatctgcaatgcttttaaagcctttccaagtgtttctaccattatccagtctacaaacaaggctctgaagattcagagtcgccactgttttgttagcaaccatgcatcggtgaaccactgggggagtggaactgtcctgtggaagactgcagatacaggagggctcctggtgatggataatgctcttgaaaacgagagtcacatcttaaagcagcagcagcagcagcaaaaagaaggttaaggcatcaacaaatgtagttaaatatgaatgtataacacatagcttcagtacagagcatagcagatatttttaaataaaagtattcttaaaaatagaaatgcacttagttcaaagatactgaaccttagtattcagtcacttttgtcatatatgtataataaagcttatataactgaawwwwmaawwwrrraarwawawttttagaagaataatatatgctagacttttaattaatgtgtatatttgatttttgacattatctttatatatataaagtattttcatacactaccaattgcctactttggatagtatctctttttaaaataaatgacctgtgttaacactgtcaggttcaaaaaaaaaaaaaaaaa

SEQ ID NO: 746 - DNA, 797 bp, Rattus norvegicus
atgccgggcatcgcgagacaggcgggctcggccctgctctcccagcaggaagaccaggagaatgtcaaccccgaaaaagtggcgccagcccagcagccgcgggcgcaggcggtgctgaaggccgggaaggtgcggggaccggcgccgcagcagaggctcaagactcggcgggttgcgcctcttaaggaccttcctataaacgatgagcacgtccctactgttccttcatggaaagcagtcagtaaacagcctgccttcaccattcatgtggatgaagctgaagagactcagaagaggccagctgagcgtaaagaaactcagtgtgaagatgccctggcttttagtgccgctgtctctttacccggagccagaaaaccactggtacctcttgattatccaatggatggtagttttgaatcaccccatgctatggatatatctattgtcttagaagacgaaaagccagtgaatgttaatgaagtacctgactatcatgaagatattcacacgtaccttggggaaatggaggttaaatgtaaacctaaagtgagttatatgaagaggcagccagacatcactaacagtatgcgggccatccttgtggactggctagttgaagtgggagaagaatataaactacagaatgagaccctgcatttggctgtgaactacattgatagattcctcttctccatgtctgcgttaagaggaaagcttcagcttgtgggcacagctgctatgctgctagcttcaaagtttgaagaaatataccccccagaagtagcagagtttgtgta

SEQ ID NO: 747 - DNA, 1879 bp, Rattus norvegicus
tgaagattgcacgcctgcagcttgcatctttgttgcaaaactagctacagaagagaagcaaggcaaagtcttttgtgctcccctcccccatcaaaggaaaggggaaaatgtctcagtcgaaaggcaagaagcgaaaccccggccttaagattccaagggaagcgtttgaacaacctcagaccagttccacgccgcctcgggatttagactccaaggcttgcatttctattggaaaccagaactttgaggtgaaggccgatgacttggagcctatagtggagctgggacgaggtgcgtacggggtggtggagaagatgcgtcacgtgcccagcgggcagatcatggcggtgaagcggatacgggccacagttaatagccaggagcagaaacggctactgatggatctggatgtttctatgaggacagtggactgtccgtttaccgtgaccttctatggtgcactcttccgggagggcgatgtgtggatctgcatggagctcatggatacgtcactagataaattctacaaacaagttattgataaaggccaaacaattccagaagatatcttagggaagatagcagtttctattgtaaaagcattagaacatttacacagtaagctctctgttatccatcgagatgtcaagccttcaaatgtgctcattaacacgctgggccaagtgaagatgtgtgactttggaatcagcggctacctggtagactctgttgcgaaaacgatcgatgccggttgcaaaccatacatggctcctgaacgaataaatccagagctcaaccagaaggggtacagtgtgaagtctgacatttggagtctgggcatcaccatgattgagctggccatcctccggtttccctatgattcttggggaacgcccttccagcagctaaaacaggtggtagaagagccgtctccacaactcccagcggacaagttctctgctgacttcgttgactttacctcacagtgcttgaagaaaaattccaaagaacggcccacgtatccagagcttatgcaacatccakttttcaccgtccatgaagccaaagcagcagatgtggcgtctttcgtaaaactgatactcggggactaaaaagccacggacttgactggttgaccctactgtggattggtgggtttacagggcgaagtgagttcaccacagcgccaacagaaagtcatcttgagatcattgaaccctgcctctctgaggggcttcctctccctgtttttctttttcctctccgaagggggccttggaatctctagcgtaggytgagctctctatatggatgaaatatgatagaggcttaggactcgaaaaggtgataaaatatttaatggcgaggcatacgaggagtcctcaagcctytgggatctytcgtgttctttacaaaatgaatgcattggccytggtaacaaggtgctacagtagttgacgrgattgtaaagtmggywcgkagcgtatcccacttattttaatatttatgtttcagtrmttggywsgarrtattccatttttatgcaagaagggagatacagagacaaggctgacttggcagtgtttatagggcttttwtyttttaagttcaatcatgtctgtggtccagaggaagttatttaatatgcatctttaagaatattataaaaaaaaaayytyrmgcmwmgkgsckcttcmtatgcactgtggcttgcggctgtcatggcggytgctcccgaccgtcaactccaccgtgggtgatcaccgaatcttttgaatgaactgtcaaagttaatgctcctcaccccacctcccccaacgttggaaaatytgaaagtcacttgtttcatggctcaargrgtammamaaaaaaaaaammc

SEQ ID NO: 748 - DNA, 9406 bp, Rattus norvegicus
  misc_feature (913)..(913): n is a, c, g, or t
  misc_feature (1102)..(1102): n is a, c, g, or t
ggatcccccctgcaacaatcagagatgctcagtgtgtcgtctttgagcaaggagtaccttcccagaaacatttattttcttaattcacgctgagccttttgctttaaagacgctgttctcaaacgttctaaaactcagtaggaacaagcagatccgaacaaaggcaaataaatcgaatcctgcaaagtaacaaagcagacgccttttcccaacagccagcacaaagctaaatgaaaaatatcagtcatccactagatacagtatttcccccactagacaggagctggggcctgtagatcccccctcccccaaacaggaggccgagaaggtacaaaacaaagtattcattcctaaacgagtcatcacttcgagctgcaccttcyacswskccgcactcgcggtttgaaagacctcggctgttacttctctgtacctgcctccaaacacacgtggaggtggtggcgagagggagggagcccaccgccacgtatgcataaggcgagggagkaggggattggggctgagggcagttccctgaggacagttagtgctgcctaaagtgcaaggctccsccattcctctgtacyccgaaactggaggaaacagtgtgggggcctggggacgcctgtccacggtccaggcagagccctggaaccctgagctttgatgctgcagcagcgatcgcctgtgggcacctgggtttctggggggcgggkcctcccccaggtgtgcggagagcgaaggccaccagagccagcccagaggaccccaggagcctcctccgggggacacggtacaaaagagcggctcgtcggtgcccccagcagcaggcaccgggccccacgggcctggctccgggaaggggcgcccgcgcggcggcaccgagggggttaaccgggcggcccgcggccgnagcgcgcttaaccctcggtcagccgcgccagcccgggggtggcggcgtccgagtcgcgcgccgtggagcccggggggcgcgtgggccgcaggccggcagctggggcgcggcgcggccggtgggaggcccgggcgcgcgggggagggcgggggacggcggcggcgggcgcgcagcgtcgccaggacgaanccggcgtgcagcgcggcgcggcgggcgcggagcgggcgggcgggcgggcgagcgcctccgtccccggatgtgagctccggctgcccgcggtcccgagccagcggcggcgcgggcggcgacggcggcggcggggcaccgggcaccggggcgggcgggcggacgggcggcatggggggcgcgtcgagcggccccggcggccgggcgggcaccaccgcggtgtccctccgctagaggaggggaccaagccaattctcctttgcagcaaaaaaagagaaaaaagaaaaaaaagaaaaatttacttgtatatattactaagataatatatacatctgattttattttttacaaaaagtttattttgctccatttttcaaaaaaagaaggagcgtgggtggcaggcggtttttataaattattcttattttgattatttgtctctgtccttccccaccccctgctgaagcgaaaatagggcagggaccgcggctcctacctatcagtaacctcccatacccgttcctccccctccctaacgctgagcatagtgccctgcacacagtaggcgctcaataaatgttcgtggatgatgatgatgatgatgatgaaaaaaatgcagcatcaacggcagcagcaagaggaccacgcgaacggtgagcagccagagcccgggtacccgctgccaaacctcatcctatcaggatcctactcttcccactccccaacccccatctccgatgcgttgggtgggttgagggggttggagatgatgcttttggcttggtgtcatctacatagaaaggggtgatgcgcggcagctacttcgttctcctcttcaggccctgaatgtcagagttaattctgcatttgctggggtggggcggccattgggtgtgtggagtactgtgcagccaaggggcgagagtgaggtgattcgggttcaagtgccctcgggctcaacttttctctttcattgcccctgagcgatggaagaggtgttagtcttcagcctgaaccccttttccagcctccccccccacccccacgcctctggttgactaagaggaaggtctttagtagcatcaggaaaattctaggattgctccgcttttactcgttgggtcacttggtaaagtgcacatccatcatctcatgggagaagccccccggtcttgggatctgggggaacagggtcaggtggagcgagtattcccgctcgctccctgtgcctcctgtgcacacgtcgtcggtaacctagcaatgcccagagagttgctgccgctgtggggctctgcaactcagccctggccatggcaccacgtgcagtttccacaccagcggggctgggtctgagaaggttgggttgcttttggctaggttccctccgtggaggtcgttggcatctcccaaccctgttttcttgaagccttttccggtgagcacttctcaaagggaaagcttggcaaaattagttcctgatctcagattgagtgccacctgcctgctttgctgctgtcccaggctcataggacagtggggcaggagacctgtgcttgctttgactctttgcttagtgataattagctttgcaaacgcctggatctccaacctctctccacccttctcactttgacatctgcttcagcagaggtgatgatggtggcccaacgtgggcacctgtgagaccgtctgagggatggccagacccatagtgaggcgggctccgcacatgaagagacccgacccccccccccccccccgcgccccacctttgagtattttgccttgtgtgtacctggatgctactctacgccgagataattcttgaataggccttgaggttccctggcataacgcaccctgtctcttaggtgtaggggtgcaggctggcttggctgctactgctgcaattaaaaaaaaaaaaaaagccctaaagatgtttttctgttttcggaagcttgtggaggaaatgagtcccaagcaccatgaattttcatttgtaggaagtgttagtgcataatctagatatttgttatggggcttttgctattgcctggtgccagtgaggagtttgttttttttttcttctacgtagaaaaaatgcatttatggctgtggagagctgttggaaggacaccctaaaaatggttaagactgttgaatttattggctctgtgtgtgtgtgtgtgtgtgtgtgtgtgtgtgtgttggtaataaattttagagaaaggcagctgtatagatgtatctgttaagccatgagagatacgtgtgttttcaaagtcaggaaaagacacaggataaattcgagaatagccccagtttgtcagaagagaggcactcatggcttccctttgaagacacaggtatgggagagtaccagtgtggctaggtgtggtgcagcaacgcatgtctagtgctcagggcagagctctgctgacttctgcattgcctggccaaaccccactacttgtgacacaaggttcaaaatgggaaacacaagatgggagacacttttgcttttttaaaaagatagtatagatcaaggtctttcttttttttttttttcwtscmsmawsaamrryarymkcwwkwskmcywckcswmmgaggcaaactatgcaagaggcaccagactccctatttctggtgaaggaccaacttctcagccgaacagctccaagcaaaccgtcctgtcttggcaagctgcaattgatgctgctagacaggccaaggccgcccagaccatgagcacgtctgcacccccacctgtaggatctctctcccaaagaaaacgtcagcaatacgccaagagcaaaaaacagggtaactcgtctaacagccgacctgcccgtgccctcttctgtttatccctcaataaccccatccgaagagcctgcattagtatagtggattggaagtaycmtttkwcatrtgkkawaktmttksmwawkkwtsccaattgtgtggccttagctatttacatcccgttccctgaagatgattctaattcaacaaatcataacttggaaaaagtagaatatgccttcctgattatctttacagtggagacatttctgaagattatagcgtacggactgctgctgcatcctaatgcttacgttaggaacggatggaacttactggattttgttatagtaatagtaggattgtttagtgtaattttggaacaattaaccaaagaaacagaaggcgggaaccactctagtggcaaatcaggaggctttgatgtcaaagccctccgtgccttccgagtgttaagaccgcttcgacttgtatcatcagtgcccagtttacaagttgttctgaactccattataaaagccatggtccccctcctccacatagcccttttggtgttattcgtaattatcatctatgcgattatagggttggaactttttattggaaaaatgcacaaaacctgtttttttgctgactcagatatagtagctgaagaggacccagctccatgcgcgttctcagggaatggacgccagtgtgccgccaatggcacggaatgtaggagcggctgggtcggccccaatggaggcatcactaattttgacaactttgcctttgccatgctcactgtgttccagtgcatcaccatggagggctggacagatgtgctctactgggttaatgatgcgataggatgggagtggccatgggtgtattttgttagtctgatcatccttggctcatttttcgtccttaacctggttcttggtgtccttagtggagaattctcaaaggaaagagagaaggctaaagcacgtggagatttccagaagcttcgggagaagcagcagctggaagaggatctcaagggctacttggactggatcacccaggcagaagacatagatcctgagaatgaagaggagggtggagaggagggcaaacgaaacactagcatgcccaccagtgagaccgaatctgtgaacacagagaacgtaagtggtgaaggcgagacccagggatgctgtggaagtctctggtgctggtggaaaagaagaggcgcggccaagactgggccctctgggtgtcggcggtggggccaagccatctcgaaatccaagctcagccgtcggtggcgtcgctggaaccggttcaatcgcaggagatgcagggcagctgtgaagtctgtcacgttttactggctggtgatcgttctggtgtttctcaacactctgacgatttcctctgagcactacaatcagccagactggctgacgcagattcaagatatagcgaacaaagtgctcttggctttgttcacctgtgagatgctggtgaagatgtacagcctgggcctccaggcctacttcgtctctctcttcaaccgcttcgattgctttgtggtgtgtgggggaatcaccgaaaccatcctggtggaactggagctcatgtctcccctgggcgtctctgtgttccggtgtgtacgtctcctgaggatcttcaaagtgaccaggcactggacttccctgagcaacttggtggcgtccctgttaaactccatgaagtccatcgcctctctgctgttgctgctcttcctcttcatcatcatcttctccctgctggggatgcagctgttcggagggaagttcaatttcgatgagacacagaccaagcgaagcaccttcgacaacttcccacaggcgctcctgactgtgttccagatcctgacgggcgaagactggaatgcggtgatgtatgacggcatcatggcctacggaggcccgtcctcctctggaatgattgtctgtatttacttcatcatccttttcatctgtggtaactatatcctgctgaacgtcttcttggccattgctgtagacaatttggctgatgctgaaagtctgaacactgctcagaaagaggaagccgaagaaaaagaaaggaaaaaaattgccagaaaagaaagcctagaaaacaaaaaaaacaacaaaccagaggtcaaccagatagccaacagtgacaacaaggttactattgatgactatcaagaggaggctgaagataaggacccttatccaccctgcgatgtgccagtaggtgaagaggaagaggaggaggaagaggacgagcctgaggttcctgctggtccccgtcctcgaagaatctcagagttgaacatgaaggagaaaattgcgcccatccccgaaggaagcgcattcttcattcttagcaagaccaacccgatccgtgtgggttgccacaaactcatcaaccaccacatcttcaccaacctcatcctggtcttcatcatgctgagcagcgctgccctggccgcagaggatcccatccgcagccactccttccgcaacactatactgggctactttgactatgctttcacagccatctttacggttgaaatcctgttaaagatgacaacttttggagcgttcttgcacaaaggggctttctgtaggaactacttcaatttgctggacatgctggtcgttggggtgtctctggtgtcatttgggattcaatccagtgccatctcggttgtgaagattctgagggtcttaagggtcttgaggcctctcagagcaatcaacagagcaaaaggacttaagcacgtggtccagtgtgtctttgtggccatccgaaccatcggcaacatcatgatcgtcacgaccctgctccagttcatgtttgcttgcattggggtccagctgttcaaggggaagttctaccgttgcacagatgaggccaaaagtaaccccgaggagtgcagggggcttttcatcctttataaggacggcgatgtcgacagtcccgtggtccgtgagaggatctggcaaaacagtgatttcaatttcgacaatgtcctttcggctatgatggtgctcttcacggtctcgacttttgagggctggcccgcgttgctgtacaaagctattgactcaaacggagagaacgttggtcctgtctacaactaccgtgtggagatctccatcttcttcattatctacatcatcatcgtggccttcttcatgatgaatatcttcgtgggcttcgtcatcgtcaccttccaggagcagggagaaaaggagtataagaactgtgagctggacaaaaatcagcgtcagtgtgtggaatatgccttgaaggcccgccccttaaggagatacatccccaaaaacccataccagtacaagttctggtacgtggtgaactcctcgcctttcgaatatatgatgtttgtcctcatcatgctcaacacgctctgcctggccatgcagcactatgagcaatccaagatgttcaatgacgccatggacattctgaacatggtcttcacgggggtcttcaccgttgagatggttttgaaagtcatcgcatttaagcccaagcactatttcactgatgcatggaatacttttgatgccttaattgttgtcggtagcgtcgttgatattgctataactgaagtgaataactctgaagagagcaatagaatctccatcacctttttccgtcttttccgagtgatgcggttggtgaagcttctcagcagaggggaaggcatccggactctgctatggaccttcattaagtccttccaggcactcccatatgtcgccctcctcattgccatgctcttcttcatctacgccgtcattggcatgcagatgtttgggaaggttgccatgagagataacaaccagatcaataggaacaacaacttccagacgtttccccaggcagtgctgctgctcttcaggtgtgcaacaggggaggcctggcaggagatcatgctcgcctgcctccctgggaagctgtgtgacccggactcagattacaacccaggagaggaatatacttgtgggagcaactttgccattgtctacttcatcagcttttacatgctctgtgcgttcctgatcatcaacctcttcgtggctgtcatcatggacaattttgactatctgacgagggactggtctattctggggcctcaccacttggacgaattcaaaagaatatggtctgaatatgaccccgaggcaaagggaaggataaaacaccttgatgtggtcactttgctccgacgtatccagcctcccctgggatttggaaagttgtgtccacaccgagtggcgtgtaagagattggtcgccatgaacatgcctctcaacagtgatgggacagtcatgttcaatgcaactctgtttgctttggtacggacggctctcaagatcaagactgaaggcaacctggagcaagctaatgaagagctccgcgctgtgataaagaaaatctggaagaagacaagcatgaagctacttgaccaagttgtccctccagctggtgatgatgaggtaaccgtggggaagttctatgctactttcctgatacaggactactttaggaaattcaagaagcggaaagagcaaggcctggtggggaaataccctgcgaagaacaccacgatcgccctacagatgcttgaacggatgctctagagttgtctgcctgagctaccgcaccaagctggttagtccggaggcgctgtggctaaggccttgaaagggcaaactccccctcgagcttatttctactgaagcagcatttcaggagaaatgcaggcaccaaagccctggggagaccccttgcgagcaaggcactcctccggaaggaaggaaggaaggcagaagccgggctgtgtgtggctcatctgtggagccctggctgcctgttgcggacactgctcatggtggctccttttcatgaaagggaacatatgagttatgttttccccttccaagccagagactcagtgagagggaaagaaagagagagagggagggagagagggagagagagaacgcaaaggggcagccaccccacagagaaatcaaatgaacacaacttgctgacgatggccagtgaataaaataaataatgtttttaatatatatatatatacatatatatgtgtatgtatatatatatgactaagcagacctgtgtaaggcagacaacggactctgccccaaagtcctgcatccctagtttgcccggactcccaaagactggcaggctgattggaactgagcagacagagttcctttcctgtgccagcacgtcacaacctcctgaccacccggccctgctgcttgcagtgacctagtccagaatgcactgtaggtggaaggccaggaagctcagacacacccattgaaactaacacatacacccgcatgccaaaaccaaccaggcaacagctcaggttccgtctcccctaccgtgtccgcggggaaacgcc

SEQ ID NO: 749 - DNA, 1455 bp, Rattus norvegicus
cacgaggtgcctgacagtggacatccatcctcccattgcttaaggtctgatctatcacaccaccacccaccaatcacaggaagcagtatgcaccacgctcacttcttgcttagtgtggacacaatactggctgtggcctgcattccacacttaattcmtscargcysataggarcaygaagatrsggsatgtctcaaaccccctcagcacctctgccccagttgatgccaycgctgggcccaatctcawtccasacctcattaccamratcccctgkyctcgctggatactctttattgccatccttgctgctggartcctcttaktctcctgtctgctctgtgtcatctgttactgttgccaccgccaacgccacakgaagcawcccaaggataaagagactgtgggcctgggcastgctcggracagcaccactactcacctggttcaaccagatgtggagtgcctagagccctgctctggaggggaccaaccgtgggggcaactgctgctctccctggagtatgattttggaagccaggagattagagtgggcctgaggcaggctaaaaatctgaaggctgagggcacagcagacccctacgcccgtgtcagtgtttccacccaggccgggagaagacatgagacaaaagtgcaccgtgggacactctgtcccatgtttgaagagacatgctgcttcctggtcccaccagcagagctgcccaaagccactctgaaggtgcagctattggacttcaagcggttttcagaacatgagccactgggggagctccagctacccctgggcactgtggaccttcagcatgtcctggagagctggtaccagctaggccctccaggttccactgagtctgagcagatgggggagctgtgcttctcactacgctatgtgcccagctcaggccgcctgactgtggtcatactggaggctcggggcctgaatccggggcttgcagaggcctatgtgaaggtccagcttatattaaaccagagaaagtggaagaagaacaaaacatcctccaagaagggcacaactaacccctacttcaacgaggccttcgtcttcctggttcccgttasccagctccagagcrtggacctggtgctggctgtctgggcccggggcctgcagctcctggctgagcctgtgggcaaagtgttgctgggtccccgggcttcaggccaacccctacagcactgggcagacatgctggcccatgctcggcggcccatcgcccagtggcaccacctgcggtcacccagggaagtggatcgtgctctggccctgcagcctcgtcttcccctgcttaggcctcgctcctgaaagaaccgtaggtctcagctttccccagtggagagctgtggccatttgtgcaggctcttcggatctctctgtaataaatgcatcctctctcacaaaaaaaaaaaaaaaaa

SEQ ID NO: 750 - DNA, 3820 bp, Rattus norvegicus
cgtggccctggagagggacggttttgaccacctaatcgtccagcatcggggcttcgcaagatccaggaacgcgccccacggaaaggggtccctcggtctacccatcctccacctctgagatcacccaccccaccggaggtcccacctctttccacccctgaaggacctcctgtgagcccgggaccctgtgtacaggactgaagtggaacaaattctgtagcccagacgacggctggagtggggacacgcccaactgaagaagcctgccccgccgtagaagcccgagatcctgagtctcggtggattgaagtcgttgtccctgggggaggcaagagcttcagaaatcgcttacggtggaaaagatgcctgccttcaacagattgcttcccctagcttctctagtgctcatctactgggtcagagtctgcttccctgtgtgtgtggaagtgccctcggagacagaagcggtgcagggcaatcccatgaagctgaggtgcatctcctgcatgaagagggaggaggtggaggccaccactgtggtggagtggttctacaggcctgagggcggtaaagatttccttatatatgagtatcggaatggccaccaggaagtggagagccccttccaaggccgtctgcagtggaatgggagcaaagacctgcaggacgtatccatcactgtactcaatgtcactttgaatgactctggcctctacacatgcaatgtgtccagggagttcgaattcgaggcacacaggccttttgtgaagaccacgagactgatacctttgcgagtcactgaagaggcgggagaagacttcacctccgtggtctcggaaatcatgatgtacatcctcctggtcttcctcaccttgtggctgtttattgagatgatctattgctacagaaaggtctctaaggccgaagaggcagcacaggaaaatgcgtctgactaccttgctatcccttcagagaacaaggagaactctgtggtacctgtggaggaataatgtggtgtkacytgwggwgrwrtamwswggyrtctkggagggtgatctgagtgctgagggactggatatccccagttcagtgatgccagcaatatcaggaagtgccccaggtgtcccaacacatccatcttttctattcatcaaccaccaacccaatgtgagattttcacctgacttccgaactctatcagaactctacacatctttaccttgcctgaaccgaagagccaacatctatctctacacggactaaacctcactctgttcttgcttccaaccaagtaactcccaacttaactagagttgttccctatgttccaaatgatttagacaagtactggagagtagtattacctctgccctgactgtctgtgackgggtcattytccactgcagcaaaaggrtggatataaatcggaagaaagccctgactagtttgtcttaaagccaaagcgtgccacgtacgtactttgattcattgaagtcagtttttcctgcttctcagagsgccagaaagcatgcmcctaatgcttgcagggacatcatctgtgtgcactggaacgctttctggagctcagtgtttggaggctgtatccccataatcctgaagacctggagcaaamscwgrasytccasgmrgtsscaaggmmgsatcyagracagttycmsggkctcgraawtgryakarcacactcctgatattgkaaacatggatgagtgaccttkctggattgaaactcctcagttcttcatgtctcaktgtctgtggatcastattartcctcgttttacaggaggaaactgagactcacacaaggctgaacaggacatttaggggattaaactgggccagagatgactttcctgccaccaacctcacactccctgggatgagaggtatttttraggactctaacattcagcatgccatttgcccagcggaagctgactgccacagatctgakgaactggaaaccaggtwagaaaacacagacsgcatgagwtagacttcaggatttcacacaaagatttgtgaatctraagcatcctccaggagagacggcacccgakggcaatatctctgtratgaaaaatggttttagtctgaaatggacagtcaacagagagacaaagatgggcgtgtagcttctaaatacctcacctgtagatgtcacgtttkggtactggtgtttgtaaagtcccccacctbtaccctcatccccacccaagagracagggaaccagtgacaagatgtttagtcaatatctctttttaatgactgttctaaatgcaatattctttagcccctccagatagcaagggcagaaggccttatgatgtwtaaaaaggtaaaagtgagactccataggrgaaatgtcctcacctctggggagatctgtaagaaagaccattctccacccctacctggctttgtatgaaaagctcacctttcactcccaacatttccttcttggtggatgccagacatgcgctttgggaaccccatcccaccctacctttatctagcttgtttatacatggtggcttatctggaatcacaatcgcatttccttataggasaysakgactataacctacaaggcacggcactcaccagccaattaaaatctttgccatctccatttcttcccataattccacttagaatcctggactagacatgtgtgactctggagcctttcytggtgtgctatggcttactaaagggcttagragagttctcaagggctataatcatccagaaaccccattgtttgtyttggtgctgggtatttgcccggactgattctcaataatttactgaaggtcaaactaagctgagtctagttttccccttatccctgcctaacagctgtgaacttggttactcagttggtcctgagagcatcttgccctgtkggcttggacggtcagccaggggttgttaccgagccccaatccctaagcgcttgctatctcaggctttactttcaatctgtttacacattattctttggtttctccaccctcggtcaaccrcacamcccagctatcttttragtttctgggtttgctctagacatcgaaatagaattgcaagtagaaagggaactttccagagcaagrtwatgctgagaacgacaggggtgaggttwaaaggcgttagggctaaggtgatagcccagtgggtaaaatgcttgccacccaagcgtgagagtctcagtgtgatctccagaatccatgtgaacagacagacattgtggcacacattggtcatcccagagctggggaggcagagacaggaagatctgagcctcactaaccaggccacctggcctwacttacttacttggcaagctccaggagagtgagacgctgtctcaaaaaaaaaaaaaaamaamtmvrrrrrssrrcmmvggtrsmwaktgcctkagkaatdwcacccgaggttgacttctggcctccacatatacatgtgcacaagttaaggcccatatttatatttacataaagatgcacgtgagcaatacacacacatacacacacaccgagagagagagagagagagagagagagagagagagagagagagagagagagcgagagcgtcagccatgtcatctcctacttgcttttacacctgatttacccttttcttttgtgtcttttacctcctctattgccatcgttcgtttaccatctccctttgcgttctctctttctacttcgcctcccctcactctcccttcgctcctcttttattttctctccctatttctctttcctcttagctctccctcccctttcc

SEQ ID NO: 751 - DNA, 3741 bp, Rattus norvegicus
gaattccttcaagcctgtccctaagtctccccctcctttcttggaatcgcagcagcccttctcaggccagtgcagtttactgagctccctgtgtggccatttctttctgggctcacagccggctcacattgttccccaaggcttttccacttccatggaactgcaggcattcctctggcctcactgtgcgagctgggcacagggctttctttccaagtgctctccaacagccccacccctacggctccctcccaattgcttccctccaacagctgcctcttccaacaacgattcttggacagtggcttaagcaaagaacacatttcgctactataggagcaagattgcagagttccttcagcagctctgtgtcaacaaagtcctaagctgcagcctctgtggttttcttgacattcctaactacgtccaaactaccatcgtactccaaacaccccttcctcactccctttcaggagtacggtagagggaaagggtgattttcatagcttggcatctttgccacaggggaagaatgagtgcttttgaaccccacagcctctttctggccacagttttgtcccagaaccatcaaagaggtcccagataatgagatttctcagagtgttcaagacatgttcggaataagacttgtataagtcaccctgttttggttaaactctggtatctaaactccacaagatcagaggttttcttcccctctggtttatcaacagtggaatctctgatattcataataatgccaggaatccagcaactagtccctggcagaatgtgaggaccgcaggaacgcatgagtgaatacatggtcctgatggtgtgatgggtgtccaccacccccagcagcttctactccagtctgaccagcatggtgttcctaggtgacctctgatcatcttgatctctgaccttgatcttgtgtcttcttttctcccagggagggagccatcactggaggctgcccttgtgccaatgagcyttsccaayacctcytctrcctycgaagacaagatgtgtgaggggaacaggacagccatggccagccctcagctgctgcccctggtggtggtyctmagtagtatctccctggtcacagtgggcctcaacctgctggtgctgtaygcwgtgcrcagtgarcgcaagctacacaccgtgggcaacctrtacattgtcagcctgtckgtrgcagacctgattgtaggggcagtygtcatgcccatgaacatcctctatctyatcatgacyaagtggtccytgggccgccccctctgcctcttttggctytctatggattatgtggccagcacrgcatccatctttagygtcttcatcctgtgtattgatcgctaccgctcygtccagcaacccctccggtacctgaggtaycgaaccaagacccgkgcttcmgctaccatcctgggggcctggttyytctccttcctgtgggttataccyatacttggctggcatcacttcaygccccyrgccccagagcttcgggaagayaagtgtgagacagayttctacaatgtcacttggttcaagatcatgacygcyatyatyaacttctacctccccactttgctyatrctgtggttctatgtgaagatctacaaggctgtgcggcgacactgtcagcaccgccagctcaccaacgggtccctccctwccttttyagaamtcaagctgaggtcrgasgatrccaargarggtgccaagaaacctgggaragagtctccctggggggtycwgaaraggccrtcaagagacccyastgkaggwctggatcagaagtcaacatctgaagaccccaagrtgacctctccractgtcttcagccaagagggggaaagggaaacagtcacacgyccctgtttccgtctygacrtcatgcagamacagyctgtgsctgagggagatgycaggggctcaaaggccaatgaycagrccttgagccagcccaaaatggatgagcagagcctgartacttgycggcggatcagtgagacatcagaggaycagaccttggtggatcracagtcctyctcccggaccacagactcagacacmagcatagagccagggcygggcaragtcaaakcgagaagcrggtctaacagyggcctggaytacatcaaartcacctggaagaggctccgctcacaytccagacagtatgtgtccgggytgcacttgaaccgagagcggaaggcagccaagcagttgggttktatcatggcrgcmttcattctctgctggattccctatttcatcttcttcatggtcattgccttctgcaasagctgctgcagygaaccyrtgcayatgttcaccatttggctgggctacatcaactccacgctgaaccccctcatctacccsctgtgcaacgagaacttcaagaagacattcaaaaarattctgcacattcgttcctaagggcatrycmaaaggatgccacatrgtggatagacaacgtctgatgtccaagagggaaccagaggaagaaagcatgggtgtcactagacccctgagcattaggaagtggaatctaaggtcctgggctgagcagtctggaggcattcccaggagctgtcagaaggaaagcaggcagcagagcgattgtgctctgggtagaatgcagagcatctgaaggagacccaggcagagcatgcctggccctcagggactgtgggagtctcagatactccgtggaagtcaaactctctgacttaagtttcttggtaactgaagtgggaatgtgtggctatagttcttctggagggttagcctggactcagacttcccgaacaaaagctgtgtgactgcagagacatgcacaccgatgctgtccccttccaggggttacctggagaggcctggcagctgtttcactgcagccacacttctcaaaatgcagtccttccgagccgagcctctcttacagcattgtccagagctatgtgccccaccgtggaacttgccttacccgtgtctcagagtttctaggaaattaggcagcttgtgagtccatcattttcaactcttagttcttttgggcttttaaaatggcggcagcaacaacaacaacacagtaacaaaaactgtcctcaaatgtcaagaggaggaggaagagacttttgaatggttctattttaagcaaaggaaaggcaagacagcckwrkttctttaagactccaccagggggctctcactctaggcccctggcgtgacaaaggaaaagaggttcctggaatcatttgatactcacgtcagaaactcgggatgagaactttgtatggcctcagttcatcacttctccaaaagggaagaaatgtcccctgccatgtactcacagtgttccccaagagaagtgacagtgtcccgagtaacgggcatggagcacacctgtccacagagggtgaccctcggaagggacaaatgtgcttttctctatgagactgtgtggtttctggtcacacatgctgaacgaattctgttgaaatcatgggaacgtccagttttatttatgacagaatcgagttgtgatttatattttaaaatgtaatgttgaacatcaatgagtgttgcaagtaggaacccctgtaaaagctggccttttgtgtctgtgttcctgtttgcatgacctgtccaaatgagatatttttgcttwmctaaaacacgacaacatttggaaggtactgttaaaaaaaaaaaaaaaaa

SEQ ID NO: 752 - DNA, 115 bp, Rattus norvegicus
cagcgagcagctgctggagctggagaaggaattccactgcaaaaagtacctctccctgaccgagcgctcacagatcgcccatgccctcaaactcagcgaggtgcaagtaaaaatc

SEQ ID NO: 753 - DNA, 115 bp, Rattus norvegicus
cacacagcagcgaagagctttcaaggcttcgtttgaggtctcctccaagccctgtcggaaggtccgagagacactagccgcagagacaggcctcagtgtgcgtgtggtccaggtc

SEQ ID NO: 754 - DNA, 114 bp, Rattus norvegicus
gcagagcagctggaggaactggagcgcgctttcgagagaacccactatccagacatttacaccagggaggagctggcccagagggcgaagcttactgaggcccgagtgcaggtc

SEQ ID NO: 755 - DNA, 219 bp, Rattus norvegicus
atcctgcaggcgtggctggaggaagcagagaaatcccaccgcgagaagctcaccaagcccgagctcttcaatggcgcggagaagaagcgcaagcgcacgtccatcgcggcgcccgagaagcgctcactggaagcctacttcgccatccagccaaggccctcctcggagaagatcgcggccatcgccgagaagctggatctcaagaaaaacgtagtgcgc

SEQ ID NO: 756 - DNA, 2517 bp, Rattus norvegicus
atcttcgttgacttcggggtttgggtacccctctctcttcttcggactccggaggaccttctgggcccccacattaatgaggcagccacctggcgagtctgacatggctgtcagcgacgctctgctcccgtccttctccacgttcgcgtccggcccggcgggaagggagaagacactgcgtccagcaggtgccccgactaaccgttggcgagaggaactctctcacatgaagcgacttcccccacttcccggccgcccctacgacctggcggcgacggtggccacagacctggaaagtggtggagctggtgcagcttgcagcagtaacaacccggccctaccccggagggagaccgaggagttcaacgatctcctggacctagactttatcctttccaactcgctatcccaccaggaatcggtggccgccaccgtgaccacctcggcgtcagcttcatcctcgtcttccccagctagcagcggccctgccagcgcgccctccacctgcagcttcagctatccgatccgggccgggggtgacccgggcgtggctgcgggcaacacaggtggagggctcctctacagccgagaatctgcgccacctcccacggcccccttcaacctggcggacatcaatgacgtgagcccctcgggcggcttcgtggctgagctcctgcggccggagttggacccagtatacattccgccacagcagcctcagccgccaggtggcgggctgatgggcaagtttgtgctgaaggcgtctctgagcacccctggcagcgagtacaccagcccttcggtcatcagtgttagcaaaggaagcccagacggcagccaccctgtggtagtggcgccctacagcggtggcccgccgcgtatgtgccccaagattaagcaagaggccgtcccgtcctgcacggtcagccggtccctagaggcccacttgagcgctggaccccagctcagcaacggccacaggcccaacacacacgacttccccctggggcggcagctccccaccaggactacccctacactgagtcccgaggaactgctgaacagcagggactgtcaccctggcctgcctcttcccccaggattccatccccatccggggcccagctaccctcctttcctgccagaccagatgcagtcgcaagtcccctctctccattatcaagagctcatgccaccgggatcctgcctgccagaggagcccaagccaaagaggggaagaaggtcttsgscmcggarrrgaacasccacccacacttgtgactatgcaggctgtggcaaaacytatacgaagagttctcatctcaaggcacacctgsgaactcacacaggcgagaaaccttaccactgtgactgggacggctgtgggtggaaattcgcccgctcagatgaactgaccagscactaccgcaaacacaccgggcaccggccctttcagtgccagaagtgcgacaggsccttttccaggtcggaccaccttgccttacacatgaagaggcacttttaaattccacatcgtggacatgacccacactgccaggagagagttcagtatttttttttaacctttcacactgtcttcccacgaggggaggagcccagctggcaagcgctacaatcatggtcaagttcccagcaagtcagcttgtgaatggataatcaggagaaaggawgagtccaagggmcaaaaraaaaraaaaraaaaaaatactaaaaaacaamcaamcaaaaaaaaaaaamaaaaraaaaaaatcacagaacagatggggtctgagactggatcttctatcattccaataccaaatccgacttgaacaagactggactwacaaaatgccaaggggtgactggaagtttgtggatatcagggtatacattaaatcagtgacctggggggagggaagaccagagttcccttgaattgtgcttcaatgatgcaatatacatggaaagaccaccttgtatgctctttgccttctaaaaagccattatgacgtcagaggaagaggaagcaattcaggtacagaacgtgttctaatagcctaaacgatggtgcttggtgagtcgtggttctaaaggtaccaaacgggggagccaaagttctccaactgmtgcatactttgacaaggaaaatstatttktgtcttccgatctacatttatgacmtaagtcaggtaaataagcctggtttatttctgtaacattttttatgcagacagtctgttatgcactgtggtttcagatgtgcaataatttgyacaatggtttattcccaagtatgcctttaagcagaacaaatgtgtttttstatatakttgccttgccttaataaatatgtaatrtaaatttaarmaaamwwmwawwwwrwawawwwrtaaactmcaaagtaaaaaaaaaatgaacattttgtggagtttgtattttgcatactcaaggtgagaaataagttttaaataaacctataatattytatctgaawrraaaaaaaaaaaaaaaaaa

SEQ ID NO: 757 - DNA, 1624 bp, Rattus norvegicus
cgtagtagcggaggcttagtccgcgcggcgctgcactgggattctcgcggtctggttcatctcccctttggcatctccttcttggcggctyatgaagmggcaraaygtkcgkaccctgtccttgatcgcctgtaccttcacctacctgctggtgggtgccgcggtgttcgacgccctcgagtcggaccatgagatgcgcgaggaggagaaacttaaagcagaagaggtccgcctcagaggcaagtacaacatcagctccgatgactaccagcagctggagctggtaatcctgcagtctgagccccaccgcgctggtgtccagtggaagttcgccgggtccttctacttcgctatcactgtcatcacaactatcggatatggacatgctgcacctggaaccgatgctggcaaggccttctgtatgttctatgctgtgctgggtatccctctgacgctggttatgttccagagcctgggcgagcgcatgaacaccttcgtgcgctacctgctgaaacggatcaagaagtgctgtggcatgcgcaacactgaagtttctatggagaacatggtgaccgtcggcttcttttcttgcatgggcacyctgtgccttggggcggctgccttttcccagtgcgaagattggagcttcttccacgcttactactactgcttcattacactgactactatagggttcggcgactttgtggccctgcaatccaagggtgccctgcagaggaagccattctacgtggccttcagcttcatgtatatcctggtgggcytraccgtcatcggtgccttcctcaatcttgtggtcctgcgattcctgaccatgaataccgatgaagatcttctggagggagaagttgcgcagatacttgctggaaacccaagacgggtggttgtccgtgtgcctcagagtcgcaagaggcaccaccccatgtacttcctcaggaaatacggccgaaccctgtgctatctctgcttccctggtgccaactggggtgatgatgatgacgatgatgatgacgccgtcgagaatgtcgtagttactactcctgttcctcctgctgttgctgctgctgctgctgctgctactcctggtcccagtaccaggaatgtccgggctacagtccactcggtttcctgcagggttgaagagatccctccggacgtgctgaggaacacctacttccggtccccattcggcgccatccctcctggaatgcacacctgcggggaaaaccacaggctgcacatccgtcgcaagtccatctaagtgtggggagggaagtacacggaagaatcatttgtcatgcagatgtaagtttcattgtcccaactcctctctccctccttatttattattattctctttttttgtgcttacagtcatcatcattcctttctctcttccctcctctcctgggttcatttctttccgacctttccagccaggcagagctgtccaaagggcaaatagaggcccatcctctctgaagctcgcacctgagcatgaagcatggattccttcctttctccccaccagagttatgccttacatttctccccaccctgcctcctctctctggggtggctttcctaggacaggtgtgagaac

SEQ ID NO: 758 - DNA, 2058 bp, Rattus norvegicus
atgcagcgccgggacgaccctgccgcgcgcctcacccggtcctcgggccgcagctgctccaaggacccgtcaggtgcccacccctcggtgcgtctgaccccgtctcggccgtcgccgcttcctcaccggtcccggggaggcggaggtgggcccagaggaggcgctcgggcctcgcccgctacgcagccgccgccgctgctgcctccctctaatccgggtcccgacgcgactgtggtgggttccgcgccgaccccgctactgcccccgtcagccacagccgcggccaagatggagccggagaataagtacctgcctgaactcatggctgagaaggactcgctcgacccgtccttcactcacgccatgcagctgctgtccgtagaaattgagaagattcagaagggagagtcaaaaaaagatgacgaggagaattatttggacttattttctcataagaacatgaagctgaaagagcgggtactgatccctgtcaagcagtatccaaagttcaattttgtggggaagattcttggaccacaaggaaatacaatcaaaagactccaggaagagactggtgcaaagatctctgtcttggggaagggttcgatgagagacaaagccaaggaggaagagttgcgcaagggtggagaccccaaatatgcccatttaaatatggatctgcatgtcttcattgaagtctttggacccccatgtgaagcttatgctcttatggcccatgctatggaagaagtcaagaaatttctagtaccagacatgatggatgatatctgccaggagcagtttctagaattgtcctacttgaatggagttcctgaaccctctcgtggtcgtggggtgtctgtgagaggacgaggagctgcccctcctcctccacctgttcccagaggacgtggtgttgggccacctagaggggctttggttcgtggaaccccagtaagaggctccatcaccagaggtgccactgtgactcgaggggtgccacccccacctactgtgaggggtgctccaacaccgagagctcggacagctggtattcagagaatacctttgcctccaacacctgcaccagaaacatacgaagattatkgatatgatgattcataygcagaacagagctacgaaggctatgaaggctattacagccagagtcaaggggagtcagagtattatgactayggacakggggagcttcaagattcttatkaagcctatggacaagatgactggaatgggaccaggccatcactgaaggctcctccasctaggccmgtgaagggagcatacagagagcacccatatggacgttattaaaaacaaacaggaggggaaaatatcasttatgagcaaacttgttactgatttcttgtatcccaggattcctgttgctttacccacaacagacamgtaattgtctamstgtttttctwtgtggtccctttcttttccccaccttcctccattcttaactctgcattctggcttctgtatgtagtattttaaaatgagttaaaatagatttaggaatatcgaattaattttttaagtgtgtagatgctttttttctttgttgtttaaatataaacmgtgtaccttttataataaaaaaaarwwrarttaaaaaaammmmmaaamawrwwarwwwmaaaagtggcattgcttgcttaaaggttctgaagtaaaggcttgtcaacgttttcttagctttgatttgaggcaccccgtaaagtcatagttgcagaatcccaaactaggctacatttcaaaattcagggctgcttaagctgtaaaatcacaatgttaacggcagtaggtgccaccatgtaaaagtgagctcagatgtctctaaaaacatttcctttaaaagcacatggcggttgaatcttaaggttaaattttaatatgaaagatcctcatgaattaaatagttgatgcaatttttaacgttaattgacttaaaacaacaacaaaattaggtttgtaaaatgactttttcattctgtgggttttgaaatctagccccagacatactgtgttgag

SEQ ID NO: 759 - DNA, 1019 bp, Rattus norvegicus
caaaagctggagctccaccgcggtggcggccgctctagaactagtggatcccccgggctgcaggaattcggcacgagcagaggttcggcctgctgttggagtcctactgccgtgcctgtgggatgtatctgaagcacctgaacagacaggtagaggccatggagaagctcatcaatctaactgacatcctcaagcaggagaagaaggatgagacacagaaggtacagatgaagttcttggttgaacagatgagacagccagatttcatggatgctttgcagggttttctgtcccctctaaatcctgctcatcaactaggaaacctcaggcttgaagagtgtcgaattatgtcctctgcaaaaaggccactgtggttgaattkggagaacccagacatcatgtcagagctactgtttcagaacaatgagatcatctttaaaaatggcgatgacttacggcaagacatgttaacccttcagatcatccgaatcatggagaacatctggcaaaaccaaggccttgaccttcgcatgctaccttatggctgtctatccattggggactgtgtgggtctcatcgaggtggtgagaaactctcacaccatcatgcagattcagtgcaaaggaggcctgaarggggcactgcagttcaacagccacacgctgcatcagtggctcaaggacaagaacaagggcgagatatatgatgcagccattgacctgttcactcggtcctgcgctgggtactgcgtggcaacctttatcttgggaattggagaccggcacaacagcaacatcatggtgaaagatgacggacagctgtttcatatagattttgggcactttttggatcacaagaagaaaaaatttggctataaacgggaacgtgtgccgtttgttttgacgcaggatttcttaatagtgattagtaaaggagcacaagagtacacaaagaccagagagtttgagaggtttcaggagatgtgttacaaggcgtacctagcaattcggcagcatgcc

SEQ ID NO: 760 - DNA, 1016 bp, Rattus norvegicus
cttaaaacttttaatggattgcacctctgtaagctatttcttaaaatgtgtatgatatatttgaaaagacttccattaatataatagctttgcttgcagccttccaatctatgttggtttacctswarkgttttytaaagggtggtcagaggccactagagaatgtattgttttggagtgtagtgatatattttgtggttttatttcaagtaagtcattttaaccgaatgttcattcatattcatttataagaagtacctatatcagaccaatttwaaaagaaaaacawtcagtattaatggmccaaatttcgtgtttgttttaacctggactctcttttgattatttctaatgctacaagaatgctgtgaagtgtcatttaaaataatgatgtagcctgacaagaaattctgtcagtgtataaacmtaggtagtattgtgcactgatttgaccattgtgaaattctccttcagtgtaagtgcattcccaataaaatttattgagtgdamcaawmwwwrwamaamwamtagtcatgcatcatcagtaatttwacaagttcttgtagtaggtakggggtattaytagcgttatctgtggcatgattatgcattctgtaatattaattttgggkyccttttgcttttttaacacttagattatcttaatggttcaacattttttctgacatatgcagtattaaagatattcagcaaaagtattaatgggcttctttaaattctatattatagtgtttcagttctgtgtctacagtgtgtaatgatttttaaaactgtcttttaaatttatgtagtgatgttgacattttggcttttatttctggttttagagtttgtattttcatggagtgctttgtagcaggcattacaagtaatctgttttgtacataaatgtgccaacagcttgatggtggcgtttttgaaatgtagaacaaagtgcttgcaaaatgtaataaatactcttgtgtamwwwrwrwawwwaaaaawaaaaaaaaaaa

SEQ ID NO: 761 - DNA, 777 bp, Rattus norvegicus
ttttttttttttttttttaggktatgatttctttatttacaagtcttttgaacaccatccmtgtatgaagcatacattcaaatattttagcagtgagcgagtttaaaccttggaacactgtaaacagatagagcctttaaatattttattatccccacccccctctacattgcatcttaaaattcgctttggttccttcggggaaatatatatataatataatatttatcttttaaaataactccaaatcattctccggctcttagaagattgccagaagctcccaagctcagttctgagtcaatgagcacagagtgcagcgtakggatgggggagttgggaagtggggagacwtcagcccctcatagccaaaggccaaggagccactggccaggtytactgctctgctgccttacatacaccaaatccaagcttccttaawgtggtggagagtttgccaaactgtagaacwccacaggcatttcctgtagagattgaggggccagcaaccagcaaaacctctggatttctcaatgtcttctaccccaggaattgtcagttctgagatggggcctgaatgaagacccatcaccaccattgggaggtagamgwyssmsgwgskctgcmarasgtggctgctaggagctcaggtttgggtgcagatcagtggtagctaggcgggatggaaagatattaacgtcatctggatagatttttcattcctccagggcccccagctctctcccatttcacagccaccttttagttcacctcgtg

SEQ ID NO: 762 - DNA, 672 bp, Rattus norvegicus
tttttttttttttttttywwtttgcacycyaaccctaggtttattcaacagtcctttcactctacacaagtacaaasacaaccttatctaaaatgctacaaagttataaaactcaaaacagattttatagtactgactgtacaacaaaagsaaagaggsaacgcasacattgccaaggctaacctgcgasatcaccatgaatggsargtgacaatggggtgggvtaggtttcatcaggaccctgtaraactggttcmccmattttagaaagtaacagagacwctgggacagaaargacaaccatttatggaggaatcmttcaaaggtytyrwscykaraargtgaagggtactcakcaggggccatgggcaggcctaacakaacakacagaggcttggtcctttccactgctgtggsacmdcrtgscktggccargttgtytgacgggtcctargtcatmtggaaaacggtgkgctgccctatgwtccagttggctctgcwactgaacagmctatcaagaactgaaggggcgmactttctagccagaaaactacagggtacctctacgggcacagtcctgaatcaacagtacctctacaaggcagaaccctcctgcagaggaaacatctcaactgctgtcttcaaagcctaccctggtaagggcctcgtgcc

SEQ ID NO: 763 - DNA, 577 bp, Rattus norvegicus
ttttttttttttttttttccwktwkwkwtttttttttyttttttaaaactctgataaattaagrkksakrrwawmsrcwmkkctsmgcywmwcttsmcttgtccrscywgcagaykggctggcttggggtgccctctggtggcagcgagggaaaggtacagtctggggccagcctggggcttgcggaccacacctgggtgcatgtaggcccccttggcttttgctttgggtacttgtctcttggcagatggcccasagcttcggaatggctaggttacaccacaagaagggtctcattcccaactccgtgggtgggttctcttgtcacaggtttccgggtcattctgtargcctctttaatgagatgactgactccaggcttttagacttcagtggaaaacaggatgctctgtctcttgctgtcasgggcagggatggcctccagctgcasgaaatacagcawtacttggacctgggacatgacctctagggaccagctgtcagtcatggtgatgggctggctggggttagcagggagcttgctctccttctccgagggccgaaacagcgtggggcc

SEQ ID NO: 764 - DNA, 815 bp, Rattus norvegicus
ttccctggcgtcgtcggttgcgcgcgcgcaccgcggrcgatggcggcatccggggagcaggctccatgctccgtgtacttctgcgggagcatccgcggcgggcgcgaggaccaagcactgtatgcgcggatcgtgtcgcggctscgacgytatgggaaggtgctcactgagmaykyggctsaygmkgagttggagccgcttgggsaagrggctgctgggggtgaccagttcatcsatgagcaggacctgaactggctgcagcaagcagatgtggtagtggcggaagtgacacagccatccttgggtgttggctatgaactgggccgggcagtagctcttgggaagccaattctgtgcctgtttcgaccacagtctggccgagtgctttccgccatgatccgcggagcagcagatggctcgaggttccaggtatgggactacgcagarggaraagtggagaccatgctcgatcggtactttgaggcatatcttcctcagaagacggcttcctccartcamccaagtgcctgaccmccctactgtattaaaadgwwwattawkwttkawwwwwwdwwwwmvwawwstttwamtrmwgkmygkwtgtmrmmacmtccatcstggtgcccagaggtcagaggagggtaccattctctggaactggcattagmgatggctkcaggcctccatgtgagtgctggaaactgagcccatgccytttgcacgagtgacacgtggtgctcttaactgstgagccttctctttggccctggccstactktrytaaatgctaacccctgaaaaaaaaaaaaaaaaaa

SEQ ID NO: 765 - DNA, 771 bp, Rattus norvegicus
ttttttttttttttttttywykkkkkkwaacatgggactgyagtcttttattgactcytacagtttcctggacttttggccccaaatgggaaagaaaaaaaaagcaaattasaaacaacattggcagtaggatgtgacaatgcccctggggagggaagctgagtadaacgtggcakgccwvcgwrssgtccaagttttggaggtcatgagcctcatcagatatggccaagatggcagaatgcccaagcttyttgctcasgcaaagcttcaggaaaattaatgttaaratacaaggcttgagggagctgaagaatcccaggctctggtcccagcaaatctccctcccgctcagtctgactccactgtgcagaaactgggctcttctgacctggtggtcagtgagagatgacaggtakgccadccaargagcacttagcactggsatcavggaraaggggggaargscarargccargacagctgaccagacactaacccattgctactctarggcccctactccagggccatgccactccacagcccakgatagccaacctctgtccttcctagctcaggccaggaaacactttttgctaggagaggaggaaaggagaggcccacatcccctggtgtgctccacaccctttaggcaggctgggtcatagcatccttgaagccgtcatggtgacaaagtcctcaaagctgagccggatgttgccctgtacagccgtatccttctcccggaaggcctcagtcaacacctgaagc

SEQ ID NO: 766 - DNA, 898 bp, Rattus norvegicus
tttttttttttttttttwwkywhkhwyttycyyagatttctttattgatacaaaggtagracacagtaattagctgtatacatttrtgatattatgatagtttggttrttatrtattgrcaagtaatactaatttgaartcagartcartrtrtcttccactcactrtgaatcaraacctaacaacaaaaggtatccaagaaaatctraaawktyytkwwtwwwwwcdgacakwraagaactwacatttattktyytrcttrgacatartttgtccttrracatmtcatattttggmttarrarytwtgaatkyartvttcttgcwktgtggcaacartcbstaarrttactgatyaaccaycatawmaaaaaartttatatrcttattagargaaatgagstaaacamtatttcaamtgtaarttsaaaytgwrttartaatawrcatgtgyatttcyraacmmwsvyycatccataagrtttactaataawtvtatwgygattttayasacaagtgggataattgatgtgaccmtcaatgcaytttgwacraaayggaggtgatcctctkaattttctatatccaggtttacacatgaattcaatattctcccctgattgggaataaatcyttscattttcyctccatctsagaactatrttatgtttttccakaatatcttctggtatyacacatgcatgtaagcaggttggtggstsagaccactttccatttctrcatgttaytatcttatttcccttaagtagataatagttctggcattgatattcaactgatgataatggtgcatatactggtaatgacaaggaggtgatgtctccattgacaataggtggaggaggcccaaatttccctgttgaatctttgcatttcgg

SEQ ID NO: 767 - DNA, 560 bp, Rattus norvegicus
ttttttttttttttttttwkttgkwawaagataatttattaaagtctaccctacaatttcccataataatggcacatataataattaaaaacagcaaagatgctcagtttgtttcctgtattgtggcgcactgtggaaaatgttgagtccatagcaatttcaggaggctactatcaggaaatccaaggatcaagmtacatttctgrccaagagtscaggaagctcatctgacctgmtgaaagggtttgtctwtgaccttccagcaagtcctaaagtcccccctccatccagctcatacagaggaatgaaagtccaagttccttctttatgcttgaccaatccgtggggaacagcagctgatcccaaagaaaagaggaagsccaaagactagatgctttctgtaaggaggacggccagaagcttgtggccatgggtgagaacagttctttctagaccattttccattattttttggctttgatcagggactactcaagaaaatatccttggatccttagttagccttcaagtctatacatgtaagatattgtgtcctcgtg

SEQ ID NO: 768 - DNA, 540 bp, Rattus norvegicus
tttttttttttttttttkwkkkkwgaggcccacaayscgatctttattcaraaatgtggttggtgctggatgatttgaagcccktgctctgagggacagtggaatccaccacaggaartgccctctcstcttctccactaagaatgtcagaggtcactctctccgtagagggsactakagaaagccacgtagtccarggscccggacggagcysccgatcctttrtagggtgccatcsgacggrtgcastactcwrcctgctcggytgggagctccctccgcagstcttctggggtwatgtarttcttgtctcctgctaggattttgaaggaggctacwwcttgttcasctgtgtctgtctctgcagtctctcgggtcatgaagtcaatgaaggcttggaaggtcacgaccccagctgcattggggtccaccatggtcatgatccgagcaaactccacctctcccagatcatagcccatggagatgaggcaagctcggaaatcatcaggttcgsrtcatcccattccgcttcccctcgta

SEQ ID NO: 769 - DNA, 536 bp, Rattus norvegicus
tttttttttttttttatgatattatttactgcaccttaaaagttaaaaaaacagcactaagcagagagcgtacagaaaactggatgtkwktytwtwywktkwkttactttcggcacgacagactttattttggcacttaaacaaatttgctttacagcagkgacaaaatatttgccagtattttttccctggcataratattccaagcaagtcattctacaattagggtttcactgttttgcacagttagaggtwtaaccactacattctcagcctccgtgattgagggcattgkgcarctttggaagggcccatcatttcctcttaattctaaawaaggkgaattmcggytwtaattggamagaaattaaggccattaaggattcaracacaacactgttccaagtgttactttagttttgtttgaatgagttctgtgacaagcccagggaaggtgctcaaagtagtcaaacttttatcgaaagttgactgtatgttggaaaagttgcggttcttgctgtcttctttctacttcc

SEQ ID NO: 770 - DNA, 824 bp, Rattus norvegicus
tttttttttttttttttwyacytttcyccaraagtttatttaggaacaattgttaagcacaraawggggtcatcacccaacgccggtgctgctgctttgctctgacaacaaaatgtttggggcaragaaakagtaaamctctgaagcmtyscttcttgggagggcarcygtkygctcatcsctgctttgctgytggtccygkaasaccccadgytwtstytttyccctgagattgyccattggmkakwgacaawcaamcaacaaacatacaacaccaaamwmaaaaamaaagttasgggaggggcctctgtrttattcctgccactcaaacttggtgccgatgcagatggygaggtcrcaagtccacagggaagctamtmvatystrcgctattgctctcctcatcccatragacgagggctcacttgtcctgaggttccttgctccagtgaagtttgggttcctcataractgccacggaactttgaagactcctctgcaccgagaaatacagcactgtgtctattgcaaacaagagtccyatcagcaggcagaaagtratttgatgccacggtagaaagctggagggasmcgtcggatctcctatgcttatctgcaaggatgctgaagatatgttgttgcgtccaatgatccctctgcaraagtaggaaccwctgtcggcgtgcgtagcttttgwaatastgagttyagaattcctatggaaatacttcttgcctttgccattctgtaaataggtaaccttaaatacaggcgtgtttcgccagctatggcatctcagacgaatggggtccccctcctggaac

SEQ ID NO: 771 - DNA, 821 bp, Rattus norvegicus
ccttctgccaccatgrgwgcactyctgwtcytrgcycttgtgggagctgctgttgctttyccyktggawgatgatgacaagatcgttggaggatacacctgccmrgarmattctgtyccctaccargtgtccctgaactctggctaccacttctgtggaggttccctcatcaatgaccastgggtggtgtctgcagctcactgctayaarwcccgcatccaagtragactgggaragcacaacatcaaygtcyttgagggcratragcartttrtcaatgctgccaagatcatcaagcaycccaactthratwsswrgamcctgaacaatgacatcatgctgatcaagctctcttcccctgtgamvctcaatkcycgagtggccmctgtrgytctkcccagckcctgtgcacctgcaggcactcartgcctcatctmtggctggggcaacacsctcagymdtggygtsaayramccagacctgctccartgcstggatgccccastgctgycycargctgactgtgargcckcctaycctggrraratcacyrryarcatgrtytgtgttggcttcctrgagggaggcaargattcctgccagggtgactctggtggccckgtggtctgyaatggasagctscagggyattgtctcctggggctatggytgtgccctgmmrgayaaccctggtgtgtacaccaagktctgcaactwtgtggrctggattcaggacacmattgctgcmaactarrkhtcyymartcycyytdmartcabtrtgycartaaagtkvawtwkyyytymhwraaaaaaaaaaaaa

SEQ ID NO: 772 - DNA, 604 bp, Rattus norvegicus
tttttttttttttttktytttwkwtyttaactttatagtttctttttaatgaggaaagaacacgtgaaagtagttcaagawwktdwwwtkkhktkywtacaagaatasaatatattttaatgttaactcatcakacacaaactttctttaaaaacaggtaaccgtccgtasgttaattttctgttggagctggmraaatagtttcccaragcacagttttcacagttgaacacggagcagtcccagtggtttagtcaggcagcttatattgcagattcattatcaaatatcttattttttaaggtctgtargttgtgttggataaaattctcggtgccctgaacttcaragaacctggagtcactccttctaacagaccagctcttcatcttwwttgagttctggatcgtgtctgamgtgaagtasyaaacaatggggtcaaagcaacagttggmgacagcaatgcagagagtgatggggtacatcgktctcactgcagcccccacagagcagttaacaaaggtctgtgttctcacgagagaatacaaaatgaggttgatgttatagggcacaaaacagaaacagaatatgaccaagcctcgtg

SEQ ID NO: 773 - DNA, 1225 bp, Rattus norvegicus
  misc_feature (989)..(989): n is a, c, g, or t
tttctaacgagtaatagtgcctacattcgcaatgtgattcagagcaaaaaaggaactctatttcccatctatcacagttttctattttatctgaacacacgcattccagtaattttaacatatttaaaaatagccatcagcagattaaagagggagaaatatggatggtgggaatatggatacgaccaaaggttaaaaccccacaagataaaaatggattttctgcgtccrygwssgagatacttcaycgtcyaygcagctttgagtycacacctctgtctacgcagcagytatgccrccrtacaccattgtstacttcccagttcgagggcgctgtgaggccaygcgcatgmtgctggctgaccaggsccagagctrgaargaggaggtggttaccatagatgtcyggcttcawkgctcrmtcaaryccactyrtctgtwtgggcakctmcccaagtwtrargatgragacctcaccctttaccartctaatgccatcttgaggcacytgggycgctctttagggctttatgggaaagaccagaaggaggcykcchtrgtggrtatsgtgaatgatggrrtggaggaccttsgmtgmaaatatggtaccytcatctacactamstatgagaatggtaaggatgaytatgtgaarkccctgcctgggcatctsaarccttttgaraccstgctgtcccagaaccagggaggcaaagctttcatyrtgggtraccagatttyctttrcwgattacaacttgctggacmtgytgmtggtccmccaagtbmtgrsccbtggbtgymtggacaacttccccstgstctctgcstatgtgsstyrcctcagwgcccsscccaagatcaaggcytttctgtyctccccygaccatktgaacsrtcccatyaacggcawtgktaaacaktaktggacsaagrgacmggarcyyyttrtccccyttttcccagactaataaartttgkragrchvmnvwgmhmcwwahmawmawmmwrwyawwagtggatttttaaaattctataaaaaactaaaattaatgctggacctcagaaataagactgcttgcccagtaggcctaggcatggattctatccccagcacaacaaaatgaagtatgagagaagcaaatatgtcccacatggtccatttacttcagaaatatgaaagtggtcaatatacatctgcacaactattgctcccgtaataaatg

SEQ ID NO: 774 - DNA, 354 bp, Rattus norvegicus
ttttttttttttttttttcaagcattcagttttgttttattgtatatgttttagaaacttctattgtcacaaatataacaggcaaagaatagtcactcttgtgttttaaatcccttaastaagccgtgcccttttgcagacacctcagtgttttcattgcggsctgattgarccttaacccttcctccccgtctggctctatakgatccygasctcasaaaatatgtctcctgkttctccgcagtccctctgacacacacaagatgtgacccacagcatctgccacttaaacgacccctcgccggggcagtcgaacctgacggtaatcattgtagacttgttggggacgcagca

SEQ ID NO: 775 - DNA, 471 bp, Rattus norvegicus
tggtggcccacctggaagccgttacaagtttggcggttgatcccaacggcctgtacctgatgtctggcagtcatgactgttcaatacgcttgtggaatttagaaagtaagacgtgtatccaggagttcacagctcatcggaaaaagtttgaagagtcgatccatgatgtagcattccacccttctaaatgctatatagccagcgctggagccgacgccctggctaaggtctttgtatgatggggtacttcagcttctccaggtgcagctgtgactcagagctcattcgctactcaaaccatagacacgtaggtgatggatgaccttcagtatttttgtattgaacaaagttatcaatttttgccattaaacagataattagttatgcaaaatatttagcttttgtaaccatttagttgtaactgagagggggattgaactgtaccactgataatgaacttggtgagaaatt

SEQ ID NO: 776 - DNA, 725 bp, Rattus norvegicus
cacgagggcatccgacacaatcccagaggtgccatcttgttcctggggcaggtgaacaagccctgagcgacggacaaaacacaagccacgcaaagccaagatgactttgctccgaagagagactctcttccccacatcattcacacttctgtaaaatatttatatacactgctttccttttttgaaactggttcatggtgacagttaagtgacacaagtgtttctggtcagggctgtgtcatcagaaagggcatgatggctgggatgckgtacggaagaacgaakasgckggtttcargacgtctagaagatttcwtkaaaytactgatcagttacctaggttaasawccctctcgagtrtttgctgtctgtcgggttcagcatttttgttccgttcttgtgtatatgtgtgacgttccgggagaggtttaatcagtgtgataggaggggggaaaaagacattttatagtagtttttatgtttttatggaaaacagtatcatttgcctttttaattcckktkstywsrsktssacymgaaagccgtagcctcttcgtgtgttgtttccgttgctgttgctatcgctgttttatatactgcatgtgttcactaaaataaagttggaaaactaacgtctcgctggacacaatttgctgtcgagccacgtgcctgtcactactggtctgtactctttggattggcttttttttttttttgtattttgt

SEQ ID NO: 777 - DNA, 752 bp, Rattus norvegicus
ttttttttttttttttttcaaaccagaacggcatgttttaatgagaatgaacaccgttctcattctctcattcttttaacgttwywywkwwttwkwkwtkgcykkgaattttttttaatttgaaatccggattaaagtgaaagcagtgggagtgaarctttacaaatttacattacwatgtcattgacawggcttttacactgattggwtacagaaagaaagagactaacattaraattaaggcartkacaacatgtgcaaacrcarmacaccccctracargcctcakwkkaaaarcactctgsbcagttggygtctgacgtggctgcatgcaggtctcattgctcagaaagatakgccctgaagagcttcattccttaaagggaaaaaaatccccgtcactggccaacgatggscargagcagcttcctgtaatctccactsgtgtcacttgcaatcatcgtgcttagaktcttctgatacatctgggtgaacawctgttttatctgaacgaggkcaatctcactccgagtgaccacaatcctgaccarggtggagtcatctkttccagcscctttyatggratagtagagtcgctcggcgaagaaggcarggcgsttgagggcgcactgcaatatggkcttyaaaccgctttcaacgtatccggaaaattcccgsctcryrctgcttagcaaatctcgattagccatcctggaataagcctccatggtggctctcagctgagggaagct

SEQ ID NO: 778 - DNA, 321 bp, Rattus norvegicus
  misc_feature (206)..(206): n is a, c, g, or t
cggccgccggtcatgtccacccaggcgccttccgaagccatgtcgttgagacccagccagagctccgcctcgctgcccacgctctggcgcgcatactcgaacagcgcctcattctctagctcagactgcggcgtgcccagcgtgcccccttgtgagatgcagtcctcgctcgcctcatggaaggtcttcggttgggtgaaggccangaggcacttcaagttcaccttggtgcccttcaggcacacagtctgtaaggcctgcttctccttcagcagggccacctcctgggccaggacatccaacctgttcttgagctcctca

SEQ ID NO: 779 - DNA, 486 bp, Rattus norvegicus
tttttttttttttttttgtttgtgtttactggkttaytgtccatgtcmcttaatcagcctgkaaactcccagaggcttctttttccccagagagtgtcaaawwgagagtgtaaaataaatatccgttagagtgawwwwgacaggagcagragtctgtggagggggagatctagagcccttagaatagacacttcagyctaatgasgcccatttctgcgttttcttcccartgsccaycagyttcagtgcattgcccarcactgstggakawsgggakamragttgamasgcggtgggcctgccakgcwgggctgcwttggtgacatgtccwamggtgtggrgcagtcwcyactaccacccccacctgcctgagctaggaacagaaagaggggaacccacagaagtgagtagatggacgtcagtcagatctggactgtccggtgattgcagaccctcaaggctgttaagagtcaaccatctctctca

SEQ ID NO: 780 - DNA, 663 bp, Rattus norvegicus
tttttttttttttttttaaaaaaagttggcactgtttatttgggatgaaaatatggtataaaaaatattaacacggaatggtgggttgaaagcaggtaaccaatataaatacggtccaataagttaatgcacccgcacagcggggcaaggctcagcaagcacgggaatatcttcggtgaagaacagcggcggcgtcacccggggcatcctctgggctcctggscccctggactccggtctgatgcggcagcgtaggctggttcccggctcgactactcccgtgggtctctgaagcggcgaaactcctccagcgcccgacggttytggtagtcgatcagcgccatggtgatggccgcgttccagcagctctcgactgtgcagcggaagtcgatctccttgtaaaagttggtgacgatggtgaagtacacgtacttggaggtgtgctccacgcagtccaccttgaggatggaatggaagtacagctccttgggccgatcgctgttgccggagaagaggcgcaggcgatcggccgtgagcacgcagcgcttcttcttccagacctggaacaggctgtcgcttcgcttctccagctcgccctcgcaaagaatctcatcggaagtcttcacggttttcgaagccatttcgaaagcttgcaccctcgtg

SEQ ID NO: 781 - DNA, 509 bp, Rattus norvegicus
ttttttttttttttcttaaatagctcaaaacttgttttctaaatttcaagagttgtagaagttgttcctaacatgggaactgagcctaccctccaggagggagtagtttatggggctcttttagcccacccacgcttaacataggccagagagtgaagacacattgctgggttccctcactgtgttgctgagtccacgcaggtggggctaattttctcaggtggagtaagaggaagcccctgaaacccctgctgagtaaagactggtttgaagtagctaagagttcattctgggagctgttggtgtctcaacatactttcccctccccaatgttttctgcagccctgggtgtgggatagggtgtatgtgaaacactgagcttgattctcttaagccaggcatcacttgaggttgttcagattagactttccaatggctgtaccaaggacgaaggaggaaaaagcacagatgcttatctcaggagtgttaagtacctgccccactgtcat

SEQ ID NO: 782 - DNA, 447 bp, Rattus norvegicus
ttttttttttttttttttyckkattataaagacatttatttactctatgaaaataatgtacaataaatactttccccctttcctattattaaacaattttaataaataatctacaatctaaaacttaaaaaaaaagaggaaaataggtccctctatttctttgtaagaaaaccctctcccactagagtttaattattcctgagatttcgttggaagaagttttatcaagtggaattttttgtgtggttttaaaaattgaaaaggactggattaaacactaattcgttaatacctggattttaacaaacacataaatgtgactaggagtggagaaggctctatttttgcccccaacagccaaggaggaccagatggaaaagaacaaagatagaaaacagttagggaaactgcaagtcgatggcacagagcgtgctggtgaaaaagtcc

SEQ ID NO: 783 - DNA, 425 bp, Rattus norvegicus
cggccgcaaaggtttttttttattgtattgatatagttagcagagtactagggagaagtttcatccagaaattttattttgttaaaggcttgacttgagctcatatagtattgtatgtttcctctggattcggccatctattcttagggggcactcaggaaactgatgaaactccatcccaaagtccctcctcaaggttccagacattaagcgctttctggaggagcttctgttaatccaacaggagcgccaaagacacagattggacttttgtgagcttaccgctgttgttgcagcgctcctggaggccatcccagtaaactccctggtttattagtattgtatgtttcctctggattcggccatctattcttagggggcactcatgaaactgatgaaactccatcccaaagtccctcctcaaa

SEQ ID NO: 784 - DNA, 502 bp, Rattus norvegicus
tttttttttttttttttccagactttgtaaactttattgcaggaatatttgtttgaatgctggtgatttagatcaaattttcttccatttccttacaaaagagagagacagacagagacagagacacacagagacagacagacagttctgaaactacaaaagatatagaacagggtctcaaccagaaaagtaaaattaatacacttccatcagaaccagctccccacttcaacagcccagagaccatggttatttttggagaggaacacacaggttccattcctgaagaggttttcgaagaagcccacaggtgatggatgccacaggaagcctcagccagaggccggcaaaggttcgaggatgctcctggggctctctgctaaggtgattctgttcagcttgcccacctctgcctgccagcctgggatcttctttgttgtcatgtggcgacgagcgtgcttggtcaggtggtcactcctcatgaagcgccggtcacacacag

SEQ ID NO: 785 - DNA, 436 bp, Rattus norvegicus
cggccgcaggcgccagcagaggaggcggcggagcatcgagcagaggcgaggcggaccggcaggagcgcgcggctggggccacgcatccccacacttgcacaccaactcccgcgccttgcacccccgagaccggaatcgggggctcggagagcctcggtgaagctagcgggagccagctccggggtgagcggctacctgaagttccccacctatgcaaagtccacccgaactaccgacgagatgaccacggagttcttccagaacatcagcgccgagcaccagacacagctgtacgaagtctacaaactggactttttaatgttcaactactcagtgccaaactacctgaagttggattagagggctgcggggggcggggggggcggttggggagagggagagaatcctgctttttaatttaagatttttcctcgtg

SEQ ID NO: 786 - DNA, 652 bp, Rattus norvegicus
  misc_feature (631)..(631): n is a, c, g, or t
tttttttttttttttttcagactttcataatatttattttaaacctgccaaaccagatttgttttttctttccatgcaggtcattgtcaatgtcagacagatgggtaccaagacatggatctgcaccacatccagctgcgcttgggtgaagttctcatagcaggtgatttggttctcggtgcccacctgctcggttgagttcaggtactgaacgatgatgacgatggtgcaatggccaaaggacatgttgtaaggtccaaagcacaccaggaaattaagaagcgtcaccacagccaggcccaccgcccggcgtcgcctctgagccccaacatggggctgtgtgagcatgatccatacaaagcgccaatagcagaagatggtgactgtcatggggacgaaaaagaggataaaccaggcactgggtaacccagatcccagtgtaacggcggagacaagaccgaaatacgaacatcagcggagcacatgtgcaaggcacagctcaatcggatacagaaagaccaagatcaccagagatgggagccctgtacccagaattcctcttcttcccaccatctctcccctgtcttttccattggcttcttcccagcatcaccagccagaccaatgtctntaggtggtgtttcccctcgtg

SEQ ID NO: 787 - DNA, 422 bp, Rattus norvegicus
ttttttttttttttttwaagaaataatamaataaaaagtgtcaaccgcagttgacaccaagcatgttttgtggacgcagtcaagctgccacagtctggtcatcgttgttgttgtgctgacgtctggtcatttattattagtgtgtctcgttctccagtgccggagacctcattactttggaaaactcgctgttccccagcgcagcacagccgcatgagctcagcttcagactgatgtccgccagccttcttggaacacattggtattcattgtggatgycayacaatccatccggggtgcctcgtgcctcccattttcacagccgcccactgttgtagaatgatcgctgcctttaccctctgcagtagcctccgccatttcagttctcccacaggggtggggtgggggtkgggttaaaggat

SEQ ID NO: 788 - DNA, 510 bp, Rattus norvegicus
tttttttttttttttgtggttcatgtagttctgtctgtaaatagaatcacagtatttaaagctttcgctttcaggaaaaaaaaaaaaacgaagtaagaatccaagtgtgcgcgtggcaggttgtgtgtgtgagaagggatctgaggaagatgccttgagsaggaggttgggtggcagttggcagggtgtgggaatgtctttcctacggggtacatgctttttgtaaaaaggaagtgttcctcccaaccctgggagtaggcaaactrctaatcagtttagctttgtgctgtatgctagtttaaaaaaaaatwwatraatmatgyaatataatgtaaaaatagacaaacaaacaaacaaaagcttttatgatggattttgtaaatagatttgttacagggtgacctgttctagctgtgatcttaccacttcaaatggatgtaattyraataaattttgtwtggtaaagggtcaataaaatgattttttyytytrmvraawwmwhmwwrwrmc

SEQ ID NO: 789 - DNA, 601 bp, Rattus norvegicus
cacgaggggtaactggagaacgtacaggggggacacattcggctccgtgaatttttaactcgtgggtcttcatttccttccaactccggcgatcctgaaagcaaagcgcgaaccatccacggaccgacgagatgagcgacagcccttgcctgagtcctccagcaccaagccagggtcctactaccccacgcaaagggccccccaagttcaagcagaggcagacgcgacagttcaagagcaagcctcccaagaaaggggtgaaagggtttggagatgacatcccaggcatggaggggctaggaacagatatcacggtgatctgcccctgggaagcattcagccacctggaactgcacgagctggctcagttcgggatcatctgaggactcgaggcttggctgctctcgggagcatctgctgctcttgagtgccttgattttgcccagttggtctctcggagtcttgaaatccagtattcaggaggaatttccttgcattcccatgagtttccgtcgtgttctttccttcgacggtgaataaagcggcacttttgttgggggggggggtccctcagcttcacacctaaaaaaaaaaaaaaaaa

SEQ ID NO: 790 - DNA, 538 bp, Rattus norvegicus
tttttttttttttttttaagaaaggttactcaccaaggtgttttattatttggcttcttcacacagaatgcatgagctcgctcatttagaacagcaagttccccaagctacagagaaacctatcatggaagtcttttaaataagtwwwtwwwywkywtwtwtawgttttgttttgttttttttaaaaagaaaccttcaaaggaaaagttatacatacatatatatatataacaccgtcctttcgacaaatgaaatacccacaggagactcaakggcaggcgctcagcgtgcagttctgttccaaatgagtctttgcagccagatcctccaggaaaagcaacgtgaagagaaatggcattgggtcaggcctcaccgcacgccccagagttgcgatagaaactccctacaagagcagtttaggcccgccggtccctggccacggggccagcgtcgtatttgctggtccggtcctctctyrtkyygtgcatctgatttttacactggattctgtttctaagtgtgatgagtgaacaggtca

SEQ ID NO: 791 - DNA, 354 bp, Rattus norvegicus
tttttttttttttttttwtggagggactggttctttattcaaaatgtcacttgtcactattcagtatcaaaacagttgcactacagggwtctctttctccggttggaggagtacaaacaagccaggaatctgcagggcgcccacctaacaggctgagaagaaaccacctgaacatggcaattgggtggggacacttgaaagatcagcacaccactagcccatagactgcaaagaattctcacagccagtgggttggccaaggtaacctaaccccccaaaaacaatttyawawtawtwtraaatttaaaaagttcttttttttttttaaacataarmwawwmaarmmwcgtgccg

SEQ ID NO: 792 - DNA, 559 bp, Rattus norvegicus
  misc_feature (535)..(535): n is a, c, g, or t
tttttttttttttttttywtgttttaatttggactttattgaaacagcaaaaaamataactaatgttttgtggattgttttttaaacaaaattgaaatgaaaaacatcacaaataaatgtcattaacatttctggtgagaaatccagtgacaggaaaacataaacaatactgagcaaagtcttctcccacctagactattcaagatactgcctggycctgggttgggtttagccatgttttctaacaaaggcttctattctgtaaagagaagattggacagcttgtgtagaacattcatggttactattactatatgttcygtggccacatgcacttaacagccacacatgtgcacaaagtcatcattcctattaggcttagctaacaacaagaaaaaagaatacctttccaccttgttctgcaatgtgacaagcgttaagaagagggaaccaatgtatgtgttcagccattccatatagtcattcctttatggcactttccaggagttaattaaaggagcgccaagatctgcangaattcaagccttacctaaaaata

SEQ ID NO: 793 - DNA, 534 bp, Rattus norvegicus
tttttttttttttctttctcttcattaaacttgccttcttcagagcagaaacgacatctcgtgtgtgtcagagtgagctcactcgtgctctccttggtttgctctgcattaggaaggcaggtgtttccaggtgctgacgaacgcggtagggatcagagagtagggaaccgtggttatgctgttccacacatctaaagtcggatcgtaacagtccaacgtcttgcagcgctgaatgccgaagtatcctccaaccacgtaaagcttgttcccggaggccacggcatggcagctcatgcgcttggctgtcacgtctcctaccttggtccactggtaagtttcactgttgaacttgtaagcagagcaggctgagaattctgtatccccacccatgataaaaatctggttccccagcacagctgcggctgtgtaacgccagggctggggacaggtggctggaactgtccatctgttttcacactggtcataacactgaaccttaggaagcttgtcgtggcttacgctggtaccctcgtg

SEQ ID NO: 794 - DNA, 384 bp, Rattus norvegicus
tttttttttttttttctagatgttcagagtgtgatggctgtgtgttgcctgttttggcctgctccactgatatgcttatggagaatgcttgctggtgttggagacttggggaaggggaggccagggggggtggtctgtggcacccacgaggcatggacagggtggaagggaggctgcaactggtgttctgttgcactggtaggggtgacccaggtaattttgtttgggggaacagctatgcatgtattcttagatacattcttaaaaatgtttttttgaagtccttttggatgttaatttgttattgtgtttttttgtttttttggcaacaggttttggtaatcgctgtggaaaacctaaaggaccaagagatccctcgtgccg

SEQ ID NO: 795 - DNA, 385 bp, Rattus norvegicus
aaactatgcttccaacagggttcattttaaaatttcggaaacttgttatattctctttgtgtcctaatatcaaaccctcattttctcagggagatgaataagcgtctaacggaggaacaagccaagaaaacctatgaccgggcaattaagctagaacaagaatttggagaatattttacagctattgtccaaggagataccttagaagatatttacaaccaatgcaagcttgttattgaagagcagtctggacctttcatctggattccctcaaaggagaagttataaattagctactgcacctctgacaacgacagaagagcatttagaagaacaaaatatatataatataacacttggaggcttttaaaaaaaaaaaaaaaaa

SEQ ID NO: 796 - DNA, 693 bp, Rattus norvegicus
agagttccagagagctcagtctctactcagcactgaccgggaggcctccatcgacatcctccactccatcgtgaagcgtgacattcaagaaaatgatgaggaggcagtccaggtcaaagagcagagcatccttgaactggggtctctcctggcgaagactggacaagctgctggtcgagctatgtttagaatgcatcgaatgggccaaatcagagaaaagaaccttcttacgccaagcattggaggcaaggctggtgtctttgtattttgataccaagaggtaccaggaagcattacatttgggttctcagctgcttcgggagttgaaaaagatggatgataaagctcttttggttgaagtacagcttttagaaagcaaaacttaccatgctctgagtaatctgccgaaagcccgagctgccttaacctctgctcgaaccacagcaaatgctatctactgcccccctaaattgcaggccactctggacatgcagtcaggtattattcatgcagcagaggagaaggactggaaaactgcatactcgtacttctatgaggcattcgaaggctatgactccatcgatagccccaaggccatcacatctctgaagtacatgttgctgtgcaaaatcatgctcaacaccccagaagatgtccaggctttggtgagcggaaagcttgcacttcggtatg

SEQ ID NO: 797 - DNA, 504 bp, Rattus norvegicus
taaagggaataagcttgcggccgcaatgtttttttttttttttttttttttttttttgctgtggataaggctttatttctctgctggaagaatccatctggaagaaagagaagggcagggggcctaggaggggcagttaaagaggctgcagaggtcaggacaaggggctgctggtgagggtagctggtcacttgttgtcctctaagaagaagtcattgtaggccatgcacagcgtggtcaggaacacagagtactccttgaagtcaatctcctggtcgctgtttttgtccaggctcttcatcaagttatcaatgctgctctccttcatcttctctgcaagactcagttctgtcttgatcagctccttcagttctttcctactcagggtcaacttgctaccctctctccctgaatatttatggaaagtggtgaccatggtggtcagtgccttctcaagaggagtctccataatgatgtgtactcaaggaagaagtggacctcgtg

SEQ ID NO: 798 - DNA, 568 bp, Rattus norvegicus
tttttttttttttttttkkttwwywkttackgacagctttgtttattatttagacgatkacttcatttctcataatcgtacaataaatctctkaaagaacactgttgtggttggagttggtmacattacaccacctytttcttctacaggagtggagtgtttttcacaattattttttaatagaacatttgaatatcaaggagtgcagttaattcaaagtaacgaatggaccawacttcaagagaaacaattgcacactcatttaagggtctgatgctgtacagtggttcatggacattcaagaggaaacaatagagatctcagttggacacagagctgaaggtggttaggtggacagaagtggstcycttaagacctgtttggyagcttaraaatgaggtttaatactggstcaatcacattagcctttctagacagttcctctaggtaagaactgagattcattggcagggtgtgatatgcatctctcygagggcaaaagtcctccagcaacgtgtagaatcttctgcagactacccccaattcactcatgttggagtttttaact

SEQ ID NO: 799 - DNA, 5437 bp, Rattus norvegicus
cggccgccaaacaaaggtgcaggtgaagcggrtgtcrccgtkkggatcgcggycccagagtcaccatgaasgsccttgatgagcctccttawttgacagtgggcactgatgtgagtgccaagtacagaggagccttttgtgaagccaaratcaagactgcaaaaagacttgtcaaagtcaaggtgacttttagacacgattcttcaacagtggaagttcaggatgaccacataaagggcccactgaaggtaggagctattgtggaagtgaagaatcttgatggtgcctatcaggaagctgttatcaataaactgacagatgcaagttggtatactgkggkttttgatgatggagatgasaagacactgagaagatcttcawtawgtctgaaaggagagagacattttgctgaaagtgaaacactagaccagctcccacttmmsawtsstrascattttggsactccagtcataggaaagaaaacaaatagaggaagaagatctaatcatataccagaggaggaatcttcttcctcatccagtgatgacgatgaggatgataggaaacagactgacgaactgctaggcaaagttgtttgtgtagattatattagtttggataaaaagaaagcgctgtggttccctgcactggtggtttgtcctgactgtagtgatgagatcgccgtgaaaaaagacaatattcttgtgcgatctttcaaagatggcaaatttacttcagttccaaggaaagatgtccatgaaattactagtgacactgcaccaaagcctgatgccgtattaaaacaagcctttgatcaggcacttgagtttcacaaaagtagaactattcctgctaactggaagactgaactgaaagaagacagctccagtagtgaagccgaggaagaggaggaggaggaagatgatsmwmrwgagaaagaagataatagcagcgaagaagaggaagaaatagaaccatttccagaggaaakggagaactttcttcagcagctgtataaattcatggaggatagaggtacacctattaacaaacggcctgtgcttgggtatcgaaatctgaatctttttaagttattcagacttgtgcacaaacttggaggatttgataacattgaaagtggagctgtttggaagcaagtctaccaagaccttggcatccctgtcttaaattcagctgcaggatataacgttaaatgtgcttacaaaaagtacttatatggctttgaagagtactgcaggtcggcaaatattgattttcagatggcattgccagagaaagttcttaacaagccatgtaaagattgtgaaaawaaaraaawaaaarttaaagaagaaagtgatgcagagatcaaagaagtaaatgtggaagacagtaagaacatgataccaaaagaggagacgcctgctgaggatgagagtgaaagaaaagaaaatatcaaaccctctctgggaagtaaaaaaggcttattagaatgtatacctgcacaatctgatcaagaaaaagaagctaacattacaaaactagaagaaaaggaaagcttggaagataaagacggtgccacagctagggccgaggaggccctcagcacagaggtagatgctgaagaagagcaagcacgatctggatatgatgaatggattaaagcagataaaatagtaagacctgctgataaaaatgtaccaaagataaaacatcggaagaaaataaagaataaactagacaaagaawmrgacagagatgaaaaatactctcctaagaactgtaaacttcgacgcttgtcaaaatcaccgtttcagtcaaatccatctcctgagatggtttccaaactagatcttgctgatgccaaaaattctgatacaggtcatattaaatctatagaaattacctccattcttaatggactacaagcttccgaaagctcagctgaagacagtgagcaggaggaggagaggtgtgctcaggacccagaaagcagtagcaaagacgaatcaaaggtggaacattcagcccacagcagaagtgagctgatttcaaaagaggaactgagtagtccatctttgctagaagaaaacaaagtccacccagatttggtaatagccaaaacagtgtcaaaatctccagaaagattaagaaaagatgtggaagcaatatcagaagatactgattttgaagaggaagatgaaatcacaaaaaararaaarratgttaaaaaggacacaacagataaggctttaaagccacaaaccaaaacgtggggaaaagaccggtattgtatacagacgaattgtttgcagagtggatcccctggcaagaaggaagacagaaccaagagcaaagagccactctgcacaggaaacagtagtaatagctcctcagatgaagacgaagaggaaaagtccaaagcaaagatgacaccaaccaagaaatataatggcttagaagaaaagagaaaatctttgcggacaactagtttctattcaggattttcagmaskagsagaaaaaaggataaaacttttaaataactctgatgaaagactccagaacaacagggctaaagatagaaaagacgtctggtcaagtattcagggacagtggcctaagaaaacactaaaggagcttttctcggactctgacactgaggctgcagcttctccaccccatgctgccccagatgaagggacagtagaggagtcactgcagactgtggcagaagaggagagttgctcacccaatatggagctagagaagccactacctaccagtgttgacagtaagccagtggaagaaaagcccctagaagttagtgacagaaaaacagaatttccgagcagtggcagtaattcagtgctcaataccccacctaccacaccggagtcgccttcttcagtcactgtaacagaaactagtcagcagcagtcttctgtcacggtgtcagtgcccctgcctccaaaccaggaagaggtccgaagcatcaagagtgaaactgacagcacaattgaggtggacagtgttgtgggggagctccaggacctccagtcagaggggaatagctcaccagcaggctttaatgcaagcgtgagctccagcagtagcaatcagccagaaccagaacacccagaaaaagcctgtacaggtcagaaaagagtgaaagatactcagggagtaggaagttcatcaaaaaagcagaagagaagccataaagccactgtggtgaacaacaaaaaraarrraaaarrcacaaacagtagtgacagtgaagatctttcagctggtgaaagtgtgactaagactcaggcaatcaagtcagtccccactggaatgaagacccacaatagcaagtctcctgcaagaatacagtctccaggaaaatgtggcaagaatggagataaagatcctgatctcaaggagcccagtaaccggcttcccaaggtttacaagtggagttttcagatgtcggacctggaaaatatgacaagtgctgaacgtatctcaattcttcaagaaaaattgcaagaaatcagaaaacattatctctcattaaaatccgaagtagcatccattgataggaggagaaaacgtttaaagaagaaagagagagaaagtgctgctacatcttcctcctcctcctctccctcatccagctccataacagctgctgttatgttgacactagctgagccgtcaatgtccagtgcatcacagaatggaatgtcagttgagtgcaggtgacagcaggacttgctagagcactttgcacttaatggctgttgagggccacatctttttttatactgcacagtggcacacaaacacacaaaatcagacaagcactattttatatttaaaaattatttcttgacaagctgacttggcacttaagtgcactttttttatgaagaaaaagtacaacgaactgcttttcctcaagcaataattgtttccaacttgtctgggaattgcgtgtctggtaactcgaaggccttccactgtggcagaggaggcttttcactgcctgtgaagatgatgcagtaggtggagaaaaggtgggccagaacatgtgagatgacttactgtatatgtattcccttgtattttgttaaagctggaacatttgatatttttccattcatttattaaaaatatgaacctattttcatttgtacaagctaattgttttttaaagcaagtcaccttatggtgactttaattgtataagtcaagcacatgtaacaaattcaaaacctgcagttaacaggatattattagatttcatcctggtaaccaaatattgaagattctctttaaaaatgactgaacatgtttacaggtttgaattaggctaaaaggtatgtggtggcttttcacaccccttaaattgaaatgggactactgtactttgccatttttctataaatcagtatttttttttaattttgatataatacattgtgtgaaaaaagaaaatggctaataaactgtattaaatcttaaacaatgtataaagattgtacttagccagttcaaagtgtatatttattcataatgaattataacagttatatttttgtgttttcttgtaaatgtttcttttcccttaaatgcagataattcatttgtattgcttattttattatgagcttacaacaaaaagaattcaggaacaaactgttagaatggttcaaggctgtttctatgacctgcctcacaaagatgattgttattttacgtatacgtagctaattgggtagtaggcctatacaattaaatgccttgtayaraskgcaaaatgaacgccaagctgttttcacttgtattgactttatgttgtgtgatyccaatctctgtttggcacttgtatttaattccccacctttgtaatacatttgtatattgcggatgtgttcattgaagctatttaaaacctggcgctgttaaatacacagtacttcactgtacagactgttttactgttwwaawwrwrrwwctgtgtgcttttcttttctttctttttttcttccyttttttttttttttttttttgaatgaggctggcatgttttatttgttttctggcaatacatgtgagaattttgaagcgttttgttgtggatgctaacgtgtcagaatccttaatcctttacattgaacctttytaagaaaagcattttcagtcttgtaatgtgtgcttacmgtaactaatwktgttgaaaaatggtttcaagttactcaaatttstacagactgtaaagatttgttgacagcaaaatgttgaagaaaaactaatagawtaaaastataaagtatatmttaggatctgcaaacatgatgaattatgtaatatattgtacaaatgtaagcagaagctctgaaataaaatgccatagtttgtgaawmmwwraaaaaaaaaaaaaaaaa

SEQ ID NO: 800 - DNA, 560 bp, Rattus norvegicus
tttttttttttttttttwyttygggggggaaaaggtttattttttcctcagaagaaacagactggggaacatttacaacccacattaacttgcagttggtcctaaccctttcgggaacaggtgttaaaatgttaggtgctctamggaatgaaggtgttcaccccagacagaatgtacatggacgatgcttgaagactgcatgttttttccctkaragacgtgtaagacaaacagaatttgctgagagccatctttccaaacagsccctccctyttcacactttggaggatgtgcctcaactattcatctagtcagcactcagaccacatgctgctttccttmtaaatcaatccctttcccaaccatktgaactctccaagtmttcatagccctgkaycgaaratacctactaagatcctatctgtacttcagctttcacmcyttgtgagytgggaagtcaggctcctagtaaacaaaacttccatraytggattatgaggccaaccytwtaggttrmsktaactmwatarrgtgytmttcaastmcataaagygctcgtg

SEQ ID NO: 801 - DNA, 569 bp, Rattus norvegicus
tttttttttttttttttgttcaaaaacttttatttactataaagacaaaacaccaaaataggtacaaatactataaaattggttcaaaggggtaaaaattttaattaaaatatctcgatatatttaaaataacaaaggatacatttaagccaaattttcttaacccagagtttttttttgtagcatttgcttacatagtaaggtgctaataggagttagcccttaakccctggaagtcttaggaatcatagtcacacakcacatagaatttcattgtgagagtgaactttggtagaagaaaaatctataggacacctgaggtagtakaaactggaataaacagcagtagacgttatttacaacttgagtaccarataacattaaaaacacamaaataattacacaatacaattttcagtccagytttgatccaaagaaaacaagaatatcacatcacatttgcatcgaaaacaaaacagcacaattaccagcaagccgaggggactgcaaacaaactcaaacacggtgggtcctgacatctggggacagtctgagtttgaaatgtggca

SEQ ID NO: 802 - DNA, 899 bp, Rattus norvegicus
tttttttttwttttttywktytawaaacagcacttttaatatttgtayaratagaccacagtattatcamraaaactgcaasaatagatyatggraaamcctcactcacacargtctctcstgtgctgcggsamcctgkgbctccctggctggktaartkccacsggaacgctcarargacggsgccaccttakggtgcwgtcastctgagcacccagaccctttgtcctctgcccgtgctgttgacctcttcagctatataaaaataatgtcagcgggcgggcgtgaggaggacraarggagtggcttgctcagtggcagcagsctctgcccargctgcagtgcargstgggagggagcagyaagtakacagyyctcctttgccctatctctgcasgtgscggacaaaggcttgcacaagttggatcmswsgykcctgagactctgggctagctttggatagagaggtggctttgccctgtggtgagggcaggactccagcagcaggggagctgggggctccccttctgaagtaacgtgagaggctggaaagcaatgtgctcagctctgagctcagctcctgcttyatccgctgcttgtcccgggggtgcacagccgggtccctgaggtagcgtactgcttgggagatgagcagatagaagcagttctccatggtgaacatcaggagggactttaatgtccgggtcccttctgcttgtgtgctgaggcccaccgcctgggtgagggattcctttttcttgtccagctctccaagcatgttgagggccacattcactgtggccaagagggttccgaaggagggggctacttcagagtcaaaagtgggagtggtgaaactcagggcaaatagaaagttgtactcagcaagatccctcgtg

SEQ ID NO: 803 - DNA, 562 bp, Rattus norvegicus
tttwywykwbkttatttattacacagtgtagtgtataatacwskagkttgtattaatacaataatatattttagtatgaaattktggaaagttgataagatttaaagtagagatgcaattggttctcgtgcattgagatttratttaacagtgttctgttaacatttatactcgcctcggactgtagaacrgagtttaaatgggaatgtwttrgttttacaaytacaatcaagtcattctcccwttacccagtttttaatatgaaactcttacactttgaaactcactgtgtgtgactcatagcatgmtgctcttctgttaagagttagcccagccataactcattcccttagcaagccaaattagaattgccttctgtaaacagtgttgggaacaatgtttaacatggtgtgccaawttgktcctgtatccatgtatgkwagctaccaatccgactcttccttttargttccttgttacaccatggtcattttvtagttttttaccagactcccagctcacaataaacgcatcarcargcmdrammwmrwrmmaaaaaraa

SEQ ID NO: 804 - DNA, 626 bp, Rattus norvegicus
ttttttttttttttttttaggacagtagtgatttttatttaattttgtaagcctaaggtaaaaagcataggcagtaacttttactagtcaataaagagtaattccaccaacccacaggagagctggaaagtacttactgaaagcaaaatatttagagaaaatwkwywttywtwywwwwttawaaaatgcctgtwwtwwkwwtwwktkywtctcaaggaaagcacaaactcatttaatttatagagccagttaaagccttaaaaaatttaagkggaaattgaaatatgcaaacatgtwtaaacattctacaaaagatggtmatcttttcctgagtgtcctaaagctacagacgtgaggkgatgggcargcarggtggasccctcaagggcattttctttctacacactgcttccctmcttyttcatattcctgttkggaaawccacmtctgttsmraggtmcccaaagatgctaggatggascckccgryccacgrgctgaacctccgctccamcgtcgtgttgtttgcaatcagtttcaaccgcatactyggcggagttttctgagaaagctctctatttaacctatccgtgaaactctgtattaaggtgtttcctcctgctacga

SEQ ID NO: 805 - DNA, 546 bp, Rattus norvegicus
ttttttttttttttctttcattatttwtttttttwttttttttccaagaacagttaacatttgccaggcacctgttggcctcagtcacttgcatctaaagagcaaagctaatttacccacagcccacgctctctgaaatggttagccttatttcttagctctgttaaccactagtctaacgttagcttcagagttcagttttaatcatctagcccataattgtctactgctccctgccacataaacaaaaaacagtttgaaggggaataaggggagcagtttacatcttctatggatacttcaagtaattggccccaaagggaaactaccaagttgaccatggtttagcmtgtkcygagggcataaaatatggaagggattgacctgtasaaagagttggtgtcctagaatgtgtgattgcgtgaaaatcctactttacctcagctggcctaaatatcctgagccactagatggtgagaagagcagagacattacaagagggacagactgatgcacactgatgctgggaaaaaaaaacctcgtgcc

SEQ ID NO: 806 - DNA, 890 bp, Rattus norvegicus
gggtcgcagcgggctccctacctggctctgctaccgccgcggcggaagcgccttccctcaggacatcaatgcaagcctgaagaaaaagtaatcgcttccttttaagccatgrcatatsmkttrtacwkaaataswwcttysskkarcagwmttywagwgakycttsatkwktctcatayagtctcaacagatcaccccccagcttgcccttcaagttctacttcagtttgataaagctataaattcagcattggctcagagagtcargwwchrmktcartttsakraaywacwdarattkcawwggccwgarastagvarshgmgwsavdbdsargggctctctaaatacatacagattytgcgataatgtytggacttttgtattgaatgatgtygaattcagagagstgacagaacttattaaagtgsayrargtgaaaattgtagcctgtgatggtdwarataccggttccaatmccacggaatgagtagagaaattgggcttttttatrccaccttctattattttcatcactttttgaagagaaacatagaagagactwtywttatttattctcacggtgcagaaataacaacactgtgctrtatatacmtacycaagggttccacagagagaagcatgtgactctgttctswtaaatgacctttagtacvcagcataaagaaatgtaacttttttttaatgacaaatcwaaagtggttgccttcstaagcatattcttcaataaarcttgtttwaaaamwwdhwrwrarwaawawwwraagctggttagcaggaagttgtyaaaataccagataaattgaagagggacttggaaaagttgtcctttgattaaaaaaaatttcctgttaaaaaaaaaaaaaaaaa

SEQ ID NO: 807 - DNA, 526 bp, Rattus norvegicus
tttttttttttttttttkwkktcggggcaaatacactttattcagtcctggcatcagactggcgagtcctgctgtgggtgccagcgccccasaggagggaatcccctcccctcagctacgaractagttctccaaagaccacagacagtgacatctcttcactcacatgacgttttccgttttttttcawtgkcyttttwtgttttcttaaaaaaraaawaaagaaaaaaaaaaaggaagaaaacagaaagagaaagaraaaaagagcgcaagaaaggcccaragccggagcaccaagcttaaaggaggcagctggtggcattgtcagcgaagggaacgcgtggggcaragamctgcagagacccarggcaggggccraggaggactctgggaccgtttgttcctgaratttgtgtgtgtgtgaatgaktgtgtgtgaaccacccagagggtgaacacacgccggtgagatacaggtagtgagggcaragggaggatggggaggctggaggggcggggctggagcg

SEQ ID NO: 808 - DNA, 1172 bp, Rattus norvegicus
gaactagtctcgwkttttttttttttttttktagcttttaaaaggaagatttwtttkwywwkgttyrcttakcgmaatwcacctwrawktaaatcacaatacaatgaargacttaaatcaaggsctcagaatttcgtacaarcaccaaraccaaaaatcctaaaragtaatggkattgcgtctcaraatttctccattaacttaaaaaaaraaaavrscykyrrhckcwybwdyyytmvwrsytaksarmtgmrtytasaattaacaaacatgccaaatgtttcacttttaattgtagacgcagctcmtatagttttacaaaaraagcatgtcttttcaacatgcatcaacagtgttcaatgtatgtatgtataagagcaacatttarcataaktcaactgctttaacctaaatacacttactgcttasgtacatcmtacatrrctagagaaaagcymbgmmttaagtttaacagwtaaagttactcaactttgccctatcatcctaggtgactgctatgttcaacattgaaccytctttgagckwycsatgscaaagttcacttaagagagcaggcattawaaccacaaggctggattgcaaaaactgttaaactgaagggttttamaaaaatttctttttgaccwagagtcagtgatcaaaatcaattacattccccatccamcactcatactagacatgctagacatccctcscattccattcacgcccatagatgcacggcttccgctactgtagtagctgctgttcactgctccttggctacctatgcaatgtttgattgaaaatcactggagttttcctgtaaaacttggtcatatccgctcatgctgctctggccaccatagccacctccataaccaccactcagctgctggctggctgggccaccgtaactggactggtttgacaagcccatgcctcccatcatttggctaccataagcaccaccgcttgmtcctgctgtagaattcaagaagagttctacatatctgtgttcgtaagcaccaccgcttgctcctgctgtagaattcaagaagagttctacatatctgtgttgcatatttgctttatcttttgacatagctgcaacagcatcttcatgagttgcaaactcaacatctgcttcaccagttactctgccatcaggt

SEQ ID NO: 809 - DNA, 398 bp, Rattus norvegicus
tttttttttttttttttkkkggktctgcawagatctttactaaacagttccttccaggatgacaggacttakccacagggccacagccaggcaatacactmacatycccaacacctyartttgaatacagcaggacagattgcccttggccarctgaggagggcaggctctakcartcacttytytaggggtgcatagttcarcagtttctcaatcaggtccacgtgtgcgagcagcatgcggcggcagcagtaacgcttcaggsccagagygtccagggcatccccctcggtgtactctgcctgtagcaracccaggtaggsttcccatttgttaccgacgatcttcccscwsgtgmmgcakcgaayygsswygwkcmcctcgtgccgcctcgtgcc

SEQ ID NO: 810 - DNA, 478 bp, Rattus norvegicus
ggagagcaaaagtatttcacctttataatacttatataattttcacatagcttcgtttctacaatcacaacaatcctgaggtaaacaggcagggtgcaatcattctctttttagagggagaacaaggaacttagggaaatcaaaatggggatacgaacaggatttctgtggaaatttaaatgagaatttgtggtaaatttttttatcctaaaacaactcaccttggccgaaaaatgggatgttacccaaggtcccctactaggccggaggagaaaaggacctacctcctacaggggcacaaacaagggagactaggactcaatggtcgcccaaggcccaagggtctccagtgagtgcttgagactggcctaaggtataggaagagccgtgaagagaagaaaatagacaagcaggggagggaagaattattaaacatggtcaaggagcactctacaaagcctcaggatttcttcaaggg

SEQ ID NO: 811 - DNA, 520 bp, Rattus norvegicus
tttttkykywkytctttaagttgwttttatttgtgctcagatacagaagcgacagcggatggagtgagagtcaccctttaammagcgccmttmgcagtcttcsttatccaatcgaggtgtttgtctgagagtaaagtatagatgccaggccctttggggtctccacaccttccmtcaaggccaaaagctgtgatgcctcggaaaawaccctcacatagcagagrkcctccagaatctccgtagcatgagtccttcccaccacggaggtttccggcacaaatcatakttagtccaattacagggttaaaattatmstgtktttcatcattgcagatttttctgtctatgacagtgatgttgacttctctcagagtatcagagggaggtgacttattgtgaaaacgcccccaccctgctacatgacatctggttcctggtttcacatcatccccctttttaggtagatgaaggatagccacgtttwtgttaagtgtwgcttttttctttagcccctcgtgcc

SEQ ID NO: 812 - DNA, 671 bp, Rattus norvegicus
  misc_feature (156)..(156): n is a, c, g, or t
tttttttttttttttttycacagctccwgayttattgccttgadagtccaragcacctgktracaaaggtgctggakaaaggtgagggtgagggcgccgccgctgaggctctcggcccagtggttaaaaagadcccacctgcgatacacaggccanggggambaggcccggscartgggtggakgggttggmcaggactgsyakmargtccarggacggcctcakraagacasycgtgggcacagatggggacagmgcakgaacgcacacasccgttggactccttagaccctgmwgtaayggagtmcagggcgtacagarccasmwssygcmstacatgacgcagcatctggtcttgtgcgtgtgtgggtctttgaatctcagtctctgcttargccggtacttytccakgtaggtgagctgcttgctgttgatkgccccacrsmrctkcwvtssbaygarcyssvygksatyvthgwaswwsdysscactctcgatgagagcgagagccacgagcactggargcccttcccaggcccgccacacartgcacagstacgcagctgcccgggtcattgtagaacttggccttcagcaggctcagccagtcctctaccaccttgccaggagggggcgccccatcatcaaaggggcagtccacaacagtgatc

SEQ ID NO: 813 - DNA, 757 bp, Rattus norvegicus
tgtttttttttttttttttttywwttwcakgkgacagtttwattacagtgctaatactcaggacgtcacacagsaccttartcttctatctgagttstggyaactgggttagaatgttccttgagcytcktstccttccgcacgccagctctgaggaagagtactcagcagtaactaagcaacgttaatttgattaaacagtttatccttaataacctgagacatcagtccatggatggcttctatggtggttttacagctgtctctcgtarctttggcamgtttgtcttctgacttgcggtcatgtgtttctaaacccaacatgaaactcccacgccccagctgggcttccgactgctctaacttctcagacagatyarayacytggcctgtggtatagtcagcattggkaagcamgctagaggaactcagggtgttcacccagtatttattccacaagagctcaagtagtttacgatccaaagaggatttgaaatatgagacttctaaggcataatattgtttgcagtgcacgccaaaatcttctattttattgagtgggatagtctggtactctgaaggtccttcatcaggaggcttatagccctttggatatgtcctaaaggcgccgagattcaccttccctgcagatattgttctggttgggtcaatcaccactgctacaaatggttcctgaaactgctggttaagcatctgtgtactaacatcaattccggagagccagcagcccctcgtg

SEQ ID NO: 814 - DNA, 489 bp, Rattus norvegicus
tttttttttttttttttkkywktacwtgaaacagactttatttccaggaacagcagttatgtctamttgctgctctatattttgawawttcatttaaatacttagaawatattcaaagtcaaattgctaatcactcaatttccctgctgctgccctggttccccasgtggsctcttatgayactccatgtaaacactgtatttggaaggatacatagatcggyatccctagagtcacatgatcascataaatctgtgaaaatagcmwgrcykaaaaataaaagtctcttagtgctctgccaayaggctttggcataatcttggcaatcacttagatacwtctttctctctgtttttgtggttataattttttcccaggtggmaaatartctcatattttgcagacgttgtccaagctagtgaccatccatccatcttcctgsgttactaaagttgtcggccgactgtgttcagtccacctcgtgccgaa

SEQ ID NO: 815 - DNA, 461 bp, Rattus norvegicus
gcggccgctgggctcakatcgccgyccggaggcgacgtgcgcagcgtcatgayggyctccacgctgaagccgggcagcccgttrggcgcggcggcgtggtgctccggcagcgagccgtctggggagccggcasgcgtggmggctgagctgcggggactggcttgcagcgcgccctcgggactcagcgtctccaccttggtgatgaccggcagcgcgggtgacgccgcctcgctcttgaccaccactttcttctcggcctccttgggcccgtcagctaccggggtccctgtcggggcgcctttggccgargcagggggcggctccttgaggtgggsccgctcctccttatccttgggcacgtccttcttcttgaagcgccgccgccgccgcakgaagctgccgttctcgaacatattgtaggagtccgggtcgagcgtccagtagctacctttgcctggctt

SEQ ID NO: 816 - DNA, 461 bp, Rattus norvegicus
tactcagtgtatggggcaggcagcacaggtcaggaggcgccgctttgagcgtgctgttggacctttccagacacacaccttcaggatccattactcggtgcccatcaaagcctcttatcaagacaaaggcttcctccacaatgaagacaaggtgagcacactgtggagagggttcccaaatgtcgttacttccgcgataacactgcccaacattagaaaacctgacggctatgattactacgccttttccaaagatcaatactataacatcgatgtgcctactagaacagcaagagcaatcaccacgcgctcagggcagaccctctccagagtctggtacaactgtccttaacctgactggcaaagaagaatgaaatgaaatgaagaaaacagtgataccttttgacattgaaatacattttattaataaagaatgttgaaatgagaaaaaaaaaaaaaaa

SEQ ID NO: 817 - DNA, 574 bp, Rattus norvegicus
tttttttttttttttytytttccagtaattttattgtatcaaaacaatccctcccattttaatggcaccattcttacccccaaactcttaacacttaaccaacaagctgttgaacaactagtggggctatttacatcttccctcccctgaaatgttcccatcccaaattcagtctgttaggagtcttgaagtaataccaggcccagaaattccttggcctttgctcagaagcactatgctggsgagttagagaagaaaggcattcctagatgtacagtaggmgcgtggaaggctagagcccttgaaccagggagttcctcaggaaaaaatggaattggggcttgtmswmgwgmsgagtagatccatgaagcttatcagccagctcaagattcktcatccatgacatctagaatgttactcaagagaattttgaaactaggacgttcatctgctytctcatgccagcagctgtacatgatggtatataccctgtctgatgccaaatgaggcctgtagagacgtaagccttgagcaatgtgttctgctgtctcactgttagtaaatctccctcgtg

SEQ ID NO: 818 - DNA, 296 bp, Rattus norvegicus
tttttttttttttttttccyttaaaaaaactttattgaacacsggatcccccaaargccacatatcaaaatatacatgtaaaaaattttaatttactggcagtagctaattgaaaatataaatacaacawaaawacctttcagctatcaaagtcartataaatgggacctttgtcaccatgattttgacccaaaatcattttatasgatatctgacatacttgccttctgccattaaagaaagcasaagtgctcctgtagctgctgtaaactgggtgtastgkgagttcctgaaat

SEQ ID NO: 819 - DNA, 532 bp, Rattus norvegicus
ttttttttttttttttttyccwaagtcacatgtttattggtcaaggggacactggacaggctacgtgtcacagtcctcagggacagcagccgtgatgatkaragacggctccaggaccccggagctagcaaagctctcctctgaacacagtctctggctarggagttgggaggcaaggccaccctgggtcagggactccacaatgacctctgcggagcccacctccargtctgcargtggctggagarccamcamcamcatcttctcatcgtcgatgatgaggttccggagcttgcgctgccgagggttgtagttctccactctatcgtggatctccatgtgcctccgcaggtgagcctgccgagtgaacttgtagccacactcggtgcactcgaactttctcacgcctttgtgtcgtctgacgtgcacccgtaactgttccactsctytgmmggtcttgccacagatctggcagaaatgaggtctgccctcctgatgacggctggccacatgcctcagaagcctcgtgccg

SEQ ID NO: 820 - DNA, 544 bp, Rattus norvegicus
gcggccgctgccagcagtgttcatgtttgggattcaggagaatattccgcgcggggggacgaccatgaaggaggagccgctgggcagcggcatgaacccggtgcgctcgtggatgcacacggcaggcgtggtggacgccaacacggccgcccagagcggcgtggggctggcgcgggcgcacttcgagaagcagcctccttccaacctccggaaatccaatttcttccacttcgtgctggcgctctacgacaggcaggggcagccggtggagatcgaaaggaccgcttttgtggactttgtggagaaagagaaagagccgaataacgagaaaaccaacaacggcattcactacaagctgcagctactgtacagcaatggcgtcaggacagagcaagatctgtatgtccgcctcatagattcaatgaccagacaggtgagaaagtttccgcctctctactccttgtattttcctttctgctgagctggggttgtcctgcggccgagagagcagactgacaaatggatctcctgtatttgtttttca

SEQ ID NO: 821 - DNA, 766 bp, Rattus norvegicus
  misc_feature (20)..(20): n is a, c, g, or t
tttttttttttttttttggnaaaaacttcagtaatttatatcaattttaagcgatactttatatacaatggggaaaaaaacacatgcatagtccaaatacaatgttgaaaacagcattttcataacaaaaaaacccccgaacactaagtgttaataccatgtacatgaattcaakwwkkwyywyyytttttgtctgttgcacacagtttatttaacaatatgatataagaaatgagywsgwrsgttaccattctrtacagtgattgaatyttyttkwwttttyttatttatagtaattatagcgcttgcatgatttacactagaattgcttttcctcatttcaagtttcacatagaagaaagaaaagaatgcttcttctctattaacattagcatggtctaagagagtgatcatccctatttttgtctaaaaccagttttatcagagaaacaaagcaacaatttytacatctgcaagacaagaggctggcttaakccagcatgtatagatagatgtgtgtgggtgtgtacatgtgtgcacgccggagtcaattcctatcgtccaggggtaatacttggagatgcccacagagttcactatagaaaaaaatcttcccgcaacatcagctcgttatcgggacacayywyrwgmygmattmtttctggaascagtttctgagtattatttttcttctcacttttaaacataratgtttaagtcttgaaaattcaaataaaaaatatgagtgtactgaacttgccttgtg

SEQ ID NO: 822 - DNA, 525 bp, Rattus norvegicus
agwwtktkwtytwtwytttactgataaaatagaatctttattaatgaatagtgtttagtcatagtttcaacaactattctctttcaacccggaaatgacggcaacttctgtcccaacaccccaagaacgtcgtcggcttttccttcctaagtctcatacatgagtgggatgaagatataggaactgtgccttggggaggggtcactgtgtgagggctggtgcagaagttgctgggaggggactcctggcattctgtccacccagagaaagacagatttgctcacgctcactgcaggcgatgctggccctgccgagcaactagcacacatagacataaggtctaagctggccaaggccastgagagaatggrtactggttcaggagggcagctgaacagcaagagccacagagagagagattattcctgaggtaggaacactgtatgcaggtccagcctgggcgggggctgttgctgaagaagctcgtttagaggaacagtggtatctccaaacttccacaagacc

SEQ ID NO: 823 - DNA, 441 bp, Rattus norvegicus
tttttttttttttttttaagaagcaggcaaaacttaattttttattttccatccaaattcttgccaaagaattctagtccgaagagtcatagcagccttctctcaccttctacataaaatgcatccctccttgaaggaggatccataacagaagacaggacacaggactctgcagagcggatatggcatcattctgatctggacttgattctgtggtcacttgttttgtagtcacttgtttggtagtcactggtttcgtggtcactggtttcatagtcactggtttcgtggttacaggattctgatggtccacaggttcggtatgaagactgtacgaggaagcgctagtctccaccgcttctgttgttgttacctcctcattcamactgttcaacctatcctctgactcawacgcggagtamtcaaccctcgtgccgaatt

SEQ ID NO: 824 - DNA, 557 bp, Rattus norvegicus
  misc_feature (516)..(516): n is a, c, g, or t
gcggsmrccmytggyccgcgcgycgctcadgggaccctggkcwccgccccggggagcccgcarggyccggcgaccgcgccgcgagcgtgtgagcgcgcgtgggcgcccggcawgccggggccatggtacaacasaccawcaacgcsgrgaacackgwggctttgcwggctggggagagctcasactcrggcgccggyctggagctgggcawcrcgtcctccccgacgsccggctycacrgygtmcacgggtggcaaggcggacgaccctagctggtgcaagacgcccagtggycacatcaagcggyccatgaacgcctttatggtgtggtcgcagatcgagcggcgcaagatcatggagcagtcgcccgacatgcacaacgccgagatctccaagcggctgggcaaacgctggaagctgctcaaggacagcgacaagatyccgttcatccargaggcggagmggmtgmgmskcaagcamawrrcwgactamcctgactacaagtaccggccgcganagaaggtgaagtcgggcaacacgggcgcgggatcggcggcc

SEQ ID NO: 825 - DNA, 857 bp, Rattus norvegicus
cacgaggggtgtgtccgggagagctacagcataccagggtttaacggcagtgaagactgtgccgcgctggaacagctcctggagggctatgaccagcaagaccaagatcaagtgtccgaggtctgcaactcgcccctgttcaaatacatggacaatgactatgctaagctgggcctaagcttggtggtcccaggaggaggaatcaagaagaaatccccagcgacaccccaggccaagcctgagggtgctgcgggtgctgctgctgaagaggaggaagacgagtattcgggaggcctgtgctagtgccctgcctgcagggatgagaagacgggatgctgacgagcctttstcatggaactaggactcgtcctgtggacgcctctgcttcaycgaagttctgatgttgaatgttaattatctgaagttttagttttccatttsccacaccagccattgtatctactgcctgtgaggcattctttcctttctcttgtaagcagaaaataaatcgtcatattttaacaattgawwwaaaaawvwmdarrccaaattccagataaatgatatcatcagcaaagcaggaaataggtatactcartcttttctcttgggttctttttattgttagataattktctttgcattttatttaatgccatttctaaacatgctgggttttgggtgaaaataataatttcaaaactgatctggttctttccaccgtcttmccatgttgtcacttagcgcccacrcatgtccccgytaagagcatcaacaatgccaaaaagaaaggcagacagcggttctcagcaggttctcctccaggaccgtcttctagtctgactagatgtctgact

SEQ ID NO: 826 - DNA, 432 bp, Rattus norvegicus
tttttttttttttttttgggtttttaattctttttattgaagaaaagaaaaggagagaaaaaatakattccccaccctgcttctttccagagtggtctcagtccttccccggggggctctgggtcaggaccatgctctctgcctgggtctgggaggggcccarggtcctgkaadggagtgggggggtctggcygsttcccamkggktakggggtatctaaaaatcggagccaggctggtgggccgcaggcagtcctctgcagtggtggctgaggtgggcatcctggggacgctggccacaccaggcctgtccatgtccacagccgcttgcctgcctgcccggggttgcccaakgagggcagagtctgaggcaccatccggcctctggattcctgtgcccgccggccatgccacctcctgtcctgtgttctgg

SEQ ID NO: 827 - DNA, 642 bp, Rattus norvegicus
  misc_feature (37)..(37): n is a, c, g, or t
  misc_feature (49)..(49): n is a, c, g, or t
  misc_feature (621)..(621): n is a, c, g, or t
ggtaaaaaattccaaaagttgtaagtgaaataccagnacacctaataantggtttataaaaacctctttaaaacaaagaggatagatgatcagaataaagtatwwwwyttywkwwwtwtagattttactgaaatttatttagggtgataaaatattgactctagggggaaatcatcaaactgttgttttctgattagatattttactaaccagttgaggtggtcatcattattattttttacttagtggcttatctagtattggctgaaggtaatttataagaataatcatcatcttcctccaaaggagatgagaaactactccagaagaataagcctcgggcatcacaggaagtcaatcaagacagtgtgggaacgttaggttgatttaagctctattttacacaatgtacacatgtacaatatacagtgtcacagctatacagttttgcagacagggtttacttacatttctgcgtatgttctttttgtctaaaatacaaatattccatgaaagtctatttacaaactaggaagctgcttcagaaacagcatgacttagatataaagtgaaacctcagtacagtcaaagtgcaggtcatgtttgcagtctgtctctatnccatttcctacgcgcagtctg

SEQ ID NO: 828 - DNA, 507 bp, Rattus norvegicus
  misc_feature (483)..(483): n is a, c, g, or t
ttttttttttttttttttbywwwtttgtaaagaagcaaagtttactagacaaaaggccatacatgaractggaaaggaagtasttactgtcctttggycttacagagtgcatttttctacttcgtasaagtttaagaattctgccagtgaatgctttccaccatttccgttttcagagagaacacaaggggtcagaagatcaccccaaataggcttcagagtcaggctggaagggmagtttgcggtgggcacatttcatcttcctgtgtckgcctaaagccttgtccacaggtcttgcatgtawaagtcttctcccccttgkgkgtcatctgatgtaaggtgaggcgtgacttctggataaagacttggscacactctctgcacacactaagcttctcttcaaaatgtacctgcttatgtgcgattaaagctgagcaattmythrwgcykartycwygctgcctgcacgcatatggtctctcncttgaatgcttcctcttgtgtctg

SEQ ID NO: 829 - DNA, 1487 bp, Rattus norvegicus
aatggaagctggggcggccggggagacccaggtcttgcagccaggcatactggggatgatggatcgtgctctgctttcttggttcctstsgwgcaatkcktkcgcccgcaatgagcttcctcaaaagcttcccgccccctgggtccgcagatggactccggctgcagcagccagacaccgaagctgtgctgwacgggaagsggctcggcaccggcacgctttacattgcggagagccgcctgtyttggctagatggttctggattaggattctcactggagtaccccaccattagtttacatgcggtatccagggacccaaatgcttatcctcaagaacatctgtatgtcatggtgaatgccagatttggagaagaatcaaaagaacctttctctgatgaagatgaggacgacaatgatgatgttgaacccatttctgagtttagatttgtgcccagtgataagtcagcattggaggcgatgttcacagcaatgtgtgagtgccaggccctgcatccagaccctgaggatgaagactcggatgactatgatggagaagagtatgatgtggaagcacatgagcaaggacagggggacatccctacattttacacctatsamgarggactatcccatttaacagcagaagggcaagccacgctggasagatkrgaaggaatgctttctcagtctgtgagcagccagtataatatggcaggcgtccgaacagaagattcagtaagaacttacgaagatggcatggaggtagagaccacaccaactgttgccggacagttcgaggatgcagacgttgaccactgaggatgactcgtgtgacttacaattctgctcataactataggcaagaacttgatgcctcttcactccagaatggagctggtgaaaggcttwttttcttytccaaaactcatttctcaagacaaaytataatgagacagcaagctgtcaccagcagaaaagactytgacctctattaacaaaggtgaatwaactgaacgggtttttgtagtttctcatttacccmtaagcttcctgtgtctagttwtcttctgagagcctctaattcctgctttgctgtgtgcaatctgtcagctacgagsctgtgtgtcswgtgcwcaskcybacgctggcaaaagtgaggtgggagcttagatgtctctgggacttaggaggactctctgatccytgagataaaaagcaaaggcctctgagggcacagctttagcattctccacggacgcatgggccctctactggggctcamccacatctcgtcatgacaaatgcttgtgtgctacttctgttcctcckcatttaccatcagctctgttacattctcctagcttaggtccttgactgtcacagagtaaatcatctgaaatgaagtctgcaaagtactctcaatgatattttgtctttgtaatagttaaataaatctgggttttctwwaaaaaaaaaaaaaaaaaa

SEQ ID NO: 830 - DNA, 1068 bp, Rattus norvegicus
  misc_feature (27)..(27): n is a, c, g, or t
aatatttctacatacaagaagaacatnttggccttgtcggatggagggaagctgtaccgaacagatcttgcccttattctctctgctggggacaactagagttggtggccacaaccacttgctagtgatacattgtatctaaaaccataactgtgcgctataaaggagtaggctgtattttcttttatatctgtaaattctactgcatatagagaattatccaggatgtgtggcacattcttttctgcttgtttctatactgtttgtaatgtacagtttttgtaagcatataattgaaaagaagaaagtctatgcttaggccagtcagtakaatccattttcaaagatgaatctaacatgattstgctttcataaatmcagatgaacacttggatttccctaaractctaccatytcaacaattctagtgtcagatgtgtaaatgcacagctgtcagtgagtaaaagamtaattcatgacaagccaagtgtyttttaayytaggcaatcatagaactgtcccacaaagcacttctgtgctgtttccatctagtggaagggatgtgcttctgcttgtgaagcaccaaatatcaatagttaactatggctttatcataaaaygatctccctagrgatttaatttactgatcagtggcatgtvtactgcttgaatagataccacactkttggttcaagctggcttggtggcaagggaaggtagccagatgacacataratctgtctgrtactatgcctatatttmcaagaagtytwttgcrgrgrgtwtgmccttagcccmttttytaaaktattttcatgtgttccmgrtgacaatkattbtagtraactgctgttttgygtcwtawwmwrwrwrwamwmwmtgattaaattcaatgtmctgrgtawwmwrrwrwmwarwwwgcatacttcctgaattttctatgtagaactgttcatttccacccagggtatctgctgcctctgaaaatatttttttctagctataactactctatttttaatatgtaattgaattttaatgtaagattcacagaaacctgatcattga

SEQ ID NO: 831 - DNA, 632 bp, Rattus norvegicus
gcggccgacaaactatttttttttttttttttttttttttttywwytdrmwggagwgsargtttatttwggmtcmtrgbytsrggttasagtmggymakggcwggggagtcaaggcatctgcgtgagaaycratcagaatgcacacatggsagttgctccactctttctstactcttctagtcscaggatcctctacccagggaatggtgccatccgtgatgggtgagtcttcccacttcarcagacattcataaaggcccttttccctagkgactctrattttatttcaagttgacaattatcattagcagagcaggccatgtytytgcctcccccctcctaacacatgacaggtaaraggatgaaggcavaatgtwkgggctacagtgcaagcasgasgaaratatatcctmstggcttcatttcgctwraraaaactcttaatatggggaccttgaaraaatatcatggactcyacraatytgctgcttyttgaggaaagagctaaagttcammtcstyyactacaattcattcatttctgggcctgcttggatttgaacaaaaatgacccccatcgggtacgttggtagtggcactaatagcaggtgtggcctttttggaggaaaagt

SEQ ID NO: 832 - DNA, 770 bp, Rattus norvegicus
  misc_feature (168)..(168): n is a, c, g, or t
ttttttttttttttkttyybtttaaaacgttktattcaatamtatatakacttttaaaataatatgtarstgyscaccatgccatacastgcccccatcccatttgtggwctgkggycagctavtccttggggtttgctggakcaacaggcabbmacgggatgggtcnagggcacggwgagcaacakwaaccaacaaccatttttgcwtaccctyywsrtkycscatgcttyctgggtcakgargaabtcaacaggwagccaaaggcatgtgmaccttttacattcggaagtgaggwctgatytacrgyggygggctrcmsttcgggtggycwadttcmtgttcgccaagcctgccamcattttgkgtcygctctcgggacgtkatctcsctacacscgttamkacgtttygatttggktcytgttstgcytatggaaaagtgkgaggaaccgcaacagaccgtcgattccccaggsttmatcgtgctgcggtgagaccactggaaagcacggtgttctyagcacaaggctgkgactgctccttyaccaccgggtagaagtacgggtgctccatggcctctttggsggtcaatctctgttgatggtcktaccgcaggagcttgtcaagaagatcaagggcctcggggctgacaaggtgtctgttctcactatggataaagttttcccagcgctacggtgaatgctgtcccacgatatcattgaagtgtgggtataggtatatgtgatacttcttcagataccccctcgtg

SEQ ID NO: 833 - DNA, 1136 bp, Rattus norvegicus
tctcgttttgacagcatggaatgtcctcttgaagagcaggtttatatatttttttcttcttctatcctccctcctgacttgataaaaatctcttctgctattacagtgtttcacagtggcggccctgtgtctttgtagcataattcactgggcaaagttacaggtgattagatgggggctcagctgtgtgtgcagtacctgtgcatgcactccttggagtctgggtgccaccctagccttgggaccaacatgcctgatggtgtcatcagagtgagggcaagcctcaagaagaagcaacccaatttaggtggcttcctgaccttggtccaggattgtcctccagaagctatcataaagcagtccagggcagcaagtctgtcttaaagaagtgtatacactgacaagttatgtgagagtacagcgaggtcatcatggctgagatgaamcaaagccagsragscmgaaagartsckscamgarkcagcgctgtcaacctttaactcctgaagatgcagctttcttcagattcaaaatcattctgtgggacacctggccaccactgaggraaaccagtgctgtggtatatgatacacagccttgcactccttaactmtgctgtgtdaggtgcaargtgggtgcctggragagcctgggctggcacagggctgggcacatagcaagtggagatgmcctacrcaattcgtgggtggrcggggggcmcacwccagggacctragkaaggcmctggcttctgtaawatttcctctgcctctaacaggaaaacttgagtctctctgttctttgtwagwatctrtcttctatwatagcaaatcctatatccatggctttaatggmcattctaaaatttgmtgcactgacagtcttaatatttctattcctstccctctctatamtcwttgaaracctcctgawtrrccctragraagtaccaggggtaacagtatctytgggtccctgtccctcagcccataggccmctgtgataattgtctgcttagcatttccatatttattgtaccaatgattgtaatgaagatmtacactgaaagtttgagattataataaaaacatttttcmcawmwramhrawwwwwwwmmmraaaaaaaaaaaaaaaaa

SEQ ID NO: 834 - DNA, 916 bp, Rattus norvegicus
tttttttttttttttttctatctgggctctatagtttctgtttcatgactaaagaaaaaatatatatgtagggttaaagatgcttatggtggttatcgtcatgaaaacctcatcttaactatgctgtagaagggacaataaacacattctacatgtttctggaggggacagccaagctctatgctacacagtttagatgtgtaaatcataggggacctgccaaagacgtctccagtgtggcgcctgctgtgcacttctgtgcatacacragacagtgtgtgtttcgtgtatacagtctggacaacgtttaggagacacatttgagaatacaactattaacacagaaccagttggcaaaatgacaagacgaaaaaatattattacttaattaaaccagggtgtgkttytkkwtwtyywkktaaggattgcaacagaaagtaccttttatagagtcaaacatattacatgttttcaaaataaatacatccatgtcctctaactggctataacagaataataaactcacatatattggagaaactttgwgtcttcgaagcagctgcctaatgaggtgcactggtgttcagcaaggtgggaactgcatttaaaggccctgtcacattctttacatttgkactgcttctccccagtatggacccgctggtgtcggttaaagcttgatctctgagtaaaggccttgccacaatctttacaacagaagggcttgtccccagtatgaactctctggtgttgaataaggcttgatctctgattaaacgctctaccacagtcttgacaatggtaaggcttctcgcctgtatgaattctctggtgttgaataagaagtaagttacgggtaaaagctttgtcacaatcttgacacttgtagggcttctctccagtatgaattctctgg

SEQ ID NO: 835 - DNA, 720 bp, Rattus norvegicus
tttttttttttttttttthwkyttcctttggsaaatttaatgtaactctgataccamaataggacaacaacacaggaagcaacacaaagcaggaacagcagatttttcagtgtttcactcagctgatgggtaatagtgcttaggctgctgtgtggacaacaattccaaagccgcacattggctccgtaggaagtactgctgcggttagcgttatccgtaaacggggaacargcctgaaactttactagccgtaagagaagccacaggaacccaggccattggstccaccaccaaagccagtaccggtgcttggtggtccaccgccgaatccagcattggtgctcagtccaccaccaaagccagtgctggtgcttggtggtccaccgccgaatgcagcactggtgctcagtccaccaccaaagccagtgctggtgtttggtccwcygccgaatccagcattggtgttcagtccactaccaaagccagctacagtgcttggtcctccaaagccacctgcagtgcttggtccaccaaagccaggtcctgtacttggtccaccactgaagccaccartgcttggtccactgcagaagccagcaccagtgcttggtccaccactaaagccaacaatagaactgggtccattactaaagctggagccggtgttggggttcaccagtaarccactactggtgttggatcaccgccaaagccatgatg

SEQ ID NO: 836 - DNA, 1379 bp, Rattus norvegicus
accctggcccccgctactgaggagaaagatggagcccgggtcttgagcccaccttcactgtaccgttgcacttggtactgtatatgtgcccttgaraasrcgmgkgggggatttcacagtctgagaatgagtgtgtgtgagtraggcggtacccacattctcaacttcaagtcattgcagtttctttttcccagaagacaaaggggtttsatgttgcatttcataaactaactgaagttctggctactgatgcagcacaagaggctgtytcacaaaacgaggaaagacgctgtttatgtttggtttggtttcattttaattattctagggamrrcacwgrcgaatggtcagagttcctgtcctratcttttcatcaaggcgcctttcctgataatatggttcagctgtgaatgtagctatggggggagggggsaaaaaagaaaactctggagttagaggatatagaaaattaaargyacagttgttacaaataaaacgcagacttcaaagagaaaaasccacaacccaaacyaaatttaaatacttgaaattggcatcacaaacaagctctctcctgacttgtawtgtggcagtcagaatgcccccagaaaactgtrccaaagagtttagaaaacagatktacaataaaagtraatacacactcaaaacgcaaacttcaggtaactattttgaattgcaaatgacgaaaatttaatgttgaacgatctgataaaataaccatytggaaamwrmwwrrvmwwmwrwwwwwwtctttgattgactgcaatgcgatattggtcttttgctgcacttcaaaaccaactaaccagtaagacaatgtgtgtgtgtgtgtgyatatgtayacacacacmctaaatrcmmmtgttswgatgaatatgyamccagaaaaargwgctatkttttcactgwaskgtacgattaacaaaatggcgccaaacattccccctgttcgcacgctttagcatttctctagggtgggccgggcccgatttcaccctataggggtcaagtcacccttaattgtacagccttttaccactaagagagcgttaaaacactgccggtcccctgggttaccccactaatacactttccgttcacccccttttattcagttcgaaaaacaaaaagagcccgcaccgaaaggcttttcaaactttgtgcgctggaaaacaaaggccatttttcccctaaattttgttaaaatccggaaaaccttgtatttaccccatttttacaatacgccccatctgaaaacccctaaaaacaaaaaaatcccgcgttggccaggggtttccacgtcttacaaagagccccttaaaaacggttctggcaagacccattaaaccgtcgtttcg

SEQ ID NO: 837 - DNA, 988 bp, Rattus norvegicus
cacgaggtttttttttttttttttttywttwacaaaaggttaagctctgtttatttggagtcacaaggagctgattragtcactgtgactcaaraccacaaagaaaccctttsccycmacttcartctcaarcctgtggtgaaaacctcgaccagcamaaktgctcttggggcccattcacaggtttacaagtttcycgttgagggcaatctgtractggktgarattggccaggtargtcaccatcagcaggtcgttgatgttgctgttgagcmtsgtkycraagtcatcaggaactatcttgggtacttggttgrcaaggctcatcaagaagcggcctactgtgttgtcagcagacactttcccagacagcacatcytcagcatactgcaatacagtgcttakagcatcctggawccgggctgaggcccctcccacttgctgtaagtcactygagagtccaatcacccggttggggctaaaacatgtcttchtsrtgmsgtcaactccaatgcgctcagtgtcataatacgcatacttcactgtgagaggggtgaacatcactcccatggtccyccymgdgmcgcccattaaagtgctgacataggccttgatgctcatgcgcccattctgaagacccgtgtccactgtraggtgaatggggttcggggcctccctgctgtagtactcatggatcagcaccgagtgctctgtgatgtcgtgccctgtggcataccagcctaggatgagctcatttggggagactttcttatgcaattcatacatattcwtggcaaattccatgtcaacagccacttcatcttmtractcattgtgtggcactgaaamgcagytgkygacwtstrcsgagtgmttgwcaacagttcccagcagggttccgataaswcgggcagctccctcgktgcggcgttcatagmtgwcmamratcgaggccraaatgactggatgtagcctgdccwmkyggccg

SEQ ID NO: 838 - DNA, 1097 bp, Rattus norvegicus
ttttttttttttttttttggctggagtgacaagtttattgtgaggatcctgggttggggtcatcagaggctaggccarggctggggctagggctgggctcagtctcgccatcagggctgccgtcctctgcggacctgtcccasgggaagctcggcagcccgtgcatttgctctcggtrgacctggtcaaaagtctcactctgcgccacagtgaagtggttcttccagtcgccactgatccctttgcgcaggaacgccccctggcggtggtctakcasgctggscggcagcarcgtgtarttggacatgttattggccttcatggcagcaaragctgaatgggccaccacagagctcagggcctcttcacccagtggccggcccaggaactcacagatgagttgcacggagcctcgcaggtcctgctgcagctyctcgtaggtgataaacaggaagttctctcggccccgcatmcggatccagcccttgatgtggtcaaaccaggagccaaactgcacttctcctttgaggaaattctgaaggaactgttcaggtgtaccagggtcctttaattgtacagcaatcttagagtaataatagagggagaccacgacgtcccgggggttccggcccaagtaaatcaccttggccttggagctgaaggcggccttcgtgaacagttcaatagggaggtgggagcacatgaggcggggactggsccgctctgsaaggctgaaggcacttatggtggtctcgcaccagggtgcacgttgccagatgggctccgaacggatccacgaggggtccccatctttcaggattaagcagatgatctcaatcatccagttggtgcctgatttggggtaggtgacgatgaagatgtcgtcgtcccgcacaktgctagtgttctcggccagactgaggctctctggtgtatacatgccgactggaaagggaatgcctttgtacctgaagtattcmccttgcagcttctggctgaagwkmggrrasscwgktstccaakgarsmmcawrgggycggsskctgtggcccgtccatggcgggcagggcaggagctagccgggcgtcggggccagc

SEQ ID NO: 839 - DNA, 724 bp, Rattus norvegicus
tttttttttttttttttkyyktwyyktwwwytkkkwaggggtctttccctttatttggcccactgaggtgtgggcttgaagtttaaataagatttcaattaggcagggatgctgtacagagggatccaggtggaagttgaccgggtagcattcagtgcacctgaggctgggggtgcccgtggcaragccctcytggaggctcagggggtggacacagcttctctgcctcctgttccactgactggctcccgtaggcactgtcttctttcacctctgtgctgggcagcttgtctcgggtctcargcgccttcagcagcctaactccctcatgaagacccatgtcggacaaggcttccaatagacccaccaagtctccaccagccagcttgtaactacgaaggagactgccactggggragggggtcttcywgtatgtgtccaccaggctcytcagccccagtctctstgccagctcwgcccagctgccctgggcttmtggcccatmtagcagttgctccaggttctgcagggctgcatcccctagtgacagccctggccctgcagggctgggtggggccaggggtggctccgtggtgttctgagcagcgttcaacagcagggtcttcaccttggtactgcgagtgaggtcaagaggggtatggcctcggaagtttctttgggtatctgtctcaggcccctcagagtytgaawmgctcccagaggc

SEQ ID NO: 840 - DNA, 669 bp, Rattus norvegicus
ttttttttttttttttttagataacartgacgtgtttactctgawatgctgagcggmaagcgagatakatttargggaatttgagaagccaggaaatgttcwttcaagggttargtccgtgcaaacaccaagtattctgccactaagctacatccacaaccgtctaggggagttttatttaagaggcaaatgtggaataagccttgaacatgggatckarktawkgatgaaattccatggkctcaaaamgctacatggaaggttctggwrgycaascctggtggtctmcaaccstggkggaacccccaraccatttgtacggatctctgagacacactttgtgcargggctcaarggygastcaaaatgcasctgctgaaagtctagctcamcadcarccaracggyagcaccaagcctggagcttggtgatgcaagcctcakaagactccggaggctttgtcatgtgtggctttagaagccaggcatctgttgtgtgtgsgacacttgcccaratttgatatcacggctgtgctcaagggctcgatgaaattttgttggctgcgtagaacaaagacagttttcgcctctagaaattcttactacttgagttttacacttgacttcctagctttagctataatttcaaattcgcgcacaatgttttgta

SEQ ID NO: 841 - DNA, 1008 bp, Rattus norvegicus
tywwkttttttttttttywtytttyttttyttcttttattccgttttacacgtccacgtacgtcatcatcacaacatcccatcaaaatatacaaacagcacgcgagactctaagtgtctaattagtactccaactcaacagggctgactagtggaaatagcatgcgtgggtcgtttgtcttgcaggatgcctaaagagggacttatttgtcaccgaatcaccaggagcaacatgatatgggattggttttctttctctcacaagagtcatgyacttcatttcttgtgcaacgggaggacgatgacgaatgccgacgctgacagagaaatcagccagaacaagagggaagagaaggtttgattggcagcagtaaactgccctgccttcgwtggttggactttacttcygtgggaatgagatgcaccacatccgaaacatccttacccttcctgttggtgacaaaggctctgcacctcaccccttactttccgctgccttgtgaatttcarggctggccagaacgaacgggtttgtaaatctcaagtttcacgctwaryytmktgsmsaacatcccatcacatccctttccctcccttctgccatcgacatttccacagacatgcgcaggacgatgygggttagtgggtycttctctgtggttgagtggaatcgacttccatgacaggcaatctgccctcccrgtcttgagaaatctgttccacttgcaccttggttcgtcaccaaccagcagctcttgtcaacgacaagagcagaattacatttcgaatcgttcgcaggatcgggaaccatctttcaagtaaatgactagagttaacaatggtctaacttctagggctgcggtgagagagattccaggagatataacaggatgatgccattagtgaaggagacatggtttgtgctgcgtgtccctcgaggagctcagcggtcctccctgctttcgaggttgagtgtttcttctcttctccaacgtgaaaaagcctcgtg

SEQ ID NO: 842 - DNA, 778 bp, Rattus norvegicus
ttttttttttttttttttywttwgwwagbtwaayctttattctgttgattatayaaaagccatacaatattaawtarcayamhmtattgamkgttttacwtawgtggtgtataaattttastaacaaaggtttaccatgaatgtakagctgaamtacggtcatgatcggcaagtcaaggataatatakaatttgctacatctcatgatttttcacaagaaagatctgcttctccaaactcatgaacactcactywywttkywyytyytttccawgtgacatacwttattcytgtttttttgaacaaattctggaasagagttgtgasgatcgcartgagaacggatcccttcattctcggcakgaagcacygcactggcttgaggcttttaactttgttggaaacggttatcttcaacaacaatagatcttttaggagccacgtccacaaatatatatcgaaaatmaaactggccactcctcgggttctcttccacttctgcgtgtaccgttccttgcttccctggctcagagccctcgatatagaacttcacacggatgcgctttagcccgttgtttgcatattcagtaaagctgacatgttgtctccgcccacgtctcgacatttccccatagcctttcacaggctcgccaaagacactgatcacctcagggtgtgttctgcatttccctaaggctttcccatagatgatgttaggactggatgaggaaaacagttctttgaagatcgtatataacaagctgcctgtaatgctgac

SEQ ID NO: 843 - DNA, 726 bp, Rattus norvegicus
  misc_feature (75)..(75): n is a, c, g, or t
tgcccgagcgataccagaacctgtccccggtgggctcgggagcctacggctcggtgtgtgctgcttttgatacanagacgggacatcgtgtggcagtgaagaagctgtcgagaccgtttcagtccatcattcacgccaaaaggacctacagggagctgcgrctkctgwagcayatgargmmcsakaatdtrwkyddbhwkwkgsmwgtaagaaagtgtaaagccaattccagtgttggacgraacaggtctcgtatttaggtcaaggtgtctccattctytatcagtgcagkgaywtgcagttctktkggssagrdtagsamyytksatcatctggaryyywgawggaggccgactggccaggcctcaccgcctcagtatgmagtccagctccacgtcatcccctmacaatggttagtagcaacgtytgggtttgaacsccaggsgtggytatwktattgaggatsccywtgcacatgtgvccatsctgtgttaggmctgtgccccagggcccggacttkaagctakakctggcagaagagctcytggcatccatggtgcgatgctgccgccacccagtttswccattggaagacaagggaatkmgaagactgctgtstatgtgtatttgtgaacttgswtgtgatctggtatrccataggatgtcagacaataycactggttaaagtaaagcmtatttttcagrttcaaaaaaaaaaaaaaaaaa

SEQ ID NO: 844 - DNA, 502 bp, Rattus norvegicus
ttttttttttttttttttwyttgagctccatagtatattttttttctcawtaaaggttcaaaaccaaaagcggtttctcwttgsagsaaatatacattaaaataragtctctgtacagccaagggmtctgggccctggyttgccccatggmcctgcgcctccctggycaaacccaaaaataaatatagtgttattgctctgcagggcgtaraggcagtgctgtcccccatcccttgargtgggagctgatagggggccctggycaccccaggggtccaggggctggagcctgcttggagttattgcttcaagggggggcactaatgcccaatgcawtgaggagaggagcgaaggggcagggyctttgctttccaagcccccctctgctctggagaggaggtcggmgtaagcagcagyamaagcatcacccactgggagactgtggtctccatccccttccctccctgagatcagtttttgcctcctacacatccccctcgtg

SEQ ID NO: 845 - DNA, 827 bp, Rattus norvegicus
tttttttttttttttttaagagktwaaatacagtataattatgtaaagttaaatggcacatgattargatttgactaaattcaattaatttgaatttttagtccakagaattacattcaygcagtggtatgaagcattgattgaattttatttttaatgtttagtagttgttatctactgtttgaakatgatgttctamcagtttaaacattgtggkatatamaacatatacatatgtttcttgccgatttttgagatgttgtaatattctgaaccgtgcagatctcgctgccaataaaadsgaggtggcagcttcatgagtctgtggatgagtccgaaccctctggagagtctgagaagtcamtcacaatatcgtcagatggctttggtgaagaaagtaaataccgtgaagtgactgtttgtatgtggtcttgatagtggtttttataaggaagctcctgtctataaggaaggtgaacgacatcctggcctgtatcatgccgcggctgctcttctgggatgtccatagtgatatcctggcctgagtagagcctytgttgctcttctgggatttcattcaagatctcttcawataggttgsctattgaaatggggctctgtgaagtgatggtmtgtccaaatccctgrtacaggcccaccggtgaggacggcttggaagagtcytgtgawgacgctgagagtaggctggagtgttcaytatgatccggrtctccagggaaacatttcttcttcggkkaacctcgcattgtcctcccgacacgccttacttgttcacswmrtrtcttctctgatatcagacacatccc

SEQ ID NO: 846 - DNA, 565 bp, Rattus norvegicus
tttttttttttttttttagagacaaagactttaggtagctggattcaggaagcaaatgagatyctaattctgamcattttkcaaatgcaaatcaaatccccatgaatcattttgatgattttttttgaggcattaatgcgtcagarttcatattcttcwagtgatctygaattcacctctttgcttgggatattcttttcttgattatttccaacttgcaaacaatgtctcaccttcacgccctgaatgactgatcyctgaatgacctgttagtatcttamgtcaacctccttttgacgaaacaaaggaagacaaatcatacagtgcattaacctttaacgtaagcasagctgactttstctggccgaaggaggtctgtctacccatctgaagaarggcccacttkgwgcttctccctgtgyttgkaggtcacgttcttaaaagtgctggyggagcctmggtacagcggattggttcccgtttgccacttggcctttgatcgttctgctttaaatttagcaacttcttttccggtcgtgaaaggataccagcagtttccaaatgc

SEQ ID NO: 847 - DNA, 606 bp, Rattus norvegicus
tgacacatttagggaagggcacacttaccctctgcccctaccacagtgaccggcagctcatgagtcaagtgrctgtgscggggctgctcaccgtgcttgtttctttcctggatgtgcgaaacatcattctagggaaatctcactatgtactgtatgggctggtggccgccatgcagcctcggatgctggtwacatttratgaggagttgcgaccattgccagtttctgtccgcgtgggtcaggcagtgratgtggtgggccaggytggkaagcccaaawcgmtcacggggttccagactcacacaactccagtrctgttggcccatggggaacgggcgragytggccactgagragtttytccctgtcaccccaattytggaaggctttgtcattyttcgaaagaaccccaactacaatctttgaaaaatggctgacactagagaccctggstgcagytgactttttttagcargctgtactgcccctgccaggggcagataytgttccagatmtttgggggaattgttacctcctgctgttttgttactgagtaagataatcttgtsgaataaagacctttwtccccaaraaaaaaaaaaaaaaa

SEQ ID NO: 848 - DNA, 1363 bp, Rattus norvegicus
  misc_feature (1247)..(1247): n is a, c, g, or t
tttttttttttttttttttwcggcaskrgtgactaagatggaagcgttttgggagtcacgractggccactgggcggmggtccggggcagttttaccggcgtcccgtcacccccagctgcctcatggatccgatgtctgcgcctgcgaggyccatcactcggacccagaayccsatgstgactggkacatccgtactaggggtgaagtycgactgcggagtggtgattgctgcagacatgctgggctcctacggctccctggstcgtytccgcawtatmtctcgwwtyaygmrrstcaabgacagcactatgbtaggtgcttcaggagactatgctgatttmcagtatttgaagcaagttctcggccagatggtgattgatgaggagytgttsggagatggacatagstatagtcctagagctatccattcatggttgacaarggccatgtacagtcsccgstccmwsrtgaaccctctktggracaccawggtcattggaggctatgctsgtggrgaawgcwytmktgrdtwkgyggvcatgcytgrkgtmgcttatgaagccccttcactagccactggktatggtgcatacttggctcarccthtgcttcgagaagttytaragaagcaaccggtghtgartcagacagagscccgagagcttgtggagcgctgcatgcgagtgctgtamtaccgagacgmtcgttygtataaccggtttcaagttgytactgtaactgaaaaaggtgtggagatagaaggaccmctgtcagcacagaccaactgggacattgctcacatsatcagtggctttgaatgaaatccagatkaagtgtccagagytaagcttggcccttgtgaacgtgactgtagctggstcamaggsagacttttgtaaaamtaaatcagtccyttgaarwrhwwmamaammmaamaraamaacaacacagaacgacacaaagaacactcgcgggggggccggtacccaattcgccctatagtgagtcgcataacaattcactggccgcagttaccaacgtcgtgactggagaaccctgcgtgaccacataacgcctgtaggaatcacctttgccgctgggtacaccaaaaggcggacgaatgccttcaccagtggcgcgaatgtgatgaatgtcgccaattggacatcgtacttggagcaccttaacaagcaagaatctaaaatacctctggtggctagaagccaaagcgagaccgggcgacatnggggacagtttttgattctccgccatccactcgaagaggatgagtacgaacaattcggtgcaccatgtaaacaagacacacactggcacaacagaacgcgcagcaagaaggccaac

SEQ ID NO: 849 - DNA, 842 bp, Rattus norvegicus
ttttttttttttttttttwwhttwaacktttttattgttkgcttattaaacatacattythaaactgacactttgccatgaataaagcaacaaaaataaggsmatmccataaratgkgctttacatacaaacatcatcctggaarartargaagtytkaatccatgtmcaacaaaaaaagccaggaacaaaaagcactgkwttykgaacacmcacaaatgtgtwtgtwtgtaaagacagcacacacmcaakacagtttacttgggttctttatgagcataattccttaatcatcctttggmaraatgaatyttaadaaataaraaatctgaactgcatttattttcacmwydtcmrkrttaaacttaggaraagcmacttcrttgmckaawtgttaaatwtttcargagtaaaaggcmaccttaatttttagkaaccctytaaacagggtctggaaaacagtaggttttcctctcttggtatgaacaaaggatggtaagcaagcatcattgaragtgtggacacatagaaaaccatcttgggaamcgtgctcttcacaagcctaagaaaccaccagaaataatgagtagaccccatgcaacccaaatgcraagctaactctatacatgttacaattttcaaactcttgcttctaagacaattttagtacacctaatwagtacagcaggtctktagaaaacmgaacaaatattaccagtctkgcattcamwtttctacctgacattccattaaatggcacttccaactgttgcatggttctaagcactagatgaggaaacgagttccattcttaaaaaagcggagggaagggcaccgcaaggg

SEQ ID NO: 850 - DNA, 662 bp, Rattus norvegicus
  misc_feature (601)..(601): n is a, c, g, or t
attggttaaaaactttatttcttattgatttggcaacagttgaatggtaggtagaaaaagggagggagaatcctgtaaaagaagagggccgtgctggatgtggtggtgcttgccaagaacgccgacacttgagaagaagaagtgggatgatcgcctctgagttataggccaatctggcctacgtagtaagttcccagccaccccggactacagggtaagactctctcaaaaaaaaagtgaaaaagtactagactaggcacgggagggcttgtgcagggaaagggggcaaggggcattctcaagtagggcgtatggaatggaaaagcagttacatgggacatgaaattgaaaattagccatagcgggaggcaataagcattggatccaggttggcaaaatgtgttccaaaggttagggtatgggtgaatgatttagggatgatgcatttgggtcactttaccctctgcagtatggctcccccagtggattggttggctccatttactccactgttgagtacttccacagatcgggttaaagcggctccgaacccgaaatgtgtacagcttctgttcatccacactaggcagggagaatctangctcatgatccactatttgttccgtccagcttcgatctcgggtgctccggtactgcaccaa

SEQ ID NO: 851 - DNA, 574 bp, Rattus norvegicus
tttttttttttttttttggaagatactgtttcactttaattatacaaaatttccagactttatattatcatattaaagacacaagatgccaacacttggcccaggtagagagccagcatggaaagttccagtgggcctgggtacaagtgttcagctacttagagtcaagccatagcccgcctgtccatctctctgttcacaggscctgctcagagctggggcaggtctggcctggtgagcgcgctcttggggacctgtgctcagatcaggtccaaggtggggctctccatgactcttcagtggcttccaccttcactartggcatcacctcttggctgctgtggaccctcctccttctaacttcgaatcgccgtctttctgtcacggtctttgctcaactttctctggttgctgaggcagaaggtgcagatctgtttgggctgggtgttctcgccgccgtctctggccagtggtartgggggcggcggcggtggcggtggtagtgggctgcccgcacgaccgctgtggaagaaagcgggtcccgagtggcagggctgcccgtcaccgcaggctt

SEQ ID NO: 852 - DNA, 617 bp, Rattus norvegicus
tttttttttttttttatgctgaatagagagcatttattacctttcaaagcagtcgtttacaagtaaaaatgatgcaggtattttgatgcttttatttcatattgtttgatatattttcatgaagaagtcggctctgctcaacattctcctggtgacagcgagttacatcatatgctttgttccttaccacgctgttaggatcccatacaccctcagccagacagaggtgatatctgactgctcaactacgattgctctcttcaaagccaaggaggccacactgctgctggctgtgtccaacctgtgctttgacccaattctgtactatcatctgtcgaaagcatttcgactgaaggtcactgagactttcgcctcgcmtcaaaagatgaakgctcgggaggaaaaaccgagacgtgagaatgacgtgcaaagtacaggctmtgcgtgttagtcsttcttcmtgactggaccacaaagctggccacagttttcaaagataaaaggcgatgttaagatagaagagtcttaggactaaaggctgctgatagctggtgaacaggttcacgcaggacgtcaacacaagccagccctgcaccctcacagttgccggcctcgtg

SEQ ID NO: 853 - DNA, 631 bp, Rattus norvegicus
tttttttttttttttttyykkttaycckgagtagaattttaataaataatgccatttgtttcactagtcttaaaagctaaatacagaagatacatcattttgccccaggcaaaaagaacatggagccttcatgtactgagatttgttttcctggacactatctgacaaaagagtttccgatggcctgcttttttatttgtacaaatcaattcataattttaaattctggttcgagttcccttaaaaaaaaacagataaattacgtttgctttcacagtcttttcataagttgctaacacaagagagctgagccaacatacgaaggctgtggagaaraaacagtggtaaacaagactgcatttctaaatwacaaaararamtaaataaatacccmaggctaaatttcttttctttcatcatagcattaacctagccactattcttggcttcaggtgatagacttcaaaaataccctgcaattcatgactaccactaagaaagcaagaaaacttgtttttaaataggsccaatgacagcaatacataactcacctttcagaaacagaatcaaactcctgctggtctactgagttttaatttagactggtttaggtacaatagaaatgaaacct

SEQ ID NO: 854 - DNA, 911 bp, Rattus norvegicus
ctcaacattcctaatggtcttctccattgaagattagtagaattttcctctttcagaaatcatactataccatgtaatgttttgaatactgctccttactgactgactcattatgactcctattttaaggggtatttaattttcttgaagtcagtgtggctatacctatgttgttccagtgttttccagtcagagtaaatatgactaccataccctgctgttacataaatgtaactttttaaagcaagtgggagagcagaagaatgccagagaacttggaatcagcctttgaggagtgttgcatgctggtagaaagctcactyctgtttgtttgatgtcatcttgtaatgaatggctcctttgcttagtaccatgtaggsccgtttctttcctcctacagttttcttaagttaatcacatggattctttgtactaggacttccttgagtaaagctattgacatatttctgctggagcctaatacacatgtgtattaacataggcattgttttatattaatgataaattctrctggcttgctttatgatagtttctgatttctagctgcttatgtggtycatttgattattatttgtgtcagaataatgkgacatttatgattgmtaagctytgagcagaaaaggagtgcccaagaaaattaawtgccyttgktttactgtatgctcaaataagtattgraaatattcaggctttgracccaragttcataggatkgtwatttagytycattttatttacttacagaaatcaaaacmcaaggtggttttaagtaaaaaagcaaaaagtmctaaaatattgtaaaacattytgtgttgctcttactttagaaatttgcctatttytaggttcaaaaataaactttdctmaawwwwraaaaaaaaaaaaaaaaa

SEQ ID NO: 855 - DNA, 545 bp, Rattus norvegicus
gctcccgcgacccakcrcagcgtggggcgggctgcgacctctgcctcggtggattgcatttttaattaaggattcctagcatagcgcttggcttttgaaggcagarctgtgcaracgccgctcatggcccctatgacccgcwcagcgtgcgcatcarcttcgccaagcgctggggaccctgctactcgcgacagttcatcacctcctgcccctgttggmtgkaratcctcctcaacaaccmcagatagcaaagcggytsccactgcgccgcakcgtcccccaacctctgggggccagcgcccagagacgccgycccagggacaacctcgccctccccccagatatcatctacctagatttaatataaagttttatatmttatatggaaatatatattatacttgtaattatggagtcatttttacaacgtaattatttatatatggtgcaatgtgtgtatatggagaaacaagaaaaacgcactttggcttgtaattctttcaatacagatatattttttctttcttcaaaaaaaaaaaaaaaaa

SEQ ID NO: 856 - DNA, 458 bp, Rattus norvegicus
aagggcaccttcaaggactatgtgcgtgaccgtgctgacctcaacaaggacaagcctgtcattcctgctgctgccctggctggctacacaggaagtgggccgatccagctgtggcagtttcttctggaattactcactgataagtcttgtcagtcttttatcagctggacaggagacggctgggaattcaagctttccgacccagatgaggtggccaggagatggggaaagaggaaaaacaagcctaagatgaattatgagaaactgagccgcggccttcgctactattacgacaaaaatatcatccacaagacggcgggcaagcgctacgtgtaccgctttgtctgcgacctactgtaagccctacacatagcactccaagtcccacccataccactgtaagtcccagcaatgctgctctaagccccagcaatgctactccaagcctcagccatttt

SEQ ID NO: 857 - DNA, 566 bp, Rattus norvegicus
tttttttttttttttttgckgttccaagcatttattttttgagtacgascaragagtagggtasctaaacggggtgttagtaacatgcatgctgcttttggtaraggatcaraartggggtttgggtttgggcarcatcarartggskmryrcmkttgtagaaggaagaatatgaaggggtagctataggagcagctgccaaaaatggggatccccgtttcccttcaccccatgtttcctggatcctttcctttctcctttaaattaaaagactttcttgagacagcttgggtcagaggttggaagggttcaaagtcacaggtggaagcagtttgctccggccagctcgtacacttcatcatcacagtttcgaggctgctccatgcgatagccttgaggcagtttctcgtagagctcagcacaggtcatgccacagtagggcgtgcctccaaggctcactatctcccagaggaggaccccaaatgaccagacgtcactcttggtagtgtagaccctgtagttgagggactcaatggccatccaacgtacaggaagacggcccatcg

SEQ ID NO: 858 - DNA, 699 bp, Rattus norvegicus
ttttttttttttttttttgaaaagtwctgtgctttttattaaaaaacaacaacaaaaaaatacaatcaggtactgtccagacacatttgggaagggaatgtctctttaaaagtcctcagttttcaacatcatcatcaccatcaccattattatattaataatattaatgtccttgaaatttaaacaatatcatttttctggcttcagttgtaggaaatgtacaaaacatcagtggggcgcagggcaaggggtaacctccaatgacgtatgthytatctttgcgacccaaccaatrrcaaktgaacagctttgtgwagaawawagctggctctgaaaatgactatktccgctggatagccagctygcccctctcccattcccagaaccacccagtagaagwaaaaatcacggtgttgctrtcgctaggagactttgctcaatcaaacawaaaagcagaaactagttgcagactgttgtctttggtgcaaaggaagtaattgcasaggggcctacgtcagtgcctcagtgatccatggtctgcttggatgcccatcaaatgcccaassmtmgyktcaccgttggactsstygtryygatgctttggtaaaaatcctgttttctctgggccccattcctctctcaccaaattgtccyygkgatttatgcccgcttacgcctgccttccagatttcggaagtt

SEQ ID NO: 859 - DNA, 938 bp, Rattus norvegicus
ttttttttttttttttttkkttttagcggtatgtttttatttacggaaaacggtatttgcaatagttctgacagctgtaaggccctccatttcactagctgtttgcaatagccagaaattctgatgtggacattaataggatctctcttcatgcaggttgtagggagtatgtacattgtataacatggaagaaattaatacatatttacactatttacatagtaacyatttattgtaaatagaaatgttttctaakataaaaaggagaaatcacaacctatggtttgtggtctgtaacgacctaacttgtcagcaaagcacaccttakctctkaagtcagtatgacacgaagcgcacacagtaggcggctgcatcyccaaagggtycccagttacaccgctgtyccaccacgtgttctkaagcccagcargacaggamacgctctttggccagagtagggctcaatgcttcactgatgagtgcagacaaagggtgaagggcatgagtgcccagcctttacaagctctgggcgtggccaratgcccttggggtttaatactgtcacaacgtaacctgagttaagtgactccttgcggatactccaagagccagtaacttaggattcttagcaccaacagccatcaggcaaaccaacagccataaggtaaggtcccctcacagatgactatggcattaaagacaacattaggaagcctcatgcttaatgtcccgtcctcaatgtccaacagagagctctgttgcccagggcgacacctgggtcctgactgaaggaatgcccgctcccacctctcaacgggggccctgccagcaggaagttcaggtctgaggtggggaacgggtagggatcatggaagactggaagccaggctgcatacacaccagccaggcagctcaaatgcaagggtttcagcctcgtg

SEQ ID NO: 860 - DNA, 903 bp, Rattus norvegicus
caaaagctggagctccaccgcggtggcggccgctctagaactagtggatcccccgggctgcaggaattcggcacgaggggaatgcctcgtttaataacgtactccttcttgaaagctgccttttctctccacccttaagtggacccagtctttgctgaaactcatgcaggtgggtgggagctgtcttgcccctctctaggatgcactctacctgtgactgtgactttcaagggtatttgtttgccatttgctgatttgggggggggggataacttctaacttctttcattgctaaatgaaaaaaagtattgcaccttttgaartacmccaaatggattgagttcctaattaaaagagttyttttgcccctgtcagtcattttctwatatgcttrgcakagrtttmcaactcactgtgtagtgttcctagattcagctgaagacgagatacacagggtyccttaagggctggtgttgggaaacacagccgcactggtgattgccrkchcbwksargtgatgasgkyacaggcctgcttcattaakaagctatgagcatgtggggtggggavcatacttttavccaacatggsgmccagtcarggctgtacccctttttttctyccatgcctatgaggaatcctkgmacrastggctgaagctctctcaawaatgrcgagagawtcatgactctttataagtgttaatagagactttmtcagattattttgtttgcaagttccagyttttaaaaatgtttaggtaatctccttccccagtcctgatcttgtagattcgttagtrccgaaccaatgctttcttgtgtctcaactctttgtatatgaattcttttcagatgtattaaacaaacaaaacccttmmmaarwraaaaaaaaaaaaaaaaa

SEQ ID NO: 861 - DNA, 871 bp, Rattus norvegicus
ttttttttttttttttttykkktgaaaatcatggcaaactttattggcataaatcacaggagttgaaatgggaaaagccaggttakaggtttaaggtaaggaaaaaaraatcaaatgatcatatatccatgacccagagaatggccctccaggtaccccagtcycttcttggaggggcctggagcaggtaggtcactgtaaacagascagtaaggcctgtgggtggaagtgtcggtcggtgtcgtctgcagcgcccaakctgaccttgagctgggctgctgctarcccagtcctgactgaggacccttgtctgggaccccatcacactgggcctctgctargaagctkatgtactgtgtaggtccccagcctatggaaccttccakagtgccttttccaggagcttttttttcyarkcwgkcwgmymccakctyatcctkwggaatggsagmwswgggacgsmcywcctsktgcyctaacaacgggatcstgtscctttgccccaaaccctgccagcttccctcataccaacttggaacattcttctcagacgcccgtgccccagacatgccctactgtgagagggaacaawcagcctttgccccggtcaccggagtttgagggagagatgcacccagtagaattgagaatagagaccctttatgatcttcctagtcaaagtcagacaccagctttcctgagaaggcagaagagggagccccagagaagcaatgaggcgggttctccttgttgccaaggagctcacagagaacagaggctggctcccgatggcttacgtaggcaggatgtctttcccctttgcctgccttgggaacaggacacatgaggttcaaaattccaggtccaaagc

SEQ ID NO: 862 - DNA, 631 bp, Rattus norvegicus
ggcacgarkggaaaacaggaatggaaaacccaagaagaaacatcacggaagagsyttaaaggcagctaraactaaaacccttaaataacttcagagaaaaatggaacattttccaaaagaatgcttatccttgaagacataaaagaacttgtctgatgtttttcttggggaacagaaccccctacctccttttcttctagctttgcaatagtcagccctccaaccctatytcctacctccacctcaccctgcttacattggactgggaacctaaattggaagggagtctttacttacataattggaatttaaatcacaagatttagggaacatgtgactctttcatgcaacctcataaagtagcctcgaatttttgtyytttgggttttttwttttttgctttttttgtcacgttcctcatgatatacaacttttataacttttattcattttactagatcccttctaaaatgttttacatggtaaatcttaagctgtggaaaccactgaaggtgcttattaatggttctccagatgtatacaactattggatgattccttgagtttacagctgtacaaatgtgcagaaaataataaaaaaactgttaaaaataaaaaaaaaaaaaaaaaa

SEQ ID NO: 863 - DNA, 709 bp, Rattus norvegicus
  misc_feature (684)..(684): n is a, c, g, or t
cgggactttaaawttwwwyyttkybktyyywwybwywtytctgtaataaaaaacctgtattaaagggccagttcatctggactararagagcaraggaggttggctgagctcccctgggaggtggggagctggagraaactcaratgcctcctcaggggctgggccaracccarcgctgytggcartgctraagcacarytggsttccagcthtagcctccgccctggattcattcactcccatctgggctcaragctgtggttcaagctcarwyagtgtgtcctctytyaaaaagaavccggacgggatcttgaagggttgacttatccccactatarartgcargttgwtgctwtwgtaacarasaagaaactgctcctccgtgtcagggatarcactgatgttgatatacacctggtttgggttgttaymacgggagacttggttgtcaccgacccagacatakgatacatagtcattaatgtgtcgcatccccaccttgtrtagtssgatccagtcccaggggctgctgagraactctggrrtggaggtgtagtygatcagcatgtcgttctccttggtccacaggtattcaggcatcatagtgatcagtgggacagacatcagtgggttcagctccaagtcgaaggtgccagtgacaggcttatggtcactgatgctgnatgtcatgtggctgacatagtcctt

SEQ ID NO: 864 - DNA, 1038 bp, Rattus norvegicus
  misc_feature (967)..(967): n is a, c, g, or t
gccatctttggtctcttactgatgggcctcttaagaattattgtattccaagtctttaasmmtymggtyackarggtaaatatacatctgcacagtctttattacttcctgtatctctgagtaatacattcagctggtgctgggtgatggtcatatytgaacytakacctccccgttggtcttccacaatcctgttgaggtgggctgcttggtgtgkwaaaaagcccagtcgtgrwgwawckkyacswkggcgattgcatcaagctcttgatagcagatacmytctaagkttttagccccagtarrsrygwrrtgaacatccctcackgccttycagatcctcaactytccattgttaaggagaccagagataattaatsccmccaaccctggcttrgaaagggtasgtcakrcacwgkgtrgcaaragggcattacagagcctaacgctggsgtgaaaatcatgtacttasccagcaagtgagtytgcragggtkgcgtartytggmcagggtgytcagcatcgggaaytgtgctytcaggtccataagckscacrdvrbsdyggggtttgggtttgggtttytggwygaaatcaagkttgaggcagtkagcagtggtytcatgthtatrgagtgtgccctgtgaatgytaarctctcttgaawttrrgkatttgdtcwttttttawagrgtgtaawmcaagttttawwttctgtaatgcaaacmrgtacctgtytgtttytgartaaaactgtttacmttyhwmwaarawdamaammaawwaamwmwwrwawrmwwmaaammarmmawmmaaaacctttgcggccgcaagcttattccctttagtgagggttaattttagcttggcactggccgtcgttttaaaacgtcgtgactgggaaaaccctggggttacccaacttaatcgccttgcagaaaatccccctttcgccagctggggtaatancgaaaaggcccgcaccgatcgcccttcccaaaagttgcgcaccctgaatggcgaatgggacgccccctgta

SEQ ID NO: 865 - DNA, 984 bp, Rattus norvegicus
gtgaagctctagaagactctgatgttagacaggactcaccagcaggggatctgccaaggcaggtccaccagccaacagaatctgagccagtcascataagtatcagagacctactttcctgttctaattttgcagwgcaacatagatacctgtttgaagacaatctttcacggtctacacaaaaactcttgcactcaacacaatcttsaggaaaccctcgggaagaaacccaagaccaatgcaaatgtgaaaaccttatacagttccagaaccttgcmaatgaagaagtdagaaaattaacccaacgcttagaagaaatgactcaawgaatggaagccttggaaaatcgcytaagatmcagatgaagactagaagtgcttttatatctskatttgtacaacattgtaamacggaytttaacacmggtagtggagcctgaaagctcataccmyragkrgatytacargctwtaaagcaaaatwcaaccmgtacagaagacactggattgcttgactgctggacwagagaaaatggagacattgmsgtgtytaaatycaatgggggtggggggaggaatcctgagtttmccaraataagctgtgcagggtcccatgatgttctgtggacatgamttccttytgcctcaacactgaaatttcatttgacaactgaagtatyttaattcagcagaaaactgactytacaaattgcttttttttttgtactgcaatttaccttgatgtgtatacagacatgtgcataagtcacagggacctgtgttytgtaataagttgaatttytacacaatattaaagttcmccmctccmgaaaararwrwwrarwaaarwwmmwawwwwaaatttgaraarrrrwmawrmwawttgttggttgttactcagactgcctcaaactcccaattctcctgtaataagttgaatttctacacaatattaaagttcaccactccagaaaaaaaaaaaaaaa

SEQ ID NO: 866 - DNA, 662 bp, Rattus norvegicus
tttttttttttttttgtwggggttgagaaatcagaaatctacaaaawytywwtttwttttttttaaawactttatgtcgtaaaaatwcagcaaaaatagttcttttgttcaragaccaaaatatatactgskctggtcacggtcctaagggtggttttagtctctggttcctcgattgtgcagtgtgtartgtadgctggcttcaacccggctactccagcttcagkcatttatcaacgctagaatcatactgtasrgatacatgaagaawcagagtabgtadaaaccaarcttgatcatggcttctttcatgtgtgactttaactgtccccggttgtgtatttctgttggatcaaatactsccatgttamsacttggcaccataatgaacctatatatattccatgtggcaacaggtaagttgagaaggaakatgacccastgcaaggaaacaagcatcakcacagtgacaaaggtgtggccaaccaactctggtatcacccacttgtttaattttgagcaacatgatctagcgttaatgtaatcacattctaaatcagacagtgtaatgatgaagtakacagagaggaagatgagcgwwcaacagtcgakgagcgagaagaggaacaccaccgyctycatccyctcgysgccgctccgcc

SEQ ID NO: 867 - DNA, 613 bp, Rattus norvegicus
ttttttttcaaacawycttttttkrttatttaaaaatccrsskcawaattcagttctgggttttmstttttgtttaaaaagaagcaamcatttaaaagcatytaatgttaactattctacattccatctagttatgaacacagmttgtggactgactggaaaagcaagcagagaacacagattakgcacagcacggtggccagtgggccasgacagatattaccagtraacgtctgagggacadaggggctggggacgagtctagcagarattaacagtctcctaagtgtggatagcatacttgacagttacgctttaacaagttcctcttcgatcatgttcatgacgtcaaagtttttgtttgaaggcaacaccaccacattttatttgtgagtaggggtaggtagggaatgttcctaaaattggcataattattcttaaaacaataacaataacaacaagtacctctttggtgaagcctcggtacccactcggttcactgtaggaatctgtaaacaggactgcggtacagtgctgggccttggttcccacaaggccaggcaccgcagtctttctgacaatcctctgaatgacttgtgtgaaaacattctaa

SEQ ID NO: 868 - DNA, 811 bp, Rattus norvegicus
tttttttttttttttttwaaaataaaatcttgctcatttaatagaaatgactgatacaaagttgttgacatgttttcttggtataaaagtagaaacatggcttagtcaaaatacatactttgttacaaaagtttagacttctattaatagactaatgacttcctttgaatttggatgtctgtctgacccacaggcagcggttggccctgggcctcctgtaaagcacctcsaagctgtgtgtgcagatgggcatcccattakgtcaccattcactttccaratcacgagaactcaacagtggtagctactgtggtctgtcckcggagattctkagctgtgcatatgtaatagcctgcatcaatggtctcaaagtcttcaacggtaatgacactctgcgagattcttgtggkgtgtcccagtcctctgtgaatcagtctycaggtgtcccgaatggtcacaggcctttygtccttctgtccaggaaagatccacctgaattytacctcaacatcaggctcccctaggacagtrcagagcacgctgatgtcatccccacctytcactttgttggaggaggccaaratggttgttgatgragggccgctgggaacctwrsawmaagcagkkgayamwkgamwgarakcyswractkrysstmgwgaccaacatcattctttttgggaaggggacaccttttttatagcttcatgaggccaacgctggataccccttttgattgccttagaatcatggttgtcatccttcccaatgatgcaatcctttaatacagtgcctcatgatgtggtggggc

SEQ ID NO: 869 - DNA, 736 bp, Rattus norvegicus
  misc_feature (191)..(191): n is a, c, g, or t
ttttttttttttttttttwdwytkggytcawaawavactttattgggaaaattaktgtaaaaaacagattcayaaaatttaaataakacagtaaaatcttatcttgtagctatggwaattgctawagtaatcamaartaaggtggagtcyaaattattgcctaagcgaacactgctgtcaaggstccttanccagcccaaagyaggaaamactgcgattattackagagcccgacgatgaatttgcatttccagctggaataacaggggaagcatgttcygattacagcatcacaacgttctascccgagaaaagcaactctattagtgtcctacagcagagcacattagtaacttagccgtraatcayaattcccattctgcttcatawwkwwwyywdtywwtttccagggtaatccattgttttattcctcaggwttctggaccttctttctcacacagtttaaggtgccccatggtttaccctgggtcacccttggccatttgattccatactgccccacagtagggctaaaggcaacctctcccttgggtgctcaccccggcctgttcagaaatggaccaagaagttaatgtggcactctctgattacagaatttttatttcaattaagcttataaaaatatasctagaaatatattttgaattctaaaagctttttttctaaccagctttaacacaaacatgtccttgcaaaaatycwcswsctggctgag

SEQ ID NO: 870 - DNA, 649 bp, Rattus norvegicus
ttttttttywykwkktttwywwywkkytgaraaaaacgtttattccwtctccaaaytagtctacagaactgagggcagggctgtccccaccaagtctccgtacattcagtgcargggttcctgccctccccactagtatctaacagctgcttgggaatatttacataaagccaggtgctgtctccgggcaagttctgtccttctgccakgggtaggrgcaagaaaggagtggtatctcgtmcctctgcccgccccacagctgtcaggcaggcagcctggadacggttggcacagtggtgaccccagaagacacagcagtgagcatagaacccagacgaagctgggtcctgaacctgagtgaggaagtggggagccgagcactgaggagacaggtagcacaaggatccccaagtttgtctttggagaaaaaaaasttkgggctcccaaggcctccagctgtagggaaagtggcatgtgtcaaaaactgcagcgggcacctgcttctggctctgatggggttcagtgttattaaaagcaatgcggagctgagmrkagcwggatggcascrmtgrcyarryamwtscrgkcmstggcrttgctyatctkasagwamwrsgswkssrssayaaggaagaaggctgaggccagc

SEQ ID NO: 871 - DNA, 561 bp, Rattus norvegicus
ggacaggtaacaagtagtcatggctgtcgactgttatcccaggagcagtywtkktkkkywywkkktgaaatccaggtatttgtattgaggctaaaaaaggaaatgtcccccaaatcttctgctgctgccacagtccttcagccagcrctgaaccacaccttgaaggcgccatgttgagttctgggaactcccaggcgcctgtcagcgtccccggagggctcgggggagcctcctccaggcagctagcaccccgtaggtacctgtccgcctcctgtgccagtgctggccgaggataaagcaaagcaggacggatgtcacgaataagaacagaagtattgacaccactacaatgatgatgaccatctggktgtcttgccttatttcrkagamktcaagrskcwgstastctsagatgcggcggtaragagacccaccgtggggtcgtagatycagctcagcctggcaggaaaagttwagaccatcctttttcagagctgtgctgttgaatatggctatgacctcttctgggacagtttcagctcccccaaatgtctggttctt

SEQ ID NO: 872 - DNA, 711 bp, Rattus norvegicus
acctctgatttccasgagsagccagcactcagttccacaggagccacaacgcacactgggaaacatgggtsygaagcygctygagtccmgactttgtctcctkctgyygctggracttgtmhyratgmttgcctcatgccarcsaccaaccccttcccagtggtttgmmatycagcayatctataatagskcytayccmcratgtaatgmtgsmatgckrcryrkhaacarwtwyacmrgamrwtgtamrgrcawaaatactttycttcayacaagttwtgctrrtgttgttgrtgygtgtggcaatmsamabaymmcctgtrraracrgrasawrtasaaattgtcataacagtysmtmtcrggtawmwrtaactwtctgyaacctcacaamtccggcarssatttatmcccaatgymsataccaaactacarkatcvdbgaagttctacasagttgsctgtracmmbagractycacrggasagtcccatgtatccagtggttccdgttcacytggatrrgayattttagytcmrtgccagcactttgtacctkagctcatckgctmctgccaagatcacagtagtgaagatccagttcctctgtctgcactgcmtaaycagmcctktyctcatraaacctktscmtkactcmtytwarwawarmwwaamaratttttgtaatcaataaacacctttgcatatgcatct

SEQ ID NO: 873 - DNA, 621 bp, Rattus norvegicus
ttttttttttttttttttkaagggataaagycaatttatkgatccatttaaamtgaagagagaggaaatataaaaaaaaccacttagttgcaattatggaacattcctcaaaaaactaggkggctttaagcacaaacacatgcttaaagattatrgtaagcaagcttatggattatktgcattaagcatcasgaattaaaatgaatgcttyytarytctatggattaatwtgcaggkatactgtcttavcactgaaataattmtgyttcttaaaagygattgctwtactgggtgctgttgcagggaggccaggtcctaactgaggactcactctttgctaggactcaaaatgaggctctgactgttctgcccttcavrsgctggggtggacggtggttgctcagaactggaaccgcaggctctccctcggcacttgacagaagaccacggagctgtgccagctgttctgggcttagactgatgctctccttgcagatcacccaagtcacgctttcatgaagaggagggtgggtcagagagccaaagtaggtccagtaatccagagacgaaggaaggagactggaagggtcaaaattggtgaatggggctcgttttccccct

SEQ ID NO: 874 - DNA, 1599 bp, Rattus norvegicus
  misc_feature (36)..(36): n is a, c, g, or t
  misc_feature (39)..(39): n is a, c, g, or t
  misc_feature (72)..(72): n is a, c, g, or t
  misc_feature (122)..(122): n is a, c, g, or t
ggcaaggcgaggcggccggcacagctcaggtgggcnggnccgtgccacgcagcgctccggagccacgccccntccctgggcggcagtgcgcgttcccgagcggcgcgcgcctcccgtctttnctcccgaggccttgcgcgcgcactgctgcccacccgcggctgccatcgcccctcagaaaaccagcggcgccatgtcttcgcctccagaaggaaagctagagaccaaagctggacatccgcccgccgtgaaagtcgctgggattcggattgtgcagaaacacccacacactggagatgggaaggmaaagaaagacaaggatgaccaagaatgggaaagcaccagccctcctaaaccaacagtgtacatctctggkgtwattgcccggggtgacaaagacttccccccagcagctgcacaagtggsccaccagaagccacatgcctccatggacaaacatgtttctccaagaacgcagcatatccaacagcctcgcaagtgaccaacgcccagacccctgccacctcagcagcagcagcagcagcagcacctgtgccccctccaggatgcttccccgacaaaatcaactcaaacaccttctacagagtttactaaatttagaaatctmagacaaagcaaagtgggcctcggttgtgkcagatccccatgtttaaaactagaagaggctcaaacaccaaattttgtttctaagagtcctagtcgastgtcagtaaagggtcattgaaccccctagaagtgccaattagcagaacatggcaagtcctgagtawaaggaagtccttcgcactatagcagtagtttaaagtccttacgtcgtggtcctaagaggaagaggccactttggagaggtttgataaggttaggagaagaaaaaacaaaacactatggtatggtccgaacagctgtgctcccttctgcccccagtccatggctgcaaatccctgtttttcagaaaagtcaaagagytagatgtagagccttytggagtgcctgctcttggagggtcytcctggctgtcccagtggcctwcagtggctccagctcagttcacggttgctctatgagcaccatgtacgccaccagcyttyccaggactactacatggcctgtaccatgtcgctaaaggagggatgggctcctcggattttatgagcaatccagtatcccaacagtgsccttcacatggagcrgaacacagccyccaagactgtgttgycagtctcttcyttskamttactmaaatggtgggaacccmrggtcgctttggrgacccaracttgstgcagcctacagccttgctcmgtcatwtggamccaaatytwggaagggmccttwgrgacmgcaacsccagttccctgtgcrgrccttcccacgtgttgcctgcatccgcwtatcccttttagttcagcccvtggggsctaccccgtgttccgtgtactytgrgctagcyccggtgtgtstctgtggactytgggtcmmtaaaggtttgcccgaatgaattyctgaatctttggcgttgrgmmgatkttgrttctaataaagctcctgcatttcwrmmwmaraaaaaaaaaaaaaaaa

SEQ ID NO: 875 - DNA, 820 bp, Rattus norvegicus
ttttttttttttttttttctggaacaatttavattttatttagatacagatgttctccaatagtaakaaatargcctttytgccacaaggtcaataaggcaggcctgacctggcctacttccccagyctacagttagttacttcccagcmtasccagggtgctaagctggctatttttattccccacggacaaagcagtaaggtcagcccaracctaaaggtactttcctcagagccttcatacacaggaagggtaggagataktgaattatccacacagtcatttcagcaactacagtcycatagttctgtggggcagtctgattatasgcaagaagtakattcttttgcaraagctaaaaaakwkwkwkkttywwkwktkyykbtwtymwwyyytccytgggaaacagctttmytyryrwdmcawktctaaaataagaacaggaagtgacaagcctagggagtacagaactakcttcaggaacccacatakaaagcccakacatacaaasggcctaaaggaakgccargtatgtkagaaggacctaaaatttgaactccttgtrtttcttgctgcccccacgactgtcctggggctgagctttccsytystkyygcttctgtttggcagcatgctccgccaccatgtcactgaagtcytctttctcgacttgggcctgctgctcccggacatgctccycatacttctgggtcatggbcatggggtcmaactccaactcctcgggagccagtgctacttccamaccttgcaactcaggggscgggscctkccgggctcawaaccgtggacatgtcataa

SEQ ID NO: 876 - DNA, 870 bp, Rattus norvegicus
  misc_feature (522)..(522): n is a, c, g, or t
  misc_feature (547)..(547): n is a, c, g, or t
gggccgaggtgccgcggggttgctggagggtcgtgggcggcgtgcaggagacatgtcggcgggcagcagttgcagccagactcccagccgggctatccccactcgccgcgtagccctcggcgacggcgtgcagctcccgcccggggactacagcaccacccccggcggcacgctcttcagcaccaccccgggaggaaccagaatcatctatgaccggaaattcctgatggagtgtcggaactcgcctgtggccaaaacacccccaaaggacytgccaaccattccaggggtcactagccctaccagcgatgagcckcycawrsaggccagmyrsakccwtytgcacagcagcsmggaasakaakcrkkyakgwsskgaagagtcacagtttgagatggacatttaagggaccagccmtaggacgcagtgatgctthtgggcccctggggcccttggrmggmsagcsrcrssagkcaggccttgtaccmggcagacactgggtgtggatcggccacycagtcntgctcstcaytcarggcacvtgmtntkcvwwccrttttgtgaataccagcwcrtdcctccttgtgcctctgktgatamtragctgmtactccagggkaatgactctcrsstacassctccytgcatcwagcgccagmgaktggacacagaggagtctgtcggaatgatctggcaattbtagccccawcctbtggagcacacccaccttacsttaggttggggtayctgggaaagccaccytttacttctttccmtgagaggaaataaaagccacatttaccmtardmmmmmadmmdrrmmmwrwhwraamwvwwwmmaarwwrawawratgacaccgtttactctctg

SEQ ID NO: 877 - DNA, 1147 bp, Rattus norvegicus
tttttttttttttttttgaagtaaactaaatttattatcttcttacaagaatgctttagttgtttggttttgtttcaagtcctgtgccttttaactttcaccataaagtattattttttacatgtccttgacaaaggcttgataagcagttcaactctttgggcaaagtcactagctcttatccgaattagwwtwywkdwywywkwwtwwktcaaracamtccatgacatttttattgagcctttaktttatgaggtaaaggaaaagcagctctcttgaatactttacatagctgtasgaaaatatttgagacttaaagggagttacaggggattatgtttctcaaaagttgagatcaagtaaacaagctttaaattgtttaaattttccagttgatctttccttacartagtaacaagctckaattagccacattaggtttttwtrtttgcwgatgtactggtggtttcagtcaatatctactaattctacttcaaaaatgagcytggtatttggkggaatttkggcsyccggctgycctttctttccawagscccwttmtggytcaatctccagtcgagccttttctcctttgctcatagttaagartgcttcatcccatmmkcwdwtamybytkycwaytyywhcmwwaaaacttawmrgmdkgdywwtwtwyythttytttkracttgtttgaatgttagwatcaaaaacagttccatctgggagtgttcctgtatwmcagcartgaacmwcrtstcyctttttaggaaagttggttttatctcccttttttagaacggattttgtawatttgsstsgwscctcatcaarggtctcttcagacttggaatctttctgtktatcatcattaagcttcacgtttttcacctgttcagatactttacttatagtttcagtaccyttgrrmcgcttactttcaaaaagatggttgtakgcagtaaccaaatggtccttattagcagttttagctacgttctttatgtttcccagtaatttatgttctgcaagaaackaatctgaaccgtgatcctgcagaaacttgataatgtccttcttgggcagctgctcgctgcgcagctgctccacggtccatgsacgctgcggaacagccckcgygccrtct

SEQ ID NO: 878 - DNA, 871 bp, Rattus norvegicus
tttttttttttttttttgttakttaawtacktttatttcccatcccagccctctgaaatgattttttttttggcctttcaaatgaaaattaagattcagaagtggagctggcagtactttcgacaaaggctttgtagatctgcgagttcaagaatcttgggaaagaatctctgtgcattagggtgtagatctgaagctgggcatcttcgtacatgtgagggctgggctccagcagattcctgttgatcacctctctaactcgagaatcgaggctgacctctttcggtgacagtatagaaatgtaatcctcgtatatcatcctggccttttcttcaacagctttcttgttctgctccttctttaagtcttcacaggccagccagaagagtaggttctcctcgctgtattctgttcggaggaactctcgsmwmrkgtttcttcctgcaggagccttcatcatcttgtcaaaattctgagaccaggacaagacttcatctgcagtggggttttggcattcctctaggacctggatgctctccattttggtggtgtgtgggggtctccccgaagagtctcctctttcttcattcctgacagtgaggcaggagcagctgcagcagcagcaccagcagaagcaacaggtgttgttgggcctttggtttccgggcgcttgagacacagcctgcgtgccttcattttgtgactgttgccgttttctcatgtcagctgcttcagaatccgactggcaggtggcctgggatgtgggcgaccgtccccgggtccgagtccgagtgtgctcaaggctgggctgttccgtcctctagcggagcgggctccttgccatccgcccaacttcagcacccggcgacgg

SEQ ID NO: 879 - DNA, 822 bp, Rattus norvegicus
tttttttttttttttttyhaaggaaaagctcttttattgcagaggctacattgaagctatcggccaccttcctggaatgtgtaatcagtcctccctccctctggggttttctgtagcgcactgggacattaagtgctgctggggtccargattctgcctatgaagaggagggcccccgtgtccgtgtccctcaraacaaasatgaacggtcggktaaggtgatartcgagckggaaggtgaggcggacaggctggaggtctgggttararctggwccctgccccctcctcaktcyactcaaaagstgccctgwkttccacttgggygagcttcacaggkytgccggtaatyttgctgaagtcaggggactcaracaaggactgtagcttcatgtcctgcaaagagttggwaacgtcgccttcatasctcagcttcarcttggrgacagtcagcacagcttggatagtcttcagttctcggycaatgtcatgaaygaactcagaggtgaggctctcctctatcatggtcaagttctgggtcaccgtcaggggcaggaagaagatsmtactcatgcttcctgtcaaaggcagctgggcaatcttgcagttgagatcagagtccaagccatatcgtaagatggccttagggtctgacatcatggggactctcacagtcctgtcctcgtccaagtgaaaatcctggagggtcgtctttctcgagtcaaacttggttkcccactkccccttgaagtaagccacgccaaggarrmrgmtgctgmsrrcytgkkcacgggggccttgaagaaggggtcatcccctcgtg

SEQ ID NO: 880 - DNA, 971 bp, Rattus norvegicus
ttttttttttttttttttgaaaccagaacacttatttcatgagtgctgaaatcttcaacatgaactggatgctgcaacaatttcactcttgggtctaggtttttccttcacaggagccatgtctaaacctaggatagacaatccaggagcctcattcccccaggcccagcactgttmcgcctcctggtcttgscactctgttaaagactcacttgtgcttggcagggcagccacactcgccgccactacaggtcgacttcggagggtggtargacttagcgtaatggwagcaggacaacgtgtcttagttctgaagctttccamaggatgacgttccttttgttgccttgcttctgcaagagccaccgtactcaagtctgaaaattctattattcagattcggcctcattaataaaaawwwaaaawawaaamctwcaatryrcctgtgmsttacatatttaaaatgggtattttttctywwwwtwywykyttywwygaatgtgaaatggattttcattcacctctgttggtaatacctggttgtttgtaccttgcttctcaaaaggagtcaaagaacgaggaagtgataaaaacagaagctttccagctcacagaacgggatttctacctttggcaaatacatcaggctctycagtacccagatggggacactgcacattctgacaggtacggacggcctgtagtgtcccagaattccgacacctgaagatgaaggggacagaaaaggcaaactttccctcagtggcccaggtaggtgccccagtgattaggaaactggcttaaactggttaggcatttagtttccagttccctttttaaagctgtcacctgagaccagctcaactctggcagcaagcacaggaggtgaggtgttccgctcagccmscrwrcactggaaacctgcagtcacgtcagtgccttagacatttagaaagttacaattttacagc

SEQ ID NO: 881 - DNA, 695 bp, Rattus norvegicus
tgtgtttttkttttytttktykagcccargggttaacaggtgtcttgaatggaggggcagcatggagaattaggactgggctcttctcagctgggacctccgagggcacatgactcaggccacctctgtggcagggaatggaggataccccattgtaggtccagtaaagaaggtgacaagcatcctgctgggccccargacggccarggacagcttcagtacccccggggggcarcttggcccttgttctccargcttgcaagggggtctgcargtgagtctgacsagtcaattgtctggtaggcactatgttcctgagaaggtccgaagaaatccgrgcggagcgggagctcaccccctcgctcccggtgcatgtggtagacgaggcagcaggagaagggcttcagcagcaagctgaagatggccatgccggcactgaagcggccagtgtccccaacggcaacgcttgagtagaagatgctaatgtagataatgtccagraagatggtggcaaccaagccaccmmkmaacatgccaatggcatcaacagagtcccgctgggccacagcccacacacccagggccaggatagtgaagttgccccaagcataggagcctgagaacgccaagcagccccaggttgtcaacagccagtgaaccaggagaataaccttcaagttcacggcagcctcgtg

SEQ ID NO: 882 - DNA, 1311 bp, Rattus norvegicus
cttgttagcttggatryaykwkkytttyytttttttttttttgtcacasrrcactgwkkgcagtagaggaaaccggcatcacaggctggtagttgtcatggwttcttcacaataaccaggacgtggtcatccttcagcgcaaaagccctcacggsacgtaccctattgaaattcaggacggcyccaatattctctgtktttctttcaccattwtttttaaaaawaaamawttttttaggtttgtscacaagaaggccacgtaggctcttggctagcggaagacagaagagctgcacacctgggctgccgcccgcgctgggctggcagtttmgtmtkttytttttywcarctcatttttattaararaawaaaaaatgctccaactatcagttttacaaaatctctaagggaawywywwkwkywwkktkhtgaggtaaaaaacacctraggtagcttwatttgygkswskwkktttttttttmtcatttaaaaaaaaaaatctgtaaatttaacgccmtgggccaacgacctcgtataaattgctattmtcmtgcgctttaaatttttaaaraaaraaawaatttcactaaacgttgatggcttatagwccaagatgtaaaaaagagagtacattctttctwtgtggggtttttctttgtctggttggctggtttgtttggtgggttcctgctttcctcttccaaatgctaggacamstyrystccggctcttgttagcttgcgtaaccaagtgtaagctgaggctggtctgtgcggtttgcatctgatccgtgtgtgtggtgtggtactcagaacactgctttgcctgggrtgggggcaggggtgcacagatatgggggaacagagaaaggatgaaggaactcaaaagaatttcgggtaaagaggacggaggaaggcaggggagggagctaaagagagagagacagagaaatatatagcggtatgcaaaaaamtaaaamtaaaaaaataaaataaaaacccgtctaaaacctgtgaagctgagaagtgggtgtaggggacagacaggtgacgagggcctagggcccctcctcagggacggtatcccttccgttgacagacacaggtgacccacaactgccagtaagtgtccttgacaagatttccctccaagtgactttcgtgggggtggctcaaagttcctttctgtaccaatggacctcacccgagactttattctttgaagtctagaaaagcctgctttctcttcaaaaagaaaacaaaattactcactgcgtaaaaaaattggagttagttgagttatttcctcgtg

SEQ ID NO: 883 - DNA, 601 bp, Rattus norvegicus
tttttttttttttttttwwmaggaaggawagggattttaatgaaaaaaataacagggagccaaagtgcaaactgtcmaccctcctccccataggggatccatcctgtgccccatgtgtactgkgtgtactccctcacccaccctyaggtccccagcraaracctaaggcctgaagcttytgcctcaggtagctyttgagctggggcmggcckytytgarattccagttcttcaaatggcagcggcaggagttggtagcccattaggcccaggtgccgctccctcagagcccgagagmccagcagcaccctgccatcacggcagaaatgccagcgttctcgcagcatcagcaccaccctttgggtagggtcttgggttgtggaattagagttagcctggtcctgttggcagggccgtsgtgggtarggcargaaggggtcctgtgtcctcataggtagcacagsaccagaacctcccacacagagtaggaagtctgtgcagtarccgggtggtacagtcaggtcctgacggtatttttcytcscckaaywsytggcgcagcccctcagctaccatgtccttgtgactgtatttgcagcgggc

SEQ ID NO: 884 - DNA, 790 bp, Rattus norvegicus
tttttttttttttttttaaaagtcccactttgactttattggattaaagcaaaattaaaatttggctattcacacgtatgttacagaggaagaagagtcccgaagaacctccttggcgtttggtggagccacagaacacggggcattgacaagcatcagagaacaaacaccaagcagccttagatttcacgatcactccgaacaggacagaaatacggaatacagccagcgtccacctggaagagctcttcgtgtacaaatgatacgtatttatgtatagttaaaccagtcaccacgaaggtgagtctttcgtccgctaataagcgggggatgaattctctccagcttaactggcgcggtgtttgaagagcamaatctgtttattaaaactacctgccccattcaaaaacarwcagaaaccaaactgaccccctcttcgaactggggcasgggggcatactaagtttcagtaagtggcagggktcagarggggatcgggtcgggagaaacatttcacattacttcgttaattgttagggacatggacgtgggtaaggaaccataatgacaaggcaaagtctcttcctcgattactgcaactggcttgggggaggcgagactaattttggaaacgggagtgtgcagagctaagcgaaatttacttctcttagtaagggagcggacgaagttggaccgcgggcggcgcgcaccttggtacccagtgtagctaggaacacgtaggaagtttccggtgtcgccgcttcctcgccctggtaattttcggcctctt

SEQ ID NO: 885 - DNA, 588 bp, Rattus norvegicus
gcggccgcgctccggagcttctgcttgcgccttttggccagcggcgcgttctccacactcttcaaaaagaagccctcgcgctttcctcggttaaacgccatgaaagtggcattgagcccggagcgcactgctggcccagaggactccagcacatccggcgtgcggagcgggggcgaggagcgcgcactgccgtcctraagccacgagctgctacgcagcccctccagcttcagccgcttggcggggtcmactgtcagtagccctcggaccagctccttggcttcctccraaacaccttgccaggcttyccsgtccagagaraagcgcccttcacggatcttgcacatgatctcagctgcctggctctgtccaccctggccagaggccccttgraagggaacctgtccagwcagcatcatgtacagaatgacacccaggctccaaagatcacaggactcgtcgtacccytgctgtgccagcagctcgggtgcagcgtactgcagggtgaagcaaggcgtctgcatgggccccgccgggctctggggccgcagtctcgcraacccaaagtcgatgatctcctcgtgccga

SEQ ID NO: 886 - DNA, 629 bp, Rattus norvegicus
ccgctgctgctgccgctgccgccgccgctgccgcctcatcgcccgccgggctgttggccggcctgccccgcttcagcagcctgagccctccgccaccgccgcccgggctctactttagccccagcgccgcggccgtggccgccgtgggccggtaccccaagcccctggccgagctgcccggtcggacgcccatcttctggcctggggtgatgcagagcccgccttggagggacgcgcgccttgcctgtaccccccatcaaggatccattttgttggacaaagatgggaagagaaaacacaccagacccacattctccggccagcagatcttcgccctggagaagactttcgaacaaacgaagtacttggcaggaccagagagagcacgcttggcctattctctggggatgacggagagtcaggtcaaggtgagtggacctttgacacctccagggatggcttccttcgcacgtgtgcgcgcgcgcggtcatgcgcacgcgtctgagcccctattctctccctcaccaaactaacaaactgggcggaggtgggggtgaagtgagcctggggagaagtggggagcggggagagagttgggggtagcacaagccctggggtcttttggaggc

SEQ ID NO: 887 - DNA, 448 bp, Rattus norvegicus
tttttttttttttttttyykktgcagttcygcgttttawttttcctgggatactcaaagggatgtgggaacagccacaggtgtggtgagggaaagcccctgtctcccctccccaratgtgggaaaggagagaggcccargcgccctggtcctggattggtccarccactgtggtccctgggccctgtgggcaragggctgagggtggagccctgggaargtggggcgggctcctargcggggttcgggattcttcataaaaagccacgaagcttgatccccacgaagcccarccccgcggggtgtgggggggacgcagagcccaaatgggggacccggcccggcctggcccgtggaggggtaaaataatgacagagatggtgcccatggggggaaaaggtgggggtcaaagcgttggaccaggaagatgggagttccaagtgaggggc

SEQ ID NO: 888 - DNA, 672 bp, Rattus norvegicus
tttttttttttttttttawgcygaagtgtctttatttctgaaatgtactgcatcttccacatctttgtaagggaaacagaaagacagaaaggctaacaaacagctggactgcaagtatgtatagaactgccccatgctccccaccttggtctgagcactaratcctctgcttttctccctttcagtcctcaccttctccctgtctgctgtctggtggatgaagtgcagatgcaacgttcccaygggcactcagagattgccagctgcacaggagtcacatgcacatctgtgttcactagacagcaccacctcttatacaagaaaatgtgtcagagcctgagtaagtgaaatggtagaactatcagaagaaccttcgatgggacttagagttaaaaaaataaattccttacgattggtatttattcatctcccattagggatggcttgcttatgacataattcacaaatgtcaagacaaccaatatagttaagaactctcatttttaacaattaaattaattataagacaccccccccacacacatagatcagcatcctctgcctcttatgtcttttgttattgcatggtgggccggcttcctcttcttaaactcttgtgacatctgtaatgagggtctttagagtgtggccagaactggactctccctcgtg

SEQ ID NO: 889 - DNA, 600 bp, Rattus norvegicus
ttttttttttttttttttggactttttttgcttttttaaaatttttttgtttttgcatttaaaacttttgggctattccctgacaatctgtacatgtaaatttgattgctaaacattgtcactttgaatgtcaaactatttttaatctattgattttgattaaaaatcataatacaaacagagctaaaatcacactaacaaaataaactaaatatgaaaagttgcattgaaagggcattacattattcttaataggatcgtgtagaaacattccaatggcagtgttctcaaaataaaacaaaattacattagactcccagcctggtcactctcgagaccttacctgtaactctggctggtgggtgtctttactcttgtactacatggctcacttacatcagacatcatatttgtataccctgagaaatctgacactgaagtccttactctatggtccacttctccattagagttagtgataaaggtcattggcaccctgckgccsgacttaaactgagaaccgaatgcttgtgcaaagttctcaatctggtacgttgttctaggctctatgtctttctggggatcaatctggctagctta

SEQ ID NO: 890 - DNA, 519 bp, Rattus norvegicus
acatttgccatcttcctgtctcttatcatgctcgtgaaggtgccggtggccattgctggctatgtgtttacagaccaggtgaagtcagagtttagtaagagcttccagaagcaaattgcagaaggaaaataaatgctgtggagcctctaactacacagactggkagsgcatccccggtatggccaaggacagggtccccrattcttgckgcatcaacatcactgtggsctgtggaaacgatttcaaggaatccmccatccawacccagggctgcgtggaamctatagcggcatggctraggaagaacgtactgctggtggctggarcasccctgggcattgcttttgtgraggtcctgggcatwatcttctcctgctgtctsstdamdrgkwtscrragtggctacvaagyaatgtagggtgkgsgsgtgtytragctcgtctgtcwtttcatggagtggmctctccaggttttcaattaaacggattattttttcagmcctrgaaaaaaaaaaaaaaa

SEQ ID NO: 891 - DNA, 617 bp, Rattus norvegicus
tttttttttttttttttaaggctaccaaagagaactggaatatttacatcacttattaagcataccaactttaagaaatacctttgggcacttggggaaactgccgatggtgcctttgaaaccatctcctcgggtagggcttakcctcaaaagaacgtgagtggaggcatacaaaaataaaggtggagggctcaggcaggcagcaattccaattttgttggaattataggcaatcgtgtttaagaaaaagggctctccttgcaraaaagcagagtccgggcagcattgtggacacttgtctccttccactgacatggcagctaggcacagccatgatgccacgcccatctcctccacagcacatgcgcaracagayttgccttccacagcatatgcgcagtgtgcttattaagagggcgccttgggcaatccgcgatgttagtcttggttatctttgaaatgctcagtgtggagttttatccaagcctcggaagatgtgtggggttttatcactgattatgtctctgttctttcgaaatgtgacagacgggattacaatgtgaggcccttccacacaggattccccagtcaccctgactcgtgacctgcttgaccgt

SEQ ID NO: 892 - DNA, 486 bp, Rattus norvegicus
tttttttttttttttttyywwwkcaggaaccatgtttttatttcaaaaccgtaagtgccccctagtggcaggaacgcactactggccgcacaggaggtggggcaagtttccgatcccgcaggttctacgtggggtggggtggwgttgggtggggtaraaagaaagttgtccagcgctggcggctgcgctacagtcggatggggaaacgcactgcctgcscttgtctggttgaccgggatcrttgcctctctagagggcacyaggggctgcggagctcaraggcttakgatgtgcttyakgaasgcctcatasttgatgcagccgttgctgtcctcgtgkcctgccaaaacagtctctacctcttsctcagtcatcttctctccgaragtggtaagaacgtgtctgagctccgytcccatgactttgctcgygccctctttgtcaaacacacgcatcctatctaggtagtcctaatatgtgccttgg

SEQ ID NO: 893 - DNA, 611 bp, Rattus norvegicus
agttttgccttacttcccatctggcccaccacctccagatcctgggctcacccctcagccttctacatcagagtcacctgatgtcaacctggtgacccagcaactgtccaagtctcaggtggaggaccccatgcctcccgtgttctcaggcactccaaagggcagtggggctggctacggtgttggctttgacctggaggaattcttaaaccaatcttttgacatgggtgtggctgatgggccacaggatagccaggcagactcagcctcactctcagcctccctccttgctgcctgacctccaagaaccctgagacccacagcttgtgccttgctgccaggacagacccagcttcaaggtccaggggtgcagtccagagggctgcagccttgagcctggcaggtgaggctcagcttgagttactctgcaggttcatctcagacccaccgttcagccttaagcagccgcctgagccaccaccgagccataacaggatgggaggctctactccttcctgcgcagtcttctccagtgttgtatttttattactgttgtaatatgcatttgttttgccatcgaaatgaggcctgtgaaatacaaggtttccttt

SEQ ID NO: 894 - DNA, 1125 bp, Rattus norvegicus
caaaggtttttttccagaagaacctggttttgaacatgcttggagagaattagataaagatgctcctcgggctgatgagattacacgccgactagcagtttgcaacatggactgggataaattaaaggcaaaagatctgctggctctgttcaactcatttaagcccaaaggaggagttgtattttctgtgaagatatatccttcagagtttggaaagcataggatgaaggaagagcaaattcaaggccccswrgarttackgagtakkcctgaggatgcccytgaaaaggactgggcctctcgagagaagctaagagactaccagttcaaacgattgaagtactattatgcagtagtggagtgtgattctccggaaacagcgagtaagatttacgaagattgcgatggcctggaatttgaaarcagttgttccttcatagacmtaagatttataccagatgatattacctttgatgatgagcccaaggatgcggcckcarargttgmtctaacagcatataarccaaagtrtttmmcatctgctgcaatgggaacatcaacggtggagatcacttgggatgagactgatcacgaaagaatcacgacacygrmcrsaaagtttaaaaagghtgagyttttggacatggactttgaagcytacttggcttcttccagcgaggatgaggaagaggtggaggaagcaccaraaggtgaagatggastcagcatagaagwtgggaaaacaaagaaaagtcagaaggrtgatgaagaacaaattscaaaatatagacagctyttgcaggttrttcaaraaaaavaaaaraaarraaaaraaaatgatatggaaatggaaatcaagtgggttccaggacttaaggagagtgcagaagagatggtcaaaaacaagttggagggaaaggataaactgaccccttgggaacaattcttagagaagaagaaagagaagaaaagactgaaaaagaaacagaaggctcttgctgaagaagccagtgaagatgagattccttctgatgttgatctaaatgatccctactttgctgaagaagttaaaaaaataggtataaagaaaaaaaaaaaaaaaaagccgcccaacatcacctcgtg

SEQ ID NO: 895 - DNA, 552 bp, Rattus norvegicus
tttttttttttttttttcagagggcgaagacgaagtaaaaaaagtgcagttcttcaattaaagtgcatggatgaggtaaactattcgagagttttgagtctgttcggtactggctcagacaggaaccatcctgccatgcatctgctgcatctgggttcgcatcgcctggacgctgctcaaaatcttattctggtgcgtgattgcggtgatgccaattcgcgccaggtcactgcgggtggggccgagagagggagagaaagtcatggagggtacggagaacctcctcctaaaggcttcatgcagacacacatgtgaatcagccacaattagtacagtacaaggcaggtgtagaaatgtttcattaagtcatccaatacaacaatgcaggtactatataaaggtcttataaaatgagaggcattccatgtagtgggtttggcctaatgttgtttgtattttaatgttaatgtgggtccccaaaattatttatatttgagggtccacataacttcacaggacactgagggaccacccccctccccccggttggtt

SEQ ID NO: 896 - DNA, 575 bp, Rattus norvegicus
tttttytttttttttttktwwkwwktcygcayataacatttatgttcaggatggcagtakcactccaatacagattacgctagasaacttggracttcagctgcggmtgcgtgtctgggytcttccttatctggmcacggatcttgasagtgratctcttgatgasagatargcagctmacttgtcccggaattcatgaagatagttatattgcttgatggtctgtatcgccccasmtcscctgacatctcgaakgctgtctatggcttgctgtggtgaaattgagtcagacaagtatasgaggagacargcagctacaagacaagmtctkccaagtcctccataacagtgtaycagggtttttcggttgtttttaakgcargtggccagctcctccatgatttcccagcagctgccaatgtcgggagtccctccatctgggatcggatgatgatgggtgacaattccatattgttggtagaggtccagaargtttgggactctatattttgacagttcccctctggtgcagaaaacaaatacgtcttggatcccagagctctttagttcctctg

SEQ ID NO: 897 - DNA, 1033 bp, Rattus norvegicus
tggcgaagaggaccaggactatgacatcactcaactccaccggggactagaggccaggcctgaggtggttctccgcaacgacgtggcaccaaccttcatccccacccccatgtaccgcccccggcccgccaacccagatgaaatcggcaacttcatcatcgagaacctgaaagctgccaacacagaccccactgctcctccctacgactccctgctggtgtttgactackagggcrgtggctctgatgytgcctccctgagctccctcacctcctccgcctctgatcaggaccaggactacaactaccttaccgagtggggaagtcgattcaagaaactggctgacatgtatggtggcggtgaggatgactagactggcccgccatgctgtccaggcaagaactacagacaggtcmcarcagcatctcagggragctctcactcctgctcctgaggactctgaagctcgccagraagtcgcccgcaaagcakgctgcatctgacatgaaggytagactgtgagcctttcaaatgggaggatgtgactctgacttcaacactgatccccctcagccratgctgagccctcagaatggactgtctagaggtctcccgcctgccacacagggctcagggcagarcttgctctgatgcccttggtgactttcyccacttgaatggctctctctttagaaagagacctckcaykaaggcccctttttcctttaatgcagttttcmtaaagaggctcagkbtggsvcagggtgcagacatcartctcccttcaggcccwccagaagagaagcytacagggcaytggccstggtacatttctmtgatcyvcaggtcttgaggcctcacattgggagggataaatgcttykttttyhyytwttaatgagtatatyyaagttgtcttgtattwtwytattttccstgatgtgtgctgtagatggagagtgatgacaatcgtrtaaatgtamtagaatttttttattaaaatgaactttttcccaraaaaaaaaaaaaaaaaa

SEQ ID NO: 898 - DNA, 710 bp, Rattus norvegicus
ttttttttttttttttttccyttggcaaatttaatgtaactctgataccamaataggacaacaacacaggaagcaacacaaagcaggaacagcagatttttcagtgtttcactcagctgatgggtaatagtgcttargctgctgtgtggacaacaattccaaagccgcacattggctccgtaggaagtactgctgcggttagcgttatccgtaaacggggaacaagcctgaaactttactagccgtaagagaagccacaggaacccaggccattggctccaccaccaaagccagtaccggtgcttggtccaccactaaagccaacaatagaactgggtccattactaaagctggagccggtgttgggttcaccagtaaagccactactggtgttggaatcaccgccaaagccaatgatggtattcagtcctctgtcgaagctggcattaggcccactgccaaagccattgccagtgctaaggcttacactaaagcctgcaccactaaagcaggagttggtgctggaagagcctccaaagcwtaggttggtgttagatgcactgccaaaacagagactggtgctgggtgctccaccaaaacagaggttagtgctatgagagccaccaccaaagccagtgctggtgtttggtccaccgccgaatccagcattggtgttcagtccactaccaaagccagctacagtgcttggt

SEQ ID NO: 899 - DNA, 540 bp, Rattus norvegicus
agttgtatgagcattttatttatacccatgtgtatctgttgtcccatgaatagatttggagaaatttactggccttgaatacttcatccacagaaggaatgggaaggataagaaataaataagtggttcctcagccccttattactggcacagcggggtaggaagaggaggggcatgattgtcctattggctcagggctgcaggacttgtgggaagaggcagggaagccccgtgcggaggctgggcctccacagctcagtgggatcgctctggcctcggcagagaatggaagaaaacttatcctggacatcctgggccccacacagaacggccatctggaccatcacagccacagctgctgttgaagggccagctgcatggcccagatgctcaggggccgcatgtaggccagggagcggaacactcgctgctggcagtatgcctctggggtctggaaagccaggcccaggcgttcccatacagtgcggtaacagccttcagctgtccggaaaccttcccaagtcaggcccttttggatca

SEQ ID NO: 900 - DNA, 628 bp, Rattus norvegicus
tttttttttttttktktgkgagaaagacattaaagcctttwttwwyytywtwttagtttgacttatttatttaaagggacatgttcctggggacactggataaccagttgttttaagagaaaatcaccttctgtcggcttctgattggacttcatgtagcaaacccatgatcctggtgttgtcatttgaggagtctgtgaagctttacaaaggcttctgagttamagcttgtaagcccrgccttggccttagcttccccttttgagtatgaaagaggatgagacaacacctgattctcagtacttccttgtaggctttagctttcaaaaaacaggtccctcagcaatgaggaaagacctctctgtgggaatgacttcaaactgccaaacactccccaactccctgctgtgagggataagctgagagaaaagcccaggtgctatgtctcctggagtactcagctgctctaaggaargaaaactctmgwrcaagactccactgggctgtggcatatttctaaaggaatgggcagattactattataaacagaaggaactttcacactgtggttcacagatacaattggacattttcaactggcacaggactaaagccagtaatggggggt

SEQ ID NO: 901 - DNA, 717 bp, Rattus norvegicus
tttttttttttttttttkkwktykwwwttkwkkkttttyytyttttttacccactttttaaaatatatttttatttattcttgaggackttcayacatgcatacaatgtttttttgtaacaccaatgggcaagcaggactttaaaaaggtcagtggagaaagtctgtgagcactttcacttsaacgctcctccctccctcarttaggctgcctgcatyagcccgctgatactstcttccacctctgacagcwtcttmaagatctgcttgaccttarcttcatcaaactccaracacagaaactcarattcccgtscacttctyccaaattccagctctatkatggcaacagggctgtgtatttgagttgartgccgtgactgggacytgccgtccactcthcakcgcwvgyscmgaagcmcgttgtcycagcggctctggctcatgaggstctctcggatttttgkcttatggctyttccaaaryttggdrmtgrctgcarcttgttcactggtgatgccgccttgcttcttggtttgagcggtcaggaatgcctytaactsgkkgaaatccatgtctgcagatgcaatagacttgagaattcccctcawcttcgccaggaaggggcaraattcctccagtggmacttccggrwagagttggctgtgcagcarctcctcaktgatacccgagtgtccgtgaaaagtgttctgtgcca

SEQ ID NO: 902 - DNA, 718 bp, Rattus norvegicus
tttttttttttttttttgatatttaaaagttttttacttcaaaatgtgcttgttcccataaaaagatgccccctccacttttaaagttaagtaatttttgatatytyttkywywkktywtacgttttacagatagccatctaattatttattacaggcagtaatctaatttttacwtgtttatacatttcaaggaaaatatccaaccatcacaaacataaaatttcaactgtaaaattgaaatttacaccaataaacacgaaaaaccattttmgactatgtgctaccttcgcttgcttatgcagratccaaagaatgcaggcaaaccctaaaaatgtagcagaagcayttccgcacactggcatcaaaatcgagtttgtgcmswmgtgyykccactagattcatagagtgttctttggaagaaaggagcagcgagtaatcatctggtcgctctccggactctctgcagctcctcaacaggcttccattcctggttgatggttaaaagcttttggggttgagtaggatccaccgtttcccaaggttctgggtttctttttcgatcaataaccacgtcggtttttttcaaagcatacaaagcaaaagatgaggctccagtggctgccgcgcttataaaaaacgccaaaggaatgagttccttatttttcatcaatctctggaaaatgcccatgatgactttagtgtagaattccacctcg

SEQ ID NO: 903 - DNA, 2304 bp, Rattus norvegicus
ctcaccttctcagagcttctcctcgggcttcgctgccgccctaaaggttactgtgatctcggcttgagagcaaggtggacagccatggcggcgtctttgtgggttggacctcgagggaccataaacaattatccaggctttaacccatcagtggatgccgaagctatccggaaagcaatcaaaggaattggaactgacgagaaaactctcatcaacattctgacggagcggtcgaacgcacagcggcagctgattgtcaagcatatacaagaggcgtatgaacaggcgctgaaagctgacttgaagggtgatctctctggccactttgagcatgtcatggtggctcttattactgcaccggccgtgtttgatgccaagcaactgaagaaatccatgaggggcatgggcacagatgaagacaccctgattgaaatcttaacaaccaggacaagcaggcagatgaaggagatctcgcaggcctattatacagcatataagaagaatctcagagatgacattagctctgaaacgtctggagacttccggaaagctctgctgactttggcagatggtggaagagacgaaagcctgaaagtggatgaacatctggccaaaaaagatgcccagaccctctacgatgctggtgagaaaaaatggggcacggatgaagacaaattcaccgagatcctgtgtctacggagctttccgcagctgaaactgacatttgatgagtacagaaacattagtcagaaggacattgaggacagcattaaaggagaattatctgggcattttgaagacctgctgctggccgtagttcgctgtacraggaacaccccagyttttttggcaggaagacttcatcaggctytgaagggagctggaacagatgaattcactctgaacagaataatggtctccagatcagagattgaccttctggacaysmgrcgtgagttcaagaagcactacggctgctctttataskcagcsakccaatcagatacttctgragactacagaactgtgctswygargatctgtggakgagatgattgaagaaratggmttccaacagctgcctgccyygatggtggaccgcctcaacagctytgcttactgctttcgtacagcactccagcamtgggcaagcgaatgcaagacagcaacccgtytgcmtgatgcgcattggcttccttcartgcaacagcaaaaatgaacttgattttattttagagcatctcattcataatgtagaggtttatargggaaattcaatytagamttaaagacctactaatgattttttatttggcttaggaagttggaatctgtgttgttcaaagccattaaacataaatcaggatactaaaaatggctgccyttgctmaatgtaatttttgtatttgttttccgtaactactaatactgtatgttgcctggtgccaacaaatacttcaaaatasatttgttgtaawtgcwrwmavwrmmwmwawwamttgattaktgtggtctaaaaagctaataatgaaatgacatggtggtgcacacctataatcccaacacttaggaggtagacacaggaggatcaatagtttggggtcatccttgtgaaagtgcaggagatataaataagtctattamctgtttagcatggtcaakgctcggacccagggaagragaatggtgtcctatggattcttgtcaggsaaatgaagtaaygctgtctatatttgatcttcagcaggggctggattctggraggaaaaacagaaggackgcygrsrgatacatccactattcctcakgaacctgtggaacagatttctgtctgtctgacargaaagccacttccctatctctccttcctstggtagatgaggcatcaggctgcctgttaacaagtatctctggtgcatgctaacctccagacttccccagttcattccaggctgctccagctcagaggattccctttccctcckacaactactgttttcctgtatgacccataaggttttcctactcctgctcttctctctgctcccaagagcagtagccctggctcttgacagcctgcccctctcctctctgccccaragatgtagccattttgaacatcttggaagttccaaaaggctctggctattctgtctctcatttctacaaaaaatataataaaatctatataamccttwawaaaaaaaaaaaaaaaacacatgcggccgcaagcttattccctttagtgagggttaattttagcttggcactggccgtcgttttacaacgtcgtgactgggaaaa

SEQ ID NO: 904 - DNA, 497 bp, Rattus norvegicus
agatcttgccaggctctgtggatgcccgtgtaaggcgctatgacctaaggatggtacaagtcacctcggacyatrwrrscagmmshaymasctgsastgctgcctgagtgagcgcgatacacacgtggtcagctgctctgaggacggcaaagtgttcttctgggacctggtaragggttccmtakcactggccmtacctgtgggttctaatgtggtacagtcaytggcttaccatcycrcagacccctgcctattgactgccatgrgaggcarcakccastaytggsgagaagagacctacgagscagagggtggagcagsctgaacttatggacstgacaccaaggacccagaccaattcagaaacccaacaaaaagsccatttattctcaagatgctgctgaccaaggagagggcccagggaggggctggtatgcaaataataaataaaggtgtggcagaagcctccgtctttammhammwmrwraaaaaaaaaa

SEQ ID NO: 905 - DNA, 843 bp, Rattus norvegicus
cggccgcggycatggcgtacgcctatctcttcaagtacatcatcatcggcgacacaggtgttggtaaatcgtgcttattgctamagtttacagacaagaggtttcagccggtgcatgacctcacaatkggtgtagagtttggtgctcgawtgataaccattgatgggaaacagataaaactccagatctgggatacagcagggcaggagtcctttcgttctatcacaaggtcatattacagaggtgcagcgggggctttactagtgtatgatattacaaggagagacacgttcaaccacttgacaacctggttasaagacgcccgtcwgcmkkccaattyywwywtkktywwywtgcttrttrkaaatmmwmstkacttakaatctakgagagaagtgaaaaakgaagaargtgaagcttttgcacgagarcatggacttatcttcatggaaacttctsccaagactgcttctaatgtagaggaggcatttattaacacagcamaaraaawwtatgaawmamyccrwgaargggtctttgacattaawaatgaggcaaacggcwtcaaaattggscctcagcatgctgctaccaatgcatctyacggaggcaaccaaggagggcagcargcakggggaggctgctgctgagtctgctgttgccggctagctgcccagtggagccacgcactctgtcaccctctctcctcatgctcagctgagacatgaaactattgaaatggctttgtgtcacaggagactttaatccttcagattcttgtataactttgaataaatggttaatgttcacttwaaaaaaaaaaaaaaaaaaaacgacctcgtg

SEQ ID NO: 906 - DNA, 631 bp, Rattus norvegicus
tttttttttttttttttaatgctcacttttttatttttataaagtttagtttctaacttattaattttcatttcaagcagtatccattctcaattcattatctgarttcttaacaggagctattaagcttgcgattacttttttktagaaagcagcctattcttgttctgtcactgtaatatcccctggaatctcactgaagatgagaaacagaaagtttccatgtttcagaccttacataatcttccacctgctctcgtctccacggaacacaatggagttctcaatttaccgattttctgtctgagtgaacagagctttgcagcaagtgtgatgtgcacagaataatccagtctctactttgatctaattttcttttaaagyctgagtttcagctctgctgtttaaagcccattcctgcctttggacttatcctgtttctgtgagccccatattagcgcaggctccaggggcactattctctggggtccyctgyrcmcatgacaccctatgcagatgctgctgagccacttgaggcctcatgggaggggcgctgagacctttatagcaagtggattttcttaggcatatttaatgaatccagttagcttaatgggaaataaaaacattg

SEQ ID NO: 907 - DNA, 631 bp, Rattus norvegicus
  misc_feature (5)..(5): n is a, c, g, or t
  misc_feature (45)..(45): n is a, c, g, or t
  misc_feature (51)..(51): n is a, c, g, or t
  misc_feature (53)..(54): n is a, c, g, or t
  misc_feature (69)..(69): n is a, c, g, or t
  misc_feature (76)..(78): n is a, c, g, or t
  misc_feature (83)..(83): n is a, c, g, or t
  misc_feature (87)..(87): n is a, c, g, or t
  misc_feature (91)..(91): n is a, c, g, or t
tgggntttgatgggggggggtgttggggtgtgtttttggggttgntatgtngnnttgtggttttttttnttatgtnnnttttntggntttntttkttwttttttttctkkggagtcagccacttatttattagattgacttaragatgccaccttatttcataaacatcaatgaacatttatttagcatgtgccacatgtcggaacttagctaacaatgtattttctgtcttgcccatatgataccctcactgtattaatcacgaggccagaagttcctcactgtctgcacccttgatcttggacttccagccctcagcaccagatgttcttctttctgaactgtccctctgtggggattccaggaataggcacatgggctctgcttacaargtcaagttcyagccagtaagcgcttgatgatgtgagcagtcttttcaagaggtgttgtcatccaacgaggtctagctgtgcaatattagaaacmcammagagtcaagcmctaagagaactctgctaatgacatmcaaagatgacaagaraggtctgagctcacggcctggaaactaccgggagaaattagaggctcaagagaggagatgaattaattaatgaaaacccagcctcgtgcc

SEQ ID NO: 908 - DNA, 1108 bp, Rattus norvegicus
cacgaggcaccctctyygggrctgtccysrragtaggcttctttggcttgtgaccttcagcagatgtctgccgcttccagcatgagagtcttcttgcctgtgctgctggcagcccttctgggtgtggaacaagtccattccctgatgtgcttctcctgcaccgatcagaagaacaatatcaattgcctatggccggtatcatgctccagcacagacaattactgtatcacgttatctgctgccgcgggcttcgggaatgtcaaccttggctacaccctgaataagggttgctcccccacctgcccccgtgaaaacatcaatattarcctcggtgtggcgtccgtgaatagctwctgctgccagagctccttctgcaatttcagcacggstggccttggacttcgtgctagtatcccactgctgggccttggactcctgctcagcttgttggctgtgctgcggctgagcccctgaccgcccccatgtgttycccacatccccccagctcakgaagaaaagcccakctccttttakgtsccaggggaccytaggagccttcagctcctcctgggtgtgtctagttccccttcacactctctcagcatcagggstaagtaccraattcacccatatctgctctgttgaaatggwactggmtacccttgcttccagagccagkcttataacctcctttggggaaccaggraagggktdaagatytccttggaatckcamgagkacagagtcagccttgmgkcmygarggcacawtgacaaggatgtctaacccaaatgaatgtgcacmkgwgwtrmwmamggkatccgtgtgtgaatgaasccgctwggattctgggatgggtaaagaagacctgaaagattytagagcagaaggcctgtgtctccatcaaaacctcttcccctgkaattactgtactcatgttgcattccctgtgcaggaggctgctcacagagggctgccatccctccagatgaaggctccaacccccagatccagtccctccctgccctytmtgcccgcactggmttcctgytgctattctagtsccycaaataaactgttcccamccgtwaaaaaaaaaaaaaaaaaa

SEQ ID NO: 909 - DNA, 617 bp, Rattus norvegicus
tttttttttttttttttkwwyaactcttttcttatttattcaaagagactcttggagggtcctgcataacccttgtcattactccaaccctacccatattggggwacatccrargttgaccatcatgtggccaaagctgtggttgtgggagctcattgtgccccagcccctggtttgtttcttcattgccccaaagtgacagtacagatggtctccagttcaggtgagcctccaggtctgcatccagcaggaggatggcctatcctcasagtttagccggcaggacctctcgccgcaccccgtctgcccgagggcaggatcccctcgtcctggtttcgggtcttgtgtgacttctgcatccaagcacgccactggtcgtacaggcggaagctaasgttcragcagtacgcgtgcttcttgagccagccgaggaactgcttgagctcgcgccgcaccgggcccgagctakgctcgccgccccgcggytcgcacaccccgccgcccgggcccgggcgctcacttcgaggggtggaggcagcggtggggtggctccactcgctccagattcccgcctttttcgacccatagatcccgaatgggttacaacgaacttggac

SEQ ID NO: 910 - DNA, 576 bp, Rattus norvegicus
tttttttttttttttttkkytkyktttcttaatgtaatgactctttattattttatctgcataccctcaaatgttaccaragctccgggtttttgacaaacatttgctcagatcarattagtgtaggagakgtccattcacttctccaagtcacatctgctcgcaacggkctgttcctgattcagcatggggatttaaccacagccttgcccacaccatgatgccaggcargctgggattgagaggactgcaggagtgaggtatgcatctgcarragagaagtctcgccggctggttcagcttcagtactctgcgtcatagggaaactcttccatgttgactgtctcargcagcaggcaggccctccagtttctgttgaagctcaggatagtggccatctcctggtcgctcaactggaagtcaaagacctgaatgttctcctgtatacgtgctggsrycwcwgacttggggatcactaccacgttcctctggatgkggaaccgaataagaacctgggctgtggttttcttgtgcttggcggcaatctctttaatcttggggtcctgtaatagtgaa

SEQ ID NO: 911 - DNA, 691 bp, Rattus norvegicus
cacgaggctttactctagactccaccctgtcccctgctgcctccgcccccagcccggcctctccagacaggggcccagcctagccagcaacttggaaatgaagagagaaaaagatkkkwytyywkkytyacasccwwggtaggccaggaawywywkkwwkytkyywywywkkkkdcaamcwttgacctttattcatgtcctgccctcccaccaagtaaagtcaaatwcaaggctactacccaaagcagaaaccccagtccstatcstaractcctcctgtkagccaaaaatatataaagtgctggtgtgtaatatggggaaggccaaacggactaagaaccccamccytggacctcatcargarkargarccctgcaaaagaagggcagggcaccaacytakktcccagaggcagggagaaggggyctagcagcccccacttggggctggggaaactcatgcagtccagggcagaaaggaaccaawaaagaaactggcagcatgaaatcctacaaggatkaaatggggggaggggggtctgtacccctgtgaagggaakagtgggagggttaaggaggctttggggaattcagagaatgggacagcccctccggcgcttattcttccggacctgtaggccagcccgagtggccatctcaaatacctcccgcmcycstkccttactcttggc

SEQ ID NO: 912 - DNA, 794 bp, Rattus norvegicus
agcttgcggttgcttccagtgttttttttttttttttttttttttttyhhdskgyayaytscttttawtatttrywtartacartatagcatcaatgctgaayascatgattatgtgcaatacatamatatgaactatctgtacacatctgcaaatctaacttagaactaaagtacataaaattgaagcaaaactgaatgttttaakwragaamarctaggmmtgrdsactkymmtrmwtcmkaagtakygcmttgkgtacatacttaactatttacagatgaaaacaggcattaccacaacactaatctaactatactcatttatatataaaaaacacaagtttcatacatcacaaaraaccttccattataacacagaagtgatattaccagacaagcatcagtgaagtatactgscttttctagttgttattgtacaatgctgtabataatgcagcccatgcaatacacccaagaacactagagtcctacacccaaatacartatgataaagcagccctctgcaagtggtgctggataccactaaagaagtctactgcagccatgttggttatgattttccatgcasaagggtacmgttacattaagaactgargtctttamaaagctttamacrttctttcttgaaccaaaacattcaacaaaagatgcacatgaaaaactaactgctcagatacctttgcaacttaaaattcagatgcatgttatttaacagagctgctatatgtgammwcswracgtagaagttaatttcttcttgtaaacaaatcct

SEQ ID NO: 913 - DNA, 646 bp, Rattus norvegicus
cggscgcgaccgcccctggttcactcaggatcaaccacgccaaccatacgggctccaatcatacctacctgaaaaacgcctacagcaagccaaagctctgcgagcccgaagaggaacttctccagcagtttaaacgtgaggaggtgtctccgacggggagtttcagtgctcactacctgtcgatgttcctcctaactgcagcctgctwatttttcctaatattgggactgacttacctaggaatgagagggacaggagtacccgaggacggaagactcttaaaaaacccctttgatgaaacatttggaaaaatacaagcaagtgaaaaaaatcttatgatgagcacattatacaaacttcatgatcgattggctcagattgcaggagatcatgaatgtggccgttccagccaaaggatgctttctgtccaagaagcagctgcatatttaaaagatttaggtcctgagtatgaagatgtatttaacacttcactgctgtggatttttaaaaatgggaaagatgttggaataaggtgtgttggttatggacctgaggaagacctgacaaacataaccgatgtgcagtttttacagtccaccagaccacagatgccgttctggtgccgtttccgccgttccctcgtgcc

SEQ ID NO: 914 - DNA, 573 bp, Rattus norvegicus
  misc_feature (559)..(559): n is a, c, g, or t
ttttttttttttttttttkktgtttttctctcagcatcwttacttttgtctaagaggaagtaaacattgatccctaatacacttggtatccctaggtatcccagtacactggtgagactgaggagggacagagaaagggtgagggtcttgagggtaggccatcagcttatcacacaagtgcctttctccttgaagggattcttgtcttctgggatgcctttcagaagagggtcggtccctgattgggcctctacmtmrtccktgatttcctttcctgtcttggaaatcggatcacgtgggttcttyacttccttcttcaactgctccacctccatcctcagcagctccttctcactgagatcctgggccatcctgcyctgttagagctctctccaagtcaccagtccgsswgcrkgmcrcaatggtgtttgaacttcctagagcttcatcggstgaaaatcwtcakwwggcacaaagyagmtggtyrgsamwkccwamtckcysttgcmyaagctsmtcrtgmsctcagggtcgtaagtcctgatcccagctgagcctnccagcccttcactc

SEQ ID NO: 915 - DNA, 624 bp, Rattus norvegicus
cgttcacctgtcactaggatgccaccatcgtatccaagctctttttggtgaagctgtgcacctaaccagtgacaagctagtgactcagtctctccaacatgtcacaaagtaagagacatttgattaacttacagacatcgaattcatttctctactgaaaccttaaagtagtatttggtcattcattgtatgtgtcttatatacccacccacacacagacacaaaggaaatctatcaaattaatcctgatgtattygaagtggttattcaattcatttatggcagagcaatatcagtcctaatgactcgtgaaagtgttactaactgaatcattatcttacatttactgtttmgtaagcatattttsaaaaatgtatggctagagtgtcataataaaatggtatatctttctttagtaattacattaaaattaatcatgtttgattaamtggttcctctgatgtagtgtgtcatttcttaacatatagagaactgtagagcatttttttatttaatggcagtgtttgcaactcacaggcacagaaacactcagactaatcatttatcatagagatatagaacttacaggttaaagtattcacaatgtatgtaagagagttatga

SEQ ID NO: 916 - DNA, 721 bp, Rattus norvegicus
ttttttttttttttttttaaaaattaacaaatatattagcatcagaagagacttggacggggtgcgtgctcaaatgccatctaggatggttttaagaacaggggggtggggtaacttgtgctactccctargagggtgggggtcttartgcttctcggtttcctgagggtccccacatctcctargatggcacattacagctcgtagcttyctcctcctccttcttcttcctytggaaaccggcagctacaagcatcttcctyttgagcagttctaaccgccttcttaaatgstwrckkgaakatgkgggggwmcttcttcytkasccatttgrgcacagagaaccagagaatgatgaagatcaggaacaggagcagcgctaatgtcagcgccaggaacaaggtaagaacctgcaaggggcgctctcctgattctctctctggagtagtcacagcactaggagtggtactgggagagaggctgaccwcrkggggtccacagaccacgtctttctccttggtcccattcttaagcacagaccttccgtctagagagcagttcgtycasskycsscwsasgycsrcrscgtystgrtcaytarrcgwtcccwmgysacagtttttacaaccctgctccgttagttcctggccgggcctgcagtccttctyacacctggtacactttggccccaagcagtggaatcccttcacgcacttacact

SEQ ID NO: 917 - DNA, 848 bp, Rattus norvegicus
camgargcggcgttcskcasgwgcttgagtttccgatgagacacaagactgaagaggaaaactgatctcccccaaagacatagaataattggtaaatctggacgagaacacaggctcataactgcgaagagcaaggatttttatattactcttataggaaagagaccgaaagatctttacaagctatcttgctaggagatgcccaaagtcaaaaraagccggaaagcacytccagatggytggragctgatcgagccaacgttggatgaaytagatcaaaagatgagagaagctgaaactgaaccccatgaggggaagaggaagkykgagtctctgtggcccatcttcagratccatcaccagaaaacccgctacatcttcgacctcttttacaagaggaaagccataagcagagaactctatgaatactgcattaaagaaggctatgcagacaaaaacctgattgcgaagtgraagaagcarggctatgagaatctatgctgtstacgytgcatccagactsgrgacaccaacttcggcaccaamtgcatttgccggkttcccaagagcaagctggaagtgggtcgcatcatcgaktgcacgcactgtggctgccggggttgstctggttgactgacgcccctgactcctctgcatyttggactttggaccttgggstcctgcttattgggccmctgcctcctraagcaactcttytcaraktggcactcagagaaaagacccaggggaagcatgagctctacaggtgmcagctttagtgttcmccagctgagatctgtaaaaataaaacctttagacctyttmmmaammaaaaaaaaaaaaaaaaa

SEQ ID NO: 918 - DNA, 557 bp, Rattus norvegicus
ggcacgaggagctcagcgagacctcagccatgagacttctcctcctgactttcctgggagtctgctgcttcgccgcatgggttgtggaaggtgtgggcactgaagtcctacaagagagtatctgtgtgagcttaagaacccagcggctgccagttcaaaaaatcaagacctacaccatcaaggagggagccatgagagcygtaatttttgtcaccaaacgaggactaagaatttgtgctgatccacaagccaaatgggtgaaaacagccatcaaaaccgtagatggcaggkccagtgccagcaagagcaaggctgaaactattcccacacaagcccagaggtccgccagcacagcrrtarccctgwctgggtaacagcctcaggacagtgttaccctcaatcaccaagcagctcatctcagttcccaagctcatggactatttacgctatacttacttttagtgagagtgttttatgaaaaaagttatttttattttttgatgccattcatattcatttcagatgttataactaataaatatttatttttgatgatc

SEQ ID NO: 919 - DNA, 615 bp, Rattus norvegicus
gctgcaaagaacacctttattcaaaggaaggacgtcaccatggcaacaacacatcagttccctgagagcttttcccttatcattgttagcttgcctagctaaggtctttgcaaaaagaacacagaatacagctcaattgacagggaaggttccagtaggcactagcaccccaacataagaaactgtgctacaagacagtccccatggacaccsgacgggagccmtgagtcctytcgcccacccccactgcaragatccaaacacagatcccacagaactgcccttggagtatagagtagttagkgacagacctgccactccctgaagaacacgactgcccagcagtctgcaacatgggtgggcacgccacacaaacacacaaatwtagacatacgcacatacacagagccctgaaragcctcktacaccaaggccaggacatacaacaggggtccctgggccctttggataccaggggcacccagggacagggtctcaaccatggttgctasaggatggcagtgcggggacaccagggtgtgtccgggtacagatggcagtggatagagcggaacctggaagggtcagcctccactgagaagggtccccctcgtg

SEQ ID NO: 920 - DNA, 546 bp, Rattus norvegicus
ggagactgatatactggaatccctaaagtttgagcctttacaacttatgtgaagaaatgttgcacacatttctggatgaatcttwttttktwtttckrsamgartgtaaatcatctcctaggcctctcttgctgatggtyccaagctgaatgtttctgggtaggccatttgacacttcggatcagtgacgtactcctgtgaggttaaacacttacagtactcctgatggaaacagtttcttgctttttggaatattatcacttgaataccacttgagatcaccaacatgccaggacaagtccactgattttgatggtccaatgtaatctcattcaggaggctgggaacattggtggtttagtcttgtgaattttaacagatctccgtcattgtttaagaaaaccaacaactggcactacttcttaggctgtggtttcagtctctgctagttcataccgcatgtttattttggagtcttttggtaagcatggtgcttgtactggtttaaataaaatgctmwcvtgvmrrraaaaaaaaaaaaaaaaa

SEQ ID NO: 921 - DNA, 706 bp, Rattus norvegicus
  misc_feature (663)..(663): n is a, c, g, or t
  misc_feature (698)..(698): n is a, c, g, or t
gckgccgccrcwcmwgrccccgcaagcgcgycgccacgcacacttgcagctacaccaactgcggcaagacctacaccaagagttcrcacctaaaggcgcatctgaggacgcacacaggtgagaagccttatcattgcaactgggacggctgcggctggaagttcgcgcgctctgacgagcttacccgccactaccgcaagcacacgggtcacaggcccttccagtgccacttgtgcgaccgggccttctccargtcsgaccacctggctctgcacatgaagcgacacatgtagcctgggtcgactcggccagcccatgakcgactgtggcgggttccacgcgccgggcacggyccccttgcaacaaactgactgttatttattggrccctgaggacggagtcggacaagagtggscacaggaaaatgactttgccaccagttccggctcccaccgtgactgaaggctccaggaaagaasacwsgwgcctgtgaagaatgttttcaaaatggtgcaataattgacttctttctctcgggttcccactagaggatysaggctagccttgtgagaaatgcctttgagtttactatccccaactatccccaacgttgtttttataatattgtatataagtkaccgtggcaatctgtatgactataanggagacgatggcatctctgtcgcctgcttcgtttntataactc

SEQ ID NO: 922 - DNA, 782 bp, Rattus norvegicus
ttccctwwgawttcggcackwkkytcgacttttccatgttttattcttatattttatacagatacagctatattttacaaygcactaatgcagtttagacacagccaaaccctgtctccggagtaattataacaagcatgacgcagaatgtgggaggagtcaaacattcccaaagagagtttagttagtgacaacttcaagtccctgtgtctgcctacacttcaaaaagggatggcccacacccgtccatcattgaaaacttccgtgtaaaaaggcaccgtgaggacacgtttacaggtatgtacaaagtgaaaaccagaacaaaagtatacatttctccttctgcagcttttttttgwtcttttytgtttttaatacacactttgtaaattgtaaaccttcacttgcaaaaaaawamaaatacacggaggcattttagacaaaatattttcttacttatacagacataatacttaaaatagtctcttaagtgctctttctcaataaagattctcaaatccgtgtctgcctgcagatacaaaatcgagcctttaacacagttttatattttcaatatatctttttaggtttatatatttatattatatatatatatatttatatatttacaactctgccatatattccttcacctttggttaaaaaattaaagccctctctttgacaacatactgaagtcttgtcttttaaaacaatgcacatttacatacaaaagagatctctgtccccacagaacatttacatttcttatgttgcaacct

SEQ ID NO: 923 - DNA, 640 bp, Rattus norvegicus
tttttttttwyywyyttwaakcattcatgtaatttattttccttaaataattcgctacaatcctgccacaaaytaaaraaaaaattaacatggtattcacagagcagaattctttaggacaatcaaaatcccagagtacttagaataaattaacatcaaattgtgtttatattcagatagcctgattctctcctctgaaatgaaatggagaccattgtaacctagggtgaacgaacacacttgttcttctgtatagacatgaattctttacataaactcaacawtaatttgaatcaagttaggaatcctgagaaagtcacccacctacaggcwtacaaagacacacacagacagacacacacacagagacagacwgacagrcagrcwgacacacacacacacacgcacgcaycactcttgagaagcagtgtttctcatggmcacttactagaaggtcatttctcagaagggtctaaaattctgaatatttggatgctatcatccccccgcccccaagaaaatcgtcttgtttcaagtgtgasagcttgaagtagcarcaatccagagattcagtagtcggcgattccagtcatggagtccgaggatacagtagggggtgagcagaggctcgcctgcttcc

SEQ ID NO: 924 - DNA, 1174 bp, Rattus norvegicus
tttttttttttttttttaaggaattataaactagttttaattacatcaacaggaagaatttcaaattatgttgagagtttccgttcttaaagtttcatcctggttaatacattctgagtataacttaatattctatagataaaagtatgtatggtggccggtgagtggaatcatcgttcaggtagcagttaggagtgttgctacaatgactttacagaaacagaaacccatatctttattagtaatgcgccacacttcttaragtaaaaatccacatwagacaggcttataaatatacatttatatataatctcaaaatcaaccacagttgaacattaggtatacaactttttataaaacaaatataacccatcagtgtctatttaaaggcatagttttaacaaaatagtattttgtagacagtctcaaaaaaactgtattagtacttggagtcagactgktccagcatgtcgatgcctcagggggaataaggcmtgtggagaarctgcattctctcttccggggctragggcccasggcattcgatgaagcagcaaagagtctaatgacctgggcsagtgccacacccactgagcattcaacaaactgagagaatgattacattccaraagaatcggactgagtggttactctcacctaatagcaaatrtttgagagaaaactgaaaatattccccagtcattggtgtattcttaaatagaacacgccccctcccccaggmtagatttacatatgttttcccattgccaggcatatttaagctcttatttccctaactactattttcaggaaaaggmaattatatgcaagtcatctgttaaataaagacacaaggaaatccaacatgaaactactcaagttgctcactgaataatgaaatagaacgagagaactaatgcaacttaaaacatgtttaggctgcctcgtaacatgccagttactcatagagaaaagttaaattaagcaacaatgcatatatgctcctaatactttatataatgctaaatatgtgagtcaaggcttaataaaagatctagggatcctttctataaactaaattaccaaaaattcacaggtaagtatgcttttaacacgtaatgttttatctctgggttttaaagtatacaagagatcagaaaaagaactcctcgtg

SEQ ID NO: 925 - DNA, 689 bp, Rattus norvegicus
ttttttttttttttttttgaggtggttttacaaatatattaaactgaaacattcagtacagctgcattggagttgcaaacacatatggctccaggttgtggatagagacgggctgcagggcagcatgtcctgggccaccagcattgtgaggaacagcagcacatgagcgtcctctggcccatccgccctcggccacagaggcctaagcctgtccacagtgccagcccttgctgtccaagaggatggccaggtggtgggctgttcagtactctccccctttcctgttgatcgtgggcaggtgacagtgtttcaggtgaggtttgatgtccttctgagtgtctgtcttcktgttcacgacagcgcacttcaggggtctcagcacggggactcttccatttgccccagtgcccaacaccgaccgcagtgcaggactggagcaagatgacagtttggtcatcccagacagcctcagtttggggagctccgtcagactagtcggcccctgtcgcctggcacggccctcctcttgcctcaggggctgtgtttgaacttagtgagggtcttctgacaaggggtgccgatgacatcgtggatttttgagatctggtccagttcattcacaccaaggaaagaggggctgcaggctggcaatctcatagaacacgcagccagcgctccacaggtccatc

SEQ ID NO: 926 - DNA, 1088 bp, Rattus norvegicus
ttgcggccgcttccaatttttttttatttttttttttttttttttttttttttttttttttttttttttttttwkyhkwbdkgtccaraatcacctttahtctgcttccattgtwaatatttcacttgttcccatttaaaggtttcaragccacattaaacagtgccagcwttadcaracggytgtgkrrraacattwtaaaacacaagcgatwatcyaaratagccccttttacagcatycatattagkgcattaaaacattgattcaaaaagacaaktgagttcattskcwgmcatctgattcttatttgaatramgaatggttwtaasaaaaaaagtggcatctaaacgaactcttaacatttaagtattaaattyaagtayaamaatgaaatcccaaatctgtwattgtaggaacattacyttgcgaakacgggacccaaagatacatgtctaatgagtgttctgagggacmcaagggaaagtaactaatggccaaataaawcaagaccgtgtgggaaaagtggktccgtgcagtrcgaaactggcatctttagcatctaaacagaacagacattggtatgggtttttcagacgcttctgcccktagtatgtastggattaaatagtccacattaaaawcaatctatcctcactatstktakgatgcaatctgcagcaaatgcatatatacacatagggaagagattcactgattttattcagggatgatgagagccatccaataatggcagagcaataatgatctgcactgccctggaccacaggggataaaatgtcccacagatggggctgctagggtttgcctactgagaaagaacatttactggacaaatgaaacttaaactcggatttttttttaataagatagcacaatcatgttacacgggttacacagtgacagaggtgtaggcagagcacacatgccaatcagataattccccaaaagttaaacaatataaawaaawymtwwrygwmsggcatatacaacgtgagcaaaaaacccaacagttgttggactaaaaagcagggaaattgggccagcaaagggaattttaaaaaactt

SEQ ID NO: 927 - DNA, 584 bp, Rattus norvegicus
atcgaaagctgttatttacacaaaatgctacaatttttttgttgttgttgttgttgttgttccgcakaaacctaasaacagtaggcatatckaaagacatggaattttattcakaatacctaagaaattactgtacgttatggttctggctgatatatttttaaagtactgcattaaaaagcaaacaattatttgtaaacatgaagtaaacagacaacgaagaaagttcccacataggaggagaaaaaaaaaatctttgttttagatgcatcatcatctttaagaacaatgaattcaaaggctgggagaatcatcttttattgtttattaccctctcaaacactgtggatgcaaatgctcccgctactgttctstaaaactaggtcagtcagtgcctttccttggagcawggagaacccccaacatggctgstcccttctgaacctactgtggacagtctctaatgatgtggagatgttgctctgttcgttttcttagggtctcggagggaaggatgagagccaactagttaaatctggtaagtctttctattatgggctgggtgcgcctcattccctcgtgcc

SEQ ID NO: 928 - DNA, 1762 bp, Rattus norvegicus
aggaatggtgatggggaaacccctcatgacttacagtggagcgaatacctacctgcttaggtaggattacagtacccagcacagtgcactgtcagtagaaacgtttaataagaaatgtatggctgttttagcctggtgttcaacccttttgtaccaaaggaataaaaatagcaaacytgatattgctgcccwccctatcacggaattccctgtcyttaactaggatgaggcaaaatgagttaagaatttttytwwwwkyywtktywtacatataattactttaattttacatttgcctttcaatatcactacattcttccttagtgtttgatttaccatcacttctacaattgtctgtgtttacacaggaaaaccattttagttagtaagattcccacaagttaggtaaaatcactttttcctttggaggtttcctgtagactgactgtacttaagagacatgcttcaccagggaacttccccagttgtccctccgctcctggaagttttgctgccatctctcgtctgagacttaaggcttatctgactgcggctttggccgttatcttctcaacctgaacaaaaggaagctaagctttcaaggatggttctaaaccttgaaratgggctttagattttacaattcctgtgttgccctttaaracaaaaaggtgtgcaccctcacagaacacccctccagtgatcaacacagaaataaagtagctgtctgaaaaaggggagggacagagaaccaggcatctaattacttggggagaaaaaaagaawatwtaaacatcacatggaaaatttaggttattaamacctgaattatttaaaatttcggtttctaggcmggtataacaccatttctttcaaggtamtaatggtgaatkwwkwtttttttttttttatttcccagtagattttctcagtcaatggggaaaawtagtttccatatctcttcactttttaattttgtcttcatttctgaagaaaamgacctgagtgctgattgtttcctcataatttcttaaaccttcacaacatttaaaagtttttctgcattgtgtcttctctgatgtctaaaaagatttgagctttgactataggatttcccacactgaacacattcatacggtttctccccagtgtggattcgctgatggttaatgagcccagaattctsgctmrwggctttcccacattcgagacacttgtagggtttttctccagtatggactctctggtgctgcaccaggatggagcttctgctgaaggctttcccacattcgacacatccgtaaggcttctccccgctgtggattctctgatgaagaataagggcagagccctgactgaagtgtttcccacactcgtcacatatgtgttgtttctttctggaaggatttctctttctttcaaacctgcccttgggaaaacaggtttctccatatttgaaaatctgaggaacacctatgttgagagtgccaggaacctcgtgagactctcccgctgaagcgatctcctgctttggggccagrgctccattctctsccgtagcatcatcatcacagtscctcagagagtggagttcccaggatgcccacttgagctggttctytacggcgtcaagctcagaactcgrtaatccytgagcgtcktcttgagatgctatctcttctacaagtacttcccgtttccgccgacggagagaaaccgkctgtccagggtcatcaagktcactctccaagtcctcctcgtg

SEQ ID NO: 929 - DNA, 730 bp, Rattus norvegicus
tttttttttttttttdkhwykwkkyttkwywkgagcttttgtcactttattgttaaccaatgaatattatccaraattaragatgtaattgtaatttacttgtacaacatgaaattatgctaatgggaaattaccaaatacycattagkgkgttttcacattgctawatgaacatgtgcycycaactgctaatgawaaacgttmtaactgattcgatcactatgaaaacccattttgcaaatggctgttcctgtttavaaaaattcawatagctataaaaatggrctaaacccactttaatcctaacctacaaatagactattarcrgcaratataactggtarcctytyaacackgtwacaactggtgcagcgataatgtacacaatgcaaatagaawasaaaacagtaaaacccgagggaagtcgattcttttascaataaggactaktactctgatgctttggaaaagtgaacactcatacttcaaagtctgagtggtaaggstgaccgtctytccctctcacatgtggaaggcaattccctcgctgattttgaagcatgtgcacaaccactgtacaacagtcacttyaaggttaaccagttgtcttttgtcctacagagtccaaaaaatatattaaccctttcytttttakaatgtttgcccaaattaatcctttttaagtcagcaaaaaaaawcaaaawwaaaaaaaaaaaaaaaaaaacctttg

SEQ ID NO: 930 - DNA, 827 bp, Rattus norvegicus
cacgagggtgacctgcactccaagatctcattcatcaattggccttggaccgacttcttcagatccctcatagcagccatcctgtacctgatcacttccattgttgtccttgtagaaggacgaggcagctccaaaatcgtcgctggggtactgggcttactggctaccttgytctttggctacgatgcatacatcaccttccctctaaagcagcaaagacatacagcagccyccactgaccccacagatggcccatgatcgtytttcggctgtctctgctacctgtcaatagctcctccatcagaaacttcctcctgtcaggcgrcggtggtggtgcatgcctttaatccaagcactcaggaggcagagscaggtggatctctgagtttgaggccagggytacacagtgaggtcctgtctccaaaacaatacctcctstggtttccacaactctccagccattctctgaccccatggaaactgmttatggtacamgagattgaacmtagagctgtgtgcctcctgggcaagcactctctaytgagctacatccctgttaaagtgcctttyttgggagctttgtctyccagcctgccaatcaacccacttwayggrygkgcctagattcccctktgctstgcagtaccagcagccagacatgagttctgcttgaaccatattccccacataagctacaaamtgagctacccastacaaataagaacctttctctgtgtggggtgagctgtgaagggctaaataaacaataaaaagtattgtcaaagtcwwwaaaaaaaaaaaaaaaaacacatgcggccgcaggctta

SEQ ID NO: 931 - DNA, 482 bp, Rattus norvegicus
ggcacgagggtggcaaacgtgcgactctgtggtcctgagtgccagaagctgtctccatgggttggtcacagtgtgcatcgcaccgtgctgtacatgtgcagacgcagcctgcagccaggtttttatttaatgtaaatagtttctgtttccactgaggcagtttctggtactcctatgcaatattacttagcttcctccctcagcctgcaagggtccgatttgccatcgaaagacgacctctacttttttcttttgtattttgataaacactgaagaagctggagctgttaaatttatcttggggaaatctcagaactggtttatttggtgtcgtggaacctcttactgctttcaatacacaattagtaatcaactgttttgtatacttgttttcagttttcatttcgacaagcctgtaattatagctattagaataaagtctcttaactattggaaaaaaaaaaaaaagtgacccaaaaaac

SEQ ID NO: 932 - DNA, 715 bp, Rattus norvegicus
  misc_feature (8)..(9): n is a, c, g, or t
caatggtnntttttttttttttttttkttgcctttattttatyyytatttgamcatcaaatatgtttayagaagatggtttacaggtgcttgagcatcccactggattctctaccatttcamggtgcaaaagaggcttacagtgtgtttcattaaacaaagcaragctgygacaaaacaggmtsacatcaatagtagtatgcatcagaagagtgtagtaatccatcaracacmattgggcatmtgtgcctttcctcaaaaaraacragagctctacaytgaagaatatgtagtgcacaasaagcattgtttgtagsmtgtgaaggaacataaactggcataatgtmacttattaattcaartctmgatgacctatgacctctctgtgmmkacaaaggggtccaatgtcttaggcacctgctcatgggactgkatgtttatttccagggtgcacagctccatacaragacactaaagatgggtttggaacatggcagcatttacatatwtgaaaaagttcargcacattyggatwcaaaagaaagggggggaaatgcaaatagaaatttctsttaagtctctsmmacacagtgcrraattgagacagccawaatcacwtagaacgtgagtctaacmsacgttacaaagagactacactttwatttaaatssatmagwkmygaatkctwgaaacggagcatactcacactaatgaaa

SEQ ID NO: 933 - DNA, 1000 bp, Rattus norvegicus
  misc_feature (980)..(980): n is a, c, g, or t
ccggaagtgtcaaagatggctgcyryrakggctttgactgtcctgcgaagtcggataacgcgatggccgcagtgggcctgcgcggggccggccccgttctgcgcggtcagaaggagcgtctttgggttttctgttcgctcagggatggtctgtaggccacacaggtgttgcagttctactgctgaaacagccgccgctaaagcagaggacgactcttttctccagtggttcctgcttttcatccctgctactgcttttggtctggggacttggcaggtccagcgccggaaatggaagctgaaactgattgcagaattagagtcgcgagtcatggctgagcccatscctctacctgcagacccaatgraactgaaaaatttggagtacagsccaktgaaggtcagggggcaytttgaccactccaaggagttgwmcataatgcctcggaccatggtggaccctgtccragaggcacgtgatgctggcagattatcctcaactraaagtggggcmyaygdkgtwactcctttccattgctctgacttggragtcmccatcctggtcaatagagggtttgttcccagbaakaaagtgaatccggakaccaggcagcaagkccaggtthtgggasaagtagacctagtaggcmtartgaggctgacagaaawcaggaasccstttgttcytgagaacamcccagagagragtctytggtattaccgggacytggacgmtatgscyargagaacaggaacggaccccatcttcattgatgcagacttcaatagcacaacacccggagggcccattggaggtcaaaccagagtaacccttcggaatkagcacatgcagtacatcattacctggtatggactttgtgcagytacatcatacttgtggttccgaaaatttgtgcgtcggacaccaggtgtgtgaaaataatgaacctgttcctaaccactataaaatattttgrtttntwaaaaaaaaaaaaaaaaaa

SEQ ID NO: 934 - DNA, 1075 bp, Rattus norvegicus
agagttccagagagctcagtctctactcagcactgaccgggaggcctccatcgacatcctccactccatcgtgaagcgtgacattcaagaaaatgatgaggaggcagtccaggtcaaagagcagagcatccttgaactggggtctctcctggcgaagactggacaagctgctgagcttggaggactcctgaagtatgtacgacctttcttgaattccatcagtaaagctaaagcagctcgtctggtccggtctcttcttgatctgtttctagatatggaagcagctacagggcagaagcattgaaatgtgtggctcaagctagcaagaacagatcactggcagattttgaaaaggccctgacagactacagggcggagctccgggacgacccaatcatcagcacacatttggccaagttgtacgataacttactggaacagaatctgatccgggtcattgaacctttctcccgagtacagatcgaacacatatctagcctcatcaaactctccaaggccgacgtggaaagaaaattatcacagatgattcttgacaagaagtttcatgggattttggaccagggggagggtgtcctgatcattttcgatgaacccccagtagataaaacttatgaagctgctctggaaacaattcagaacatgagtaaagtagtagactccctctacaacaaagccaagaagctgacataggtgagtgctggccccgggacacagggccgggcagcgctgtcttctgcctgtcgacactggacaccgtctggtcctcacggcttccccgattgacactgctctgtcttctcttgcagagttggatctgtagcggtcctttggagagtgtgtgtggcgggagagtgaacccttggggaaatgctaggagattcttttctttctgktctacttttcgctcggaaagtttttaaccctcattggtgcatctgtatccagcgataggcggccggttctcatgtaatcagcactggccaacatgggagtggggaaattgcttaaaaaaaaraaaaaraaaaaaaaagattctaaawaaaaaaaaaaaaaa

SEQ ID NO: 935 - DNA, 1050 bp, Rattus norvegicus
ctctgtacaacagttcatctgctttgatgaggtaagacagttccaataaaataattatcataggctagtagtcagtgaaatacatttcagcgaatgtttttacatcargtccaattaaaacagtataaatttgttattgcaatattcaactaaacctcattactgtgaagagtcaggtttccattatccacctgaagggygtaagaatcasaakgattccagtcaatcaccttggttgcaggagggagatgactcagagggaatgaaggggtgaggggcacacaatagcacagggataggacggttttatwwyywywkhyttwwkkktwhwywaaaaaaacttyctttaatcaaggcttgtaacatgraagagatttgtcagttaaaatggwragtttccmayacattgaracataaatccwcmagtcrtcataaatacaatacccmakagtaaaaaccacaatagcaaattcacmccatccctgtaatarccatgatstgatttcacatgcttctgacggatggcaaaatggcctgctggataccgagcacamtgrggctttgaggtcrcmctcatctgacagksstgyggcattggtggctcaactccagaagcaaagcargtwccagcacattyaaacagtgtatcctttacatatcaaagtgagaagtaagaaagcaacwcggtcmcgctatcaraaagatggtgggragtaaggmcagctgtgtwaagctcgaggcccaaagtcagttggttgctggcttcatttctttggcttcttgggcagtggccgccggaacarkaaratgtgaggttctggttcatggatcatataktgracccmycccygactctgctgaacamcgagatttytccaytcagattcagacatcaaatgggttttagggaccagcttggctatgtccttgggcaacatgacawgccggkactcgaattcctcgtcgtcgtatttgtccgaatagtagatttgtttgtgagacatgactsctctgcccgaaggcgctcwgccctgtgctgctggcctccag

SEQ ID NO: 936 - DNA, 573 bp, Rattus norvegicus
tttttttttttttkywtwawwcacrgaacaskwkkatttgccaacctytcttggcgggccactcaytccttgkgagcasgatyagaaatgyccatasgtgtactctggttggatgcascttgkgtccacavgtgggaatgctgaccagkgcagcwwwaarctcawcawcctgagcakmagtccagactcrsctccatttgatgttcttgtcmtcctsggkcatggstggwacatcartgacaaggcctgtgccaatggkcttgttgccatccctcaaagygaaacgyyggccwttctctaagatcatgggctgccgcaagattaggctaagcttcaagtcctctmsaggcatggcaagytccttmsswgragrcargryractyrwcwggmcaygkcmywggtmagggagaacatgacgggcatgaaatgagatacaaagggtttgtggcggmcaccctcctycttgctgaggatwtaaacctgsgcctccaccttytggtggggttggatggatcctggcttgaccatgaccaaaccacgcctcaaatcctytcgctttaagcctcggacca

SEQ ID NO: 937 - DNA, 2405 bp, Rattus norvegicus
atggatgatctatcaccagaagaaattcagcttcgggctcaccaagttactgatgagtctctggaaagcacaaggagaatcctgggtttagccattgagtctcaggatgcaggaatcaagactatcactatgctggatgagcaaggggaacaactaaatcgcatagaagaaggcatggaccaaataaataaagacatgagagaggcagagaagactttaacagaactcaacaagtgttgtggcctctgcgtctgcccttgtaataggaccaagaactttgagtctggaaagaactataaggcaacatggggtgatggtggagacagctcacctagcaatgtggtatctaagcaaccaagccggataacaaatggtcagcctcagcagactacaggagcggccagcggtggatacattaaacgcataactaatgatgccagagaagatgagatggaagagaacmygaskcaagtgggcagcatcctagggaacctaaagaacatggctctggatatgggcaatgaaattgatgctcaaaaccagcaaatacagaagatcacagaaaaggctgacaccarcamgaatcgcattgacattgccaatwcaagagcaaagaaactcattgacagctaaaaccctgctgtacttctttacctgttaactcagtctcgggctcctgctgagtcttttcttactcagtttgaaagactgtgcgagaagggcgggaggaggatccctcctccttccttcctttstgkstktkggggtaggttcttgctcaggcgttcttacagtgtttctcaggttactcttgtaggctgctttctgtacatgacggagtctctccatctcgtcatttagcttttgwgttcaagacttggaagcattgccaaagagccatgaagggaggcagctggataagtagcttttgccattattggttggttggcttggktttggtttggwtttggttttatggtaaagascaagaggaaggaagaagaaatgaagtgactcattaaagaawctacaggtcacaaaaaacchtcagtgcttggggtagragctttcacacgtgttttgwtctacactgwttttcagcttstgctccaaagagagtacagtgagttttccakaagtgagsttcactcctaaatcmttagtgwtttgggtataaasgtaggctcttgggtcccgtttcatattgcacatgcaggaacrctatataaasgagtgccttttattctcatacagtaagtcatagcatgrtcccattgcaggcctgttaacttcatggagttgtcagtagccttgaaaagatgtacatatatatgtgaaatcggagacttcctcactaaagcagggtgtatcatgtgaattcagatttacctcataagaattatgtttagatatgaaaaagwcttgttttgatctcaggtagaaaaatagattgctttgagttttgwatagttttagacatttaaaargttataatctgttaytaaaagtyrykwggaaaawwawrmhwwwrawtaattattgatgaccacactgccattctytmtgccttacacacagaatcaagtttgtgtagaccctgaagtgttatgaactggtatttgtcacctttgtttaaaaatcagcatgtacaattgctgattgtagatcgcaattagcgcaaagtagatcggtttgaccagtaaccattgcttgattcttacaattaaattttgtaattaatggtattgttcttcaaawrrrwrawrwwwmwatgacttattygtgggggcaatcattttaccagcttttgttaacattrgataaagcaaatgtccatacgtcatgcactccaatagaaagttgcattagctcttctctaattttcaccagaagtgtgtacaggacttchtacggtttgctttgagttcattctagacattacttgtcttagtcgtttgaacttaaatacactactgagtatttctgagtgagaattcaagtcatgtattgaagaagatgcatctagcatagcaacattcagagggtgaagaggacartgtgcaaaacaaagcagtgttccatgccagagtgaagagcttattgggtacagatacctaatgtatgaagtatggctgagtgtaaaacactggactgtgctgtgcccaaaagtgcttcccttagtcatttaaaaacaacatgctkatttgtccaaaggamcagtaccaaaaggtagtatccaaggtatatttggctagaatatgcactaaagcaaccctttgctcttgctggctggtgtgaatgcatgcttatttcttgccttaatttctatatctgtaaatgggaattaataaatcctgttttataamctaaaaaaaaaaaaaaawaaaaaaaaattggaggcggcc

SEQ ID NO: 938 - DNA, 367 bp, Rattus norvegicus
taaagggacctagcttgccgccgcgagattccttttttttttttttttttttttttttttaatgctttkatacagttttaagcaaaagtagatgagggkggatcaggttaagtaatatyggttaaaagaaagagaaaaaagacaccaaaagttatttccttcctaaggtctcagatagtttyttaagtcttttcttcagctccaaaggaaakttctcgtagcacttcttacagactggtttcatgtcaaactccacaaatttattcttgagtgttagtttggtattgcaagtggaacaggcaaagcagctcacacaccargccttgttgagggcagagacmamrtmaccttctatgaccctwrtgcc

SEQ ID NO: 939 - DNA, 619 bp, Rattus norvegicus
ttccggggggagtatggttgcaaagctgaaacttaaaggaattgacggaagggcaccacaaggagtggagcctgcggcttaatttgactcaacacaggaatattaatactgcttcagtacaatgtgtttatgacagcttttggaatgacctctttcmccmttgccatwttgatcactcaagtgstgggcwatgtccttgctgtggtcggratgtgtytytgcatcatggcttgtgaaccmgtgcacggcccccttttgatttcaggtttgggaatcatagctytagcagaattacttggamtagtttwtwtgaagtttgtcgcttccaaccmgcgrrstwtacaacctcctaggaaagctgtagaggaaccccttaacgaataactgaagggaagtgryggactgtaacttgaaagtcmgaagtggaagaattcmgttgtytgrgcmccatggccttcacaactcacrgstggaaggracacmcaacmgtgactgactttcatytytgaaaaaagtcattgaaccmtaaatgratwttmcmgttaagtttwtwttaaagcmgctgtaatttacgtaataaaaaatwtwtgrtgtgctgtgtaaaaaaaaaaaaaaaaaa

SEQ ID NO: 940 - DNA, 683 bp, Rattus norvegicus
ttttttttttttttttttkyyttttaaaacagcagctttaatgcccccctcccctcccatcagcaccatggtatcacagccttgggtcaaggggcaggttggacaccagtcacatccattcactgcccacaaccacccccaacagtgagtcatytgccaggaaagcggkcsccacaatggggatttgtccacaggggggaaggctagacccacaggaccaagtcactgaaatagkggacacgtgcacacgcccatgcgyacacacaactytagcaccaaatggaggatagcaggacccggctgaracctgccacctccagggattgctggscaccaagtgcawcatytgggcctmagccctaggcagcacctgtgttctgacggtggaccccttggggtgggcagcggcgctygcacgcctcacgggttccaaaacgattagcattccccttgcagccaccgtagacaaagggatgacacgctgtgccaccaggtacagctcgatggtaccagcgcagggtataggcagtacaggaaccctcatccagtggcakggagcagagatctgagcctctatggtcccakcccttartctcggcatcaccatcccatgaaacttcagggtcctggtagtcctccacagaatacacggagtactcagagaagtcgtcatcgtcctcgtg

SEQ ID NO: 941 - DNA, 566 bp, Rattus norvegicus
tttttttttttttttttwttkkytcytttaagtttttattatttaaatacaccatactagagcaaatgtctctgaaaatatcacaaataaaagattttttttwcttcattcagcaaattagaagtagggggggatttctacatagtagcggctgtgagcctcatttttttttcttyttttykttttttttaacctttgtcatgggcggarcaacatywkkwbwwkwwywytyasatgcatacatacattgkattttacagaratmcaataaragtgtctgygatagawctatcacaaaagccacstctyktkcctttwtaactcatgttcaggtttgattgaaacacatctcattacaacacttaaatatacaaagagcamacagaatgtagttaagagtaaaacagggctcacactccggccggtgccctgctaattgttaatgasggtakaaagcagattygtgatgcctcttmtaattagcytcrtymrtcattgccctyccccccaagcaccctymyymmymdmtktvaywkkgvtsrmwctyydkycsrtkcyctgctaat

SEQ ID NO: 942 - DNA, 552 bp, Rattus norvegicus
  misc_feature (525)..(525): n is a, c, g, or t
ttttttttttttttwyttykcaatttacgtgtgcctttayttctatttcttgaacgagacaccaagagcctggagaaacccaggccagacactgaccacagtaagttactgccacgtctccacaggcaagttgtccacctcgaagatctcctgcactggctggccagagtrgttgtaggtgaggcgaagctttagtcgcaaaggggccttgttaggattgaggattctgaaracctgggtgatgggaggaccaccctgagctggaattgtgttcccactgggggcctgtaactgcarctggaaactcttgggcacagccgcctggcraacgaagtgggtaacagcctcctctgargagttggtggtgrtggcakkgrctaarascarrgcasgggtkkcmragsgcckcatsragraaagatscagctgkrkgcsctkrsgctsrracrckcygmcactggggattggagctggggttggaggtscacagggaaggtcgaggagattaattaaggcttcccctgnggaagggtccagaggaggaaggcgctg

SEQ ID NO: 943 - DNA, 1063 bp, Rattus norvegicus
aataaaaagagwtkywkktttttytttttwwtcargcaagagcwcamctttattttcacctctaaragtammccacawttkwtwhywhhwwwkkwkwytgkgcagttcaactttktwttttaakaaaaccakaatatgcagagcacatgsggkgctagcatctaarctaatmcaataagcaagtactawagctacagtgactkragggtcawtctttacgttcagcaagtttaaacccattcttaactttgaaacatawctgaaaacattgcttgctgataagacttgctccaatgctatcgctgaatgyccaagtcwctgaatatgccawtmcamcraagataaccacatgtttgrggattgcaatgtgccakacattcactgaaaaaaartacawctaavcamarctcacacarcaracatctgagaatctggacactttgkatcartgtttttgaagtgtttcattaatatcttaagacaagtgtatcaaaaccttggcatgatttagtttmaagtcgccaattktgtttttachmwcrtcmraawsttatggctacaccgccaatgccgggtctgcttaatttgmcttaagagtttattatgrcttaacattamamgctcrcactaccccgaaatatataatttcacgcatwcggtgamattmaamattcaagtgccagtgyttytkkactgtctyttggtcaagtttctttaaactttyaaagaatcacttttaggcttacaaaaataaawatytgtcaaaatgttcaataaatmttrcmkaawwctwgcagcaaaaagtatctagaaatctgtcgtgtgcaaagttttcttcccaactatcattcccatggtcccaaataaattttagaatctagtcccatccctttcctagacaagctgcgttcaacaatctccaagagacaaaataagattggaagtttaaggacacgcacacaagacatatatataaaattctctgaatgtgcaataaaagaagtactttgtaaaaagttatgggcaaaatgtacaagggcctaaacctagactaattgaaatc

SEQ ID NO: 944 - DNA, 2736 bp, Rattus norvegicus
ccggcagaagggtggctactgcagctggtaccaaggatgggcccccccagacaagagcatcagcaatgccacagacccttgaacccagacctgtcccacttcacskmmkksmcakmcsghdgagygksycrsacastwwcycwkycctgtgattcttgggttgacccgctgtttcaggtcctggaacaagcatccaagagtagcagaactttytgagttggcaaagacttaaacatctgccsgagttcagcaggcaacctgcctgywygwrkaaaaaaactcagacgmagggctragacgaacgtctttcctctcckgcctcccatgaracagtctcctgggaatcctaggctggaagcttgcmaacatgtkagctgkagaarcacwcacctgacaccatccacagatatagtcaagtagatttgggtagagaatactatttccaawgtagtgtttagctyatctagggggatrtgtttatatatacatttgcatatacccmcaggggattwtgagctaatttttttwtaggacacmgaattctattcaatgctgttaaatatgcaaatagtttaatctcktktgttgttgtttgatgggaaattgtgacattccaagttgactttttwtttttatctgarkyamraddwraaacthtgaccacamwmarmammmwmwwrwmmmwawmactggggttgtttgacccttcatctcctttttccttctgctttgtgtttgkggtgcccttcacttagttgccttactagccggctgatggcaggtgagtgtgagtgttagggcaggggctgtctcatgaaagggacagttgcacatcatcctacatcagtggaakgactcctctcctggatctggggacagcatatacttcttccccagctcagtcatgggtgaacgtcacctcctgagatggtcacctcagagaaggaacacggttggttactgagggagccaggctctgccaacaaactgtaggccttttgttgtgtagtatttttgttttttaaataaaagtatagtataaatttwmmwawwaaawaarawwattttaagttttactgtcaaaattgcaatgcccattgtaggtaagggtgtactatacagatttggagatggtaaggtggtgacatttaacacaattacactktyttttttcaggttatgggtatatatcctctattagtatcatatctttttcattccactttaggaaacacagttaccagttataagtagagagagagagagagagaaagacaagttctagtctgcctctaccccacacataccacttctttgtccaggggtttgacagaatagcaggcccggaagacagttgaggagatgggtgtcaagtttcctctgggtagatttcattccccggcatccttcccctgtgctgacagggagcagaaggcgcaacgcttyccatggtgtggggcasaagkavccgaggtcagcaagccagtggttcttaagaggtaaacctytgacttactgttggaagttgtctctttcaacctcagagtctcctaatatggcgctcctgatctaccytgctcwatgctctcccgtatgtacaccccagcctctttcccaagaagtcthtggccattytcagtccctgtgtgatcagcctccctcctacccggacagacttgaggtgaggcctaagtatgaggcmcctgaagttaacctgaarataaaaccattggcagamccmcggccccaggtggytgttraggtcttggcraraagtcctgggcaaggaaggtctttcgtaaagtcacatcattgrarasccgtttttgcgctttcaataagcwawagctttgtttmtttctcctgttcmcttactgwataatttaaagtcatttatgtagstgagacmctttgttatttcaatcawatcgtgmaygwkdtattttgctaaatcatrtsccatgtgtaggctgtsgtgtghacmctgtgtytaavvrmadrmrarraraaaraaaraaaaaaaaccccacatgccatttttttttcctgattcaaattctacagtagaatggaaggcagaatactggggctcgagcactcagctggaataaagattcaaggaaatggaaagtactagaaacagactcctccagcctcctccccatgggatcctaagggtgggaaggagaaaaagaacaaaagtacactgatgtcctygkcmygwrkcaactatcchtgggkcayswgscrsscaskwkscaagacctttctcctactcaaccaggaagccgtggtttctgcaatccarggccatggcaactgtgactccaagctctctctgtctcatccagtcaamttttctgcctcctaaccaaggaattcctctacgcaggctcttgttgcccmksstagccctctttttcagccaggatgtggagctgaaggagaccctagtgtttactttctccagtcctagctctgccatataaacactgtttcawgctgtgcttcttaaatgataaaggacacagtgacttttggggatagatttgtctggragatgatgtragtccgggaggcattactcttccctgcctcacatcaaggtgccattcaggtatttggctcctagctacttaaagttaaaaataatcactctaatatttgwatcatagaaactcaaaaaaaaaaaaaraaaagtcacagaaacataatcaaatgggagaaggcaggaga

SEQ ID NO: 945 - DNA, 2230 bp, Rattus norvegicus
  misc_feature (1855)..(1855): n is a, c, g, or t
  misc_feature (1940)..(1940): n is a, c, g, or t
  misc_feature (2107)..(2107): n is a, c, g, or t
ggcgggcgggaaggcgcctcccgcrgycgctcsraackgcggacctgagagcttcccgcagagggccggcggtgggagcggagtgggtcgggcggggccgagccgggccgtgggccgtgtgggggccaggccgggccggcggacggcaggatgggctgcaccgtgagcgccgasgacaakgcggcagccgagcgctctaagatgatcgacaagaacctgcgggaggacsgcgagaaggcggcacgggaggtgaagttgcttctgttaggtgctggagaatcarggaagagcaccatcgtcaagcagatgaagatcatcyaygagraydgytactcagaggaggagtscsgrcagtaccrtgcrgttgtctacagcaacaccawccartctatcatggccatcgtcaarsccatgggcaacctgcagatcgactttgctgaccccsagcrtgyggatkaygccargcarctgttygcactgtcctgtgctgcygmrgagcaaggyatgcttcckgaagacctgwygggcrtcatccggaggctctgggctgaccatggtgtgcaarcctgctttrgccrckmrsvsgarkaycarctcaakractcrgccrcttactacctgaakgayctggagcrcatwgcacagagtgactatatccctayrcagcaggatgtgctgcggacccgtgtgaagaccacaggyatcgtygraacacacttyaccttcaaggacttacacttyaagatgtttgatgtgggtgsbymgygatctgagcrgaagaagtrgatycactgctttgagggtgtcacggscatcatcttctgtgtcgccttgagcgcgtacgacttggtgctggctgaggatgaggagatgaatcscatgcatgagagcatgaagctgtttgatagcatctgcaataataagtggttcacagacacctmcatcatcctcttyctyaacaagaaggacctgkttgragagaagatcacacagagccccctgaccatctgtttccctgagtacacaggggscaacaagtatgacgaggcagccagctacatccagagcaagtttgaggacctgaataaacgcaaagacaccaaggagatctacacgcacttcacatgcgccaccgacaccaagaacgtgcagtttgtgtttgatgccgtcactgacgtcatcatcaagaacaacctgaaggactgtggcctcttctgaggggcagtgggcctggcaggatgggccaccgctgactctgctccccactacctgtgaggaagatgggggcaagaagaccatgctccctgcctgttccccmagytgcttctcccctgtctmhkmwytcksywcksagctcccctgtcccctccctcggctctagacttgggggasggswygssacaggcctccctgtytaaaacccacctttgtytgaggtgccgggagtgsccatggtacctccttactgggcatccattcgggttttctaaccattgtcttgttytgggggtgarcggggagsgcatrcaragtttcmcaaggcctatgtytggaggagtaccaattcctccagcctaracccctggytttgwcmaacaccagccctgacccaagtccaaatgtttacagggagsywcswgsstwymccaytythtgmygsttggaggccscaaaggaaaaagcmcaaraagsgtgaragrcvcyvccmtycmtgkmkrcaaagsscmcvwgstcattytbgtagctttmaaamaaarrraaarrdaarrmraawaahaaarrdmmaybgcrrvdskarraaactttytrrrsaahcbtatttawaactgtcaggtcytgaccagcatbcstcscnccgccchcagcmcytttmcagtgahycmgtrmcttgagtgwgwytgcctgtttacamccatccctytttgggmrssmssmtgccntgccctccrhrgaattsgryhcsargggvtrwtscwvwcarctgccaatgtcastkakggycctgccctgaagccbtgggcccaggstccattaacctwaatgtagctcstyasmgbtaatvtaggaaccgmcgstgcctghtgagggtcakgcccctcamgccytnkccccargcccgggacctmcagcgttgaacacttccwygctkttttcacatgtywtatggaattgwtcacatgatttgaaataatwaaakgtrgaaaraaammrrraaaaaaaaaraaaaaaa

SEQ ID NO: 946 - DNA, 468 bp, Rattus norvegicus
yggcacraggcgtgcgctttgcgcctgattcagatcctygccatgtyttttcacargrctttcrgratcawcgattcytggcaaagaaacaaaagcaaaatcgtcctwttcctcaatggrttcggrtgaaaactggtwacaaaatcaggtacaactytaagrgaagacmctggrggrgaacgaagytgggtytwtaaggrgtcacactacggccagaytgrggrtttytaytgaatcmccgtcatcgatcagtccgrccagatggatttcaacatttttaacctagagatttacttgkgtytgaactaatttgtccmgtaataaaatttagamcctttcaaamwrawrwwmwrrwwtataaagtactgaatttcccctataagacctaataaggcttcttcggtgggtaaagtattgtttcctggcagctaaagattgctcaacaattaaaagtacttggtgttcttg

SEQ ID NO: 947 - DNA, 1047 bp, Rattus norvegicus
ttttttttwkttttwywtttwwdkdaacakggattatttttatwacatactttawaaaaacatccaaagcacaaacacacatgccccaccatcagrgagtgttaaraaccmtadattcyccttttctctcaagttatttakatcccagttacaaaaatggagctgtaaggatgtmtaaagacatcaggtcttctcgcttgttactgtacaagcatctgaagtgatcttgacaagagggcgcaaaatctacctaattaaagaacagagtgtytaccaccagcccacaaacagttcccatgtgttgtaattcgaacctgacatgtctgtakgggcacaggaaatattgagacagacaagggccaggctattgcttctcaatcccagaaggcacacatctytataccagttatcagtcattcctgacatctataggagaatcattagattctacctactctgargtattaaatgcawaagaaaaggattaattatgtccaagtaacatgcaatgaaaatatttttammccaacatggttaagtgttaasatttttaswmrtsaamatatttattcacatgaytttmamctagtcaaagctatttctttagcagtaatgatttaagtgcaagtgatgctggctttcacattggcgtcctccagagtaaagacaggtcagttgttcttgaataaatcaatgcagctctgcaacagggagacattgtttctggcatgctttatttccagttcagacatttcaattaggttctttcgaaatgctgccactctcttccgtttgaagtttatcagctcttcttttgcagattcagaaagctgttcaaacttctggcagcattcctgctgatgagtctctgccaacttgacatctttgctttttaaccgggccttgtccaaagctttgtttgaattctcatagtcaattagggcctttgtgcgtctgtataggagatcctttgcagcctctatgttgagcatgtagtatcggaggagctctgtcagttttaaatcttcctcgtgccgaattcttggc

SEQ ID NO: 948 - DNA, 1395 bp, Rattus norvegicus
tttttttttttttttttcgaattgtatagtttttatttttttgagrmckctgaragwwwwwkwyttywkwwktkwwyttttgaggggcacttttttattawaaatttaatakgcttgattaakgaaaaaattacaatgaagtaccgtgaaaatgtatgtcaatawaaaaatattascagcgtttccakggtttcaggcycttaamattttakkgacaccgacgcyctcccgccgycatcadaadaraamagcggytycacaggaraaccycggatgttcyccacaraaaaggcctmaaagatccccaagcccagtgtcccckcccawacttccggytaagccstgagttggmagcatccgagcccatcaagagccycackggctttaatgtckgcaacrarattcckgcttttcaggccactgggtgcracgggkagggamcctggagttggmcttgatatgtatgtagkgtttarttctacacccccactgctktatgtcakccgcgctggkkacagtkaaaggscactgaacaagctttccagtatctggtgtggcagcctcctggctgctgctggtgggtggctgagttctaasctcrcctggctgaagtaacsaggtccactgtcagggccggtgggaarggagacaascagtgggaaggtgtaacactggcgagttatcctctcgttctttggkactttccaarattctccgatcawawaagtatgagggaagcttagcattraaatyacagttgaaagtattyacagaagcaatcgtggtacattacmcagtaactcggactccgctcacswmswsactcttcagagaaagcacttgtgaaaacctgtcccagcactgggcaatcacacaaggsccggaactcacccgcccacccgcctgcccgggtttgtatgaagtatactgtatcccgctatatacagtgtatttaaaaaaggatttgatactctacgcttactgccactgaaatcattatgtacagytaacagaatattgcattctaggcaataccctccacgttcattctgagtttgtttgaaataaatgctacctgttctaggtacacaatatatatttcatataagtaaccgcaccacattgtgtcatcacgacatcagcttgatgtagactactatgtacagcaggtaggttaattctggmagatgaactgtggcctgggtaaccaggggtgatatgacaccatcaggaaggtgtgtggaacggggtgtgcaagtgtcagagaaagcaggggtgggaggtgtgaggaccatatccgtgtcagagcatccctgtggccatttaccgactggaagaaacataaccacatatatacatgaggagagccatgatagcagcactgaaaagtccggc

SEQ ID NO: 949 - DNA, 735 bp, Rattus norvegicus
tttttttttttttttttwywwwkkkwtwttttwtytagagaaaaacaywwkwyywkktttwkttywtwcaakgttattcacacgtttcattttctaatttatacatartatacaaagtgaagatgacatttsrtatgagccaayaakagscakgacttarasraactggtccaraaacaatctatatyaaaaagagacactcaaaagtawwkyytwwkywdwttckgcccartcagatgtctttattctgaaatgtccgatttttctaaagktccatgccaacatactaraaggtagaatcggggtgggcaccaaaatkggcaratcataaawtttctacacgaacaggkatttttcyagaatatgcctaaaawtatcaggaggactgggttgtcascactgggaggtatgaatcaggactgctmswvgwgsmktcagttccawataactttctytaggacktkscaccttctgagccgagtgasasctktcggswcrtccaaagggaaaggtgaggacacaccagaatgggctgcatttctgcaagaagagctgtaaccaatctctaasactgacagctttaacccgaaaccatgggctgatgaagggaagttaaattcarcccagggccaagacactctgmmgctggcaaaacaaagtaataaaaaggkgaaagagagtcattctacatgagagagaatactgctactgtgacagggacatgctgatgaacca

SEQ ID NO: 950 - DNA, 983 bp, Rattus norvegicus
taaaattaaaccctcactaaagggaataagcttgcggccgcaatkttttttttttttttttyykwttttaattacaaactttatttgtccatccagttcacagtttatgcgtggtacatcccaccacatyagccttcaagaagggctattcaggagatgggtatagctttctctgtaagagagccccacactctaaaattttggttagaatcttcataggtttataaaagtactctctgcaagcgaactggatatatttacatttacagcttaaattcaaatttcggaaaatatgaatcttttcgtgtttttaaacatcctgggtttacttcttaagactttcatctgaatgccacgtgctcacgtwagcccatccctcctcccccakaaggaaaagaaatcggttttkcgattgcaggtagaggactccttttccttctgggctttaaaaattacacagacagtgttcagcargtgtgagtacagacacggagggaatggtggtggkttactagatgcasgtactgatttttttttctgaatcttgaracatccaaaaagaattacaggatataaacttaaattataacgagttatcagccttctcttaaaaagtamctcrkggggtttarattgtgctactyarcgttttctctagtgttagagatgatgtaggccagcagcctgtatctttccgtgtgcaaaactcacagtgatcccaagtccagcctctgtgctcacacccagtcatgaccacagagggaccctgggccggctggggctgtgcccccttctgaagggcatcgcctcaccctccagtttggcaagaaccacttaggaaaagtgtgcaagcctgctatacctcstgkgctagtccaagccgacggtgagcagcgtgtgagtcaacgcacacacatgtggtctctgtgctttcttcccatcagaatgaatccataccgactgtctgaggtcaccttggaata

SEQ ID NO: 951 - DNA, 633 bp, Rattus norvegicus
cacttagaaatttttatttcaaaacaactatggaagtttgtctagatctccagctggtgacttattgcttgattttacttctaggccatcggtcaaagcgaactaaagctctttgcccaaactgagacagtcagacagggaaagctggagggagaagagacttcctaaacaacatcactatttccaggaaggctcttctgcattcccaaaacctgtactttgattcctaatatcaaagctggctttggttttttgttttgtttaaaatgacctttacactatagagaaacagtactgcaaattaaggattcttctcctggcaaaaatgtccggcaaagctttcccttaatcaagcaaacccactatgcctatctatgtcacatggtctgctatggcggaaagacgctggctcttctaggccttgtctcaggatccacacatcagacactcctctctgttctccaaagagcacaccactgtggtgaccccactgtataggccttggattactttcatggtgatctgagcaggatccacaaagtccatattgagtccataacagagtttctggattcgggatgtaattttgtcaaacataactcgctcttggcggccatctcgcttgatcacatg

SEQ ID NO: 952 - DNA, 897 bp, Rattus norvegicus
gcggmcgcacacctgrccaacgcrkctcagcggcagagaatgctgtcgccctgcttgttcacggmgccggccgggtcagtgttgagcgccgtaagcggggtcygctgcggsgcgacygggcaagcyccggccgartggarcggwggcgcrggcggtggcbgmtgtctcavcwgagcadggtgcgtctycarcgycagctgcargtccaggatgtaktcsatawcgtgctgcadgatctycactwtgctgactttcwtgytgggcsgkatggtgggcacgagcctccgcargcgagtgtagcartcgttcatatcgcrcygcmgscrcrgtgccggcwcstmrgsyrysgcctsskscgcmwkgcarcghgctgccgccscckhygccgmmgcggbtgccgagccacctargctatggycatgcyccgccaggcaacgtabcgccagctccccgccgscgcagccsgacggcgccttgcggccrgaggggcgcaccgggctcaccgscttcatcgcgcgcttyctgcgcccgaggacccgctgggggacaagcggtagagcgagctcccggtacccgcccgcgatacgctttgctcccctcgcctgcgcgcccggcgctcgcagcacccggcggttccaagctccagaaatcgaccggaggggctgctcggggtttgggcaaggggatctcagtttttagtgagcgacactcggcccgaagcaaaagacaagaaaaatgaaaagccgggtaagaaaaaaacaaagtagcccaccctggtccctgagccgttctctttcgagctccgactaaggtggatcgctgtccccgagctcccttagccggtgactgcccccccctcaaagtaacgacttccaactgtgcctcccagccctcgtg

SEQ ID NO: 953 - DNA, 617 bp, Rattus norvegicus
gttgacgakwtwtkwkytwtttywykartacacagcaaatactgtttattgcaggctctctccarctgactcatgtgaaaaaggcactatgaaaaattaatgaatctagataatctctctaaatggatttatgttaaaatatacaacattcttacataacatctcctttskatatgtgaaataacattatgtttaatgacaaaaacctgtgtttccaaaaataacatttgttgaaggttagcgatgtgctttctctccatgtagactcttccgtggggctagagtacacgtaaattaagtgtccctgatacacaggtaaaacacatacaatggcccaatatcctttgactacttatgtcaatatttataactggggccttcgctaagcgaaatactgtaataaacaccaaggtgggctactctgattgtgaatgcatatgccttactttgaacttgtgctttctggtgtttaattacagttgacgtaataagcagaaactacatcaaagcataatctatgcaggatttcgcaatcaacagagctgaggggaagaaagtttctcggggacagagtatagtgtcctactgtacagttcattcaaatgtgatcatttctt

SEQ ID NO: 954 - DNA, 778 bp, Rattus norvegicus
  misc_feature (19)..(19): n is a, c, g, or t
ttttttttttttttttttnttttykkyykyywttktttttywwwytadttaaataactttatttgattcatcctttggtagatgagaaaaatacattacaaaatamattatacagaggacagctcacagtacacgttactaaaaacacaatctacacaccagccctggytggtgttaagttcggaaggaasccttacaggctaggagatrsatttcagtctacggawtgasttwttccccttgtmkcctctgtgtctcacctcaccatgtattrgcacccctaatctggtgggtgtaggcagaattagagcagcatcaagtaggactggtgaactctccatccacctraagcagcaagacattcawatcsctagaagaaatggggagtgggagaagatggccaaactaaaatgcccatsttggragcattagraaacmtcswgscaaatgtcccagggttgggttttctaagctccrrgactttgkcagctgtcccttgscttyatcgkcacttcagtcttcctccagtmtgcwsgtrggtggtcccacaagctcaagcaggaagatgcaggctccatgtactgtgtgcagtctcacagcagcaggtccaacacgggtgggtctggctctgcagacttctccctgccgtgcaggtcctggggctaagccaaggacccactacacaatgcaaccacattgagctactgttcccagtagacccacaaattgggaatggctagagagaatccaaagttcaagtcttttcttagataatcta

SEQ ID NO: 955 - DNA, 624 bp, Rattus norvegicus
ttttttttttttttttttwwywwkwaayattycaaatagtttaattttaaaaatactctattcagkgctaaaataggtcttcacttgctgttacccatttccattttcttaaacttctctttttttcagacaaaaaataaaatcataaagtttaatyrrmcrygcagattttaaagaaaagggaacgttctaraaagtctgagctgaaagagtactgggggcaggtactgkggtcagaacctccaatcatggctggggttttctgtggcaggaggcagggatgctggaatgaaacaggtgaagacaggaagctgcgcgtgtgcktaktgagcgtgaggaarcggaaggttctggcaggcacakggctgggagcggctggggcatccaacagaggccggcctgcctcakggaaggatgcgatcccccgtgggtctcctgcccacagtggaagcccctccctcctgkaagagcctyttctcccgtgttctccgcttctctaccggtcagtccctcttcyarcagcagcctgcagggcctggccccgcggcacagtccatactctacagtctccattcarttcgagtaatctaggcactctctctakggtgccctccacacctttct

SEQ ID NO: 956 - DNA, 1493 bp, Rattus norvegicus
aggtccggggctccggtccgtgccggtgcaggcgccggcatgtggctgtgggaggaccagggcggcctcctgggccccttctctttcgtgctggtgctgctgctggtggtgacgcgcagccccttcaacgcctgtgtgctcactggcagcctctacctcctgctgcggttcttcagcttcgagccggtgccgtcccgccgggccctgcaggtgctcaagccccgtgaccgcgtgtccgccatcgcccatcgcggcggcagccacgacgcgcccgagaacacgctggcggccatccggcaggcagctaagaatggagcaacaggtgtggagctggacatcgagtttacttctgatggagttcctgtcttgatgcacgataacacagtagataggacaacagacgggtctggccgattatgtgatctgacatttgaacaagttaggaaacttaatcctgcagcaaatcacagactsrgaaatgagttccctgacgaaaggwtccccaccctgagggaagcagttacagagtgcctctgccataacctcaccatcttcttcgatgtcaaaggccatgcagatatggcttctgctgctctaaagaatatatacatggaatttccccagctgtacaacaacagtwtggtctgctcattcttgccggaagtcatctakaaaatgagacaaacwkatcagaaggtaatcacagccctgactcacaggccttggagcctgagccacactggagacgggaagcctcgctacagcgtcttttggaagcagwctgtgtttgtggtgttggacatcttgcttgactggagcatgcacaatgtcttgtggwmcctgtgtgggatttcagccttcctcatgcagaargattttgtctccccgkacwatttgaagaagtggtcagccaaaggaatccaggttgttagttggactgtcaatacctttgatgaaaaraattmctwcgagtcccaccttgggtccagctacatcactgwcagcatgctggaaractgkgcacctcacttvtmgactccccaggaggarrcacagrtgcaaaactgcctggaggccttttgcakggacmcsagaacmctctgttagcacaagccctgggaatcctkcggstsatactagcaatagccacagttttaccccaagcagaaaccaggcatggcgmccatgctccaaggaaggctccacacttgcccttaaaattctggatctgcgaaaaggcagggtggccctayccaaccccgctkagggtacagagccmcaaggatgagcagagtgggtcctgcaattagggcgcaggcaccaatgcatgggcttgcatgatcactccaagttgacattttaaatcttgccatacttcagtaattcacttatttccaatatttgtcgtcagctctgttaatggcgacatgtaggtgtcaaacttgtgmccatactaatamaatcattgaaaggtgaaaaaaaaaaaaaaaaaa

SEQ ID NO: 957 - DNA, 537 bp, Rattus norvegicus
aaacactccactgattattattgcatgaagggaggaagaagagacagcatttggtgcaaacactaagggtagatgtcaggggaggtaacagagggggactgagatcccagcaggtccttcttagagcagtcaacagtcggtggtgacggtggctgagagctcttgaatgcgccaggcactacaagccttgcacaagatatgcccatccagcgggtagcagccttgacactctccctcagaggacagcagcagcccacactcctcacacttgtagcagccaatgtggaaacttctatccagagcaacaattctcactgtctcctcctgacctggctctggcatgatggccccaccacacactgagcaccgtggggcaaatttcctgtggaaatcttcaatgcagtggatctggctggtggcatccactgtgaaagggatgccatcgaggccacggtggcacaccacacaggtgaagcaaccaggatggtaagccttccccatagcccttaggattcggtccaggatgggttcagagca

SEQ ID NO: 958 - DNA, 639 bp, Rattus norvegicus
  misc_feature (340)..(340): n is a, c, g, or t
  misc_feature (629)..(629): n is a, c, g, or t
ttttttttttttttttttcaacttttaaagttttttatttttttctttgttttttttttttttkktkgtkgttcttgttcaaatttcccttttacagtaaaactattgaggkgacggccacaccccgccacctcccccatggcaatatcaacttcctgttccctadaaggagctgggaactacagcgccadaaagatggcttgacctctggkggacaargcgaccattttggctggtgattgaggkgrscaacatggkgcccaagggcagcyttgatctaataaaactgagctgggaggatactgaagcagcascccaytgcgcactaaakggkgggaanaggtayaggcttgtcactatggaaacagcatccagtgcyaataactgtcatcagtccatggaccacctcttcactaacaagggcgctgggttgggtttgaagggaagaaggcatgaaccagacagctgcctggttacgggggmswacrtgysgattcttggggtagtcctsytsatcaacagagattatatcggggtacagtaaggggagaacaagacaaatcgggcctgccacaacaggtggcagtcatcttagctgtcctaaaaaccgcacagagcacaaggggagnggagtccttg

SEQ ID NO: 959 - DNA, 753 bp, Rattus norvegicus
tttttttttttttttttcatcatcacaacctaratttattacaactgacctgcaggcaaagggtaractattccataaacatgtggactccacggctatgttttaataaacatgtggactccacggctatgttttaaatagaggaaggactcaaacaagaatacaggataaaatattscaaagctscaagaagcagttatgttactgagctacattttttacagacaaatawkkywwtwtyyytkywydkcagctttttgataatttttatatackttcatatggkrcaagagaaaaataaccagagctcacaatgtrcagttcttacactattttcacagtttgtgaacactatacacccctttgttttaakaaagatacattgtaataaattccttgcccttaagtttatagtttataataatctatgattaatacactaaaattgcctttttatgtggtcacccacacagcaraaagtgagatagctcctggacagtcagaattgctttgattccatttgcataatggcggaktgaggccgtactgagacrgacaggaagctgacagcacagaacagatgcstcttgggtsctgggagcaacagaggacagtggcttggtgcagcttcaggaagacatcccataatgtccccttatggaatacagagaatctaagggttagggggscaagggtggaaaatggggaaatgakgcaagtggatgaagagataaatcatttttaaatcctcca

SEQ ID NO: 960 - DNA, 411 bp, Rattus norvegicus
  misc_feature (147)..(147): n is a, c, g, or t
gtgctgcaaggcgattaagttgggtaacgccagggttttcccagtcacgacgttgtaaaacgacggccagtgccaagctaaaattaaccctcactaaagggaataagcttgcggccgctcccaattttttttttttttttttttttnttaaataaaacaggaggatttgagctgtggctatgaggatgtttggaaatagggagcaggcggatcttgttgctggagcacaccttgcgtgcagggttggcagcgccaggccggccttctggcttcaccttgctgctgagctggggctctgtgccattcacacaaacagccttgggcaggctgtggctctgtccattctgacccacttcctcttccakgacctgtccaggcactgtgaagtcctgggtatagatcctcgtkccg

SEQ ID NO: 961 - DNA, 340 bp, Rattus norvegicus
tttttttttttttttttaaattatttctgctatccatcccagccgaagtcgcggccggtcatctggtaaaatttgcggttgaagggccggtaaaagtcacgcagctgccgcagcacctcgcgcgcgatggtggggtgcgcgcggcccttagtcttgcccaggcagtgcggcttgccgctgccctccgccttcttgaggcacgggaagcccttggtctggttgaagtagaagtgcttgtcggtgatgatgcgcttgaggcccaggaaatcctgcacgcggcgcagctccccggccgggtcgctgaccaggcgctccccgctcacgaagagccctcgtgccg

SEQ ID NO: 962 - DNA, 414 bp, Rattus norvegicus
ttttttttttttttytttcaatttttattgaacacaagtattctgacagaatgcaaagtcaaaattctcagttagtactcagtatttacagyagtgggaatggaaacaaaggtggtgttgatgtttcactcagtaaaaagttttataacawgagagaaggsccccgaagtacagaatgctgggtaagaatgttaatggaggtgagatcaccaccatccagacggacagctgagggtgagaccctgggatgtgggaggttccatakaawatgasaacatakaatcctgttggatacaccttggcccttcakrakatgggaaagasatttcccaskacakgctgyrgcctgggkagyctkcccacascacgaggacctggctcaggtgctagccaccgctccccctcgtgccgaat

SEQ ID NO: 963 - DNA, 500 bp, Rattus norvegicus
tttttttttttttttttcagtgagaagcaccaagtttaatattaaaatcttccccttaaaaaaaaaaagtacagataggaaaacttaacagcatacaaaatagcacttccggtgtctaaatgtgggttatcgagagtcctacaagtacttgtaaacctaggtgaatacatctttggtaccgttgtgagcagtattccccagcctctgctgctccaggcagggagctgtcaatttctgtgagggccttggtgtctgctttcttgctgccttggttgcctctctcagcccacaggagtctctgggttggctggggctgaagccaccaggagcgcakaagcaagcaggaatcccagggggaakgcaagcatcccccacagacccattcttggagaaagggatcagacactccaggaggcctgggaggctgtcgagaaccactcccaaccctcctgctccggtgagctggtcctggtactgtagacttcaatgctggcctcgtg

SEQ ID NO: 964 - DNA, 486 bp, Rattus norvegicus
tttttttttttttttttcagctgagaatgtgtttattgtattactttagtacagttggcctgcctcaccccagactggacagcctaatctgttcacagctttctcctcgatgcccaagaaagagaatgctttccccagggctgccacccaagacatctctctggttccgagcaaactggataacatcatctgggaagtccttggtggagctgaaggtgccaaagatcttgctggggcacatgccaggtcttgggtagggtacccgaccctggtaggacacccactgatgtgtaggcccctctttgtgagcaaaaggtcccaagaaggctcggcgcacgtcgttcatgctgtacacgcacacagcagagccctggaagatgccactggaggtggagaagacagcatagagaagaggtgtctggcggtctcgggaggacaaaaggaaaacatcctgaagttggtcaaagtgggtgtcaccccctcgta

SEQ ID NO: 965 - DNA, 473 bp, Rattus norvegicus
  misc_feature (378)..(378): n is a, c, g, or t
tttttttttttttwtttyaaggagaaagaccatttatttctccacccacagtgggactggtagattttttttcccccaaaggagcaattgctggcgtccctttaaagcttggctaacttccatcccaacagscaatcctcagargcggagctggtgagttgcctgrrcaacggacctctggttggcctgagatgatcagccacccaccgcttatttccaarcagggagaagttaacgctttgctgcwcgctcarctcaatgmgtgagcctgaacaaggcctccccatcgctcctgaagccagaagtgggtctcaaatgtccggagcgttttagttggggagaagccagtacagaggcaaggacgatgtctttgcctgngttgggatgttcagggccctggatgcccgtggggatgtcatacacaatgcggatagtctgggtgtctgcaaaaccaaggagcgagtgggggatga

SEQ ID NO: 966 - DNA, 290 bp, Rattus norvegicus
tttttttttttttttttgcccctacttatttttattatcccaaagcaagacaaaaagataagcaagtagcatgctcaaaggtgccacaagggtttcccgagatgtgccctgcaggccccaccacccacctcaggttggtaataactatctagattaccacatgcgaagaccatctgagcctcagcccacgtgcccgagtcctcagcagtcacccccttaatggtcaggctgacgtacttggactgctccaccttcaccgagaagtggtcgcttagctcaatgtccttgtc

SEQ ID NO: 967 - DNA, 354 bp, Rattus norvegicus
tgtaaaacgacggccagtgccaaggtaaaattaaccctcactaaagggaataagcttgcggccgmttccatttttttttagttatgcttctccaccaaaaactaaagaaaagtgaaaattaaggctggtaggcctgccaaccaggactccaggaccccagagacagacagtgagtgggcggaagacgccatggcagtgtatcaagatggccctgggtgagtcacaaatggaagcaaaagcccacgtggaaggactaagtgagagcctcctcactgataggcttcacctgttccttttcctgttgctatgacaatatgctgacaaaaagtatttgaagtgmtggccctcgtgccg

SEQ ID NO: 968 - DNA, 1088 bp, Rattus norvegicus
tttttttttttttttttycaagattaaatgtgtttatttttgtgtcagtgmatacaatggtatattagataccagcactcccagctacacacctatgcgtttgcctctaaaccttcacatactgtcaatccccattgctctaacrttccaccattgagccttctatgtctakcaaagtcagagttcaaatttagaaaraaaaaawgaaaggaataaaaggaaggacagttgagctccactttgtatcatcggggtccgcagaaggatccaagtgtctycaaggaatgtttcctgtcttcagcagagaggataaaataagaggaacactaktaatggcactaccaggaagaaagaacagaatgcagattaaagaaacatttgagacgggatgagttagtttctcctcagttaagaatccgywtkwtwkywtkkwtwtgtgacgttgaggttwaattgttcaatttgtgggccacacacttcagcgtattggctagtacatttttgcaccgaaacagaagcagtacaggttttatgctctaccataacacttccaggtttttcacttatgaatatacctgccaacctaatgattcttgcatgcattagagtttgcttttgtagagtttaagtttattttccccatccctcccactcccgtgaacatcacagtgtgaactctttgcccamctttaaagagaatgttgcaaaggacagctctgtgccacctcaggacagaaatcatcacctgtcccccttccttcccaggctactgatggagcagtagcattgatcycatctsatctaacatgcaaacagacactgttctcttaatttccccatgccagaggcatacaagtcagcaggtatgcttacaaaaatggaatcaaaatgaaaaagaaaggggacagagaggggggagggagggagaaagaaaaagctttcttgtttgaagcctattgtcctaaaaggaatccattgccttgaattcacttaaagcctgcacaggtgaaatgtgtttcttttgagacccccgtagaactcgtgtctggaattcttcaggcttctctctcttcacaaggggcttcttt

SEQ ID NO: 969 - DNA, 524 bp, Rattus norvegicus
tttttttttttttttttccacaaaaaacaagcagcttttattgcagtattacaaaacactttccattttggcaatattttacaacgcatttagctttaagggttgggaamgagamggtgggaaactaamagggaaaattttaatggacatttctaaaggaaaactgtccccagccctcccacccaartaaaaacccaaatgtcartttcactactcaagaggccatgaggaaagcagcaggmacactctgacamwtccccatggatcatgtcarasacaagggagtaytggaaacagtcatcagwamggtcggttgcgctgatcatttctgtmrycatttcttcctcccattttgcctccatagccacctcggtctcctccatagccacctctgtcgcctccataacccccacctcsgtctcctccgtagccaccacttcggtctccaccatagcctccactgccaccaccacggtctcctccataggccccccggctgcggtctcctccgtatcctcctcgtg

SEQ ID NO: 970 - DNA, 541 bp, Rattus norvegicus
sggscgcgcwcacgcccttcaccgtgacccggcgcaktggscacccctaccakaaccggacgccgcccaagcgtaaraarccgcgcacatccttttcccgggtgcagatctgtgagctggaaaagcgcttccatcgccaaaaktrcctggcctcggscgagakggcggcgctcgcaaagtchctcarvatgackgacgcgcaggtcaagacctggytccamratcggaggaccaartgrcggcggcagacrgcggaggagcgggaggcggrgcrgsagcargcgagccggctcatgctgcagctgcaasacgasgccttccagaagagcctcaacgactccatccagcccgaccckstctgtcygcacaactcgtcgctcyttgsyctgcaraatctgcarccctgggargaggacagttccaaggtccccgctgtcacctctctggtgtgarscaccggcgtgcactgtwgctacggatcgccgcccccaccavgcggggcacccgggtcccccagccgggctggggagggaagctgggc

SEQ ID NO: 971 - DNA, 807 bp, Rattus norvegicus
tttttttttttttttttkwykgcactcatcttttttattgctcttacacaatgagccaccatgagggcctctccccagtcaccatttctgaggcacgcacactttatgctcccaatgttaacascactccttgggagctgtgacatcagtttctgcagaatccaccaracctgccccgtaaaactgctgaccartccttccawgmtgcrsarttgcacacacatacacatgcagcagcakraagatgtgctcctccaactccctcctgggcttctggtacactggstggcatccatttacctaaccatctctggggagccatcctggtcactgaggaactcscacctccaggcggmacwcasactgtgcctcaycctgcamgttggtggctctgcasacatagacacccccatcatagggacagggcttcctgatctccagggtcaatactccctgcttgcagaacatgcgaaaacgagcmtcktstccsarktcyaagccattcttgaaccaggaaatcttgggcttaggactaccccggacagcacagcagaggatggcattgtagcctgcaatgatggagcggtttgtcaagggctgggtgaagcttggggcttcagagaagtccagggccttgtatttgggtggctcatatgtgatgcctggtctcggaataaagatgggctccttggtggcagcagctctgtcactggagcccaccatgttatggctgaagacccggaagtagtagccattgccaatgataagctctgataccacacagtgagtctgacggtaatcctcgtg

SEQ ID NO: 972 - DNA, 391 bp, Rattus norvegicus
tttttttttttttttttcccctcagtattagtctattatagttctctacctatgagtcgcaattcctttgggggtgtccaacwkywttttywywkkkkttgcccaagatcatcagatatttatattgtaaatcataacagtggaaaatttgcaattatgaagtcacaatgaaaataattttataattggggtcatcacaaatgaagaactgtgttaaagagtcgaagcattaggaaggttgagaagcactggtctctaaggagactagaaggtcagtgttaggtgtcttcttcagtagctctccacagtcatttttttgaacagggtctctcattggacgtggagctcgttgattgggtggtcggcctgttttgacttccccatcttgaat

SEQ ID NO: 973 - DNA, 546 bp, Rattus norvegicus
cggmmgcrwtgctggtgctgctgtgtgctgggtgcgtgctgtcmsccgggcgcgcgcagtatgagcgcwacagcttccgcagcttcvcccgggacgagctgatgccgctcgagtcggmctaycgccacgcgctcgaccastacagcggygakcactgggccgagagcgtgggctacctakaggtgagcctgcggctgcaccgtctgctgcgcgacagcgaggccttctgccaccgcaactgcagcgcggmcacgcctgcgcccgcgcccgctggtcccgccagccccgccagccacagggagcygcgcstctttggcggcgtgctgcgccgcgcgcagtgcctcaagcgctgsaagcagggcctgcccgccttccgccagtcgcagcccagccgcgcggtgctggctgactttcagcagcgcgagccctacaaattcctgcagttcgcctacttcaaggccaatgacctcccgaaggccatcgctgccgctcacacctaccttctgaaacatcctgaggacgagatgatgaagagaaacatggggt

SEQ ID NO: 974 - DNA, 714 bp, Rattus norvegicus
aacaacttaaataatttttattacaaaagaaagaccaaaacattcccaaaattctcccatgggttcccccctccatgcaaataaataaggtgaaggaaacagactggaggagggggtggaagtgtggatcaccaaaaaaaggagcttaccctgggcaggggtggcaaggacatccaggctccttccccagtcccaggtggtagggtcacatttcctggatcaaagaatctgcccattgaccgcaaagactcaggagtctggaggagtgtggcctgcagggaaggtcatgtttcaggatgtccaggctgacggtctttcagttctgggaggcaatgaatccagccagctccctgctggctcctagggaatctagcagcatcaactgaggtgtgagcccacctgcgggcagcctctcttcatactgtggtcagttgccaacagtaaagtcacaaacccaggtcccgagaaacactagagtaagcagtccgaaggcagacggaatgggtccttcctgtgcaggtaggtggggtgtgtgaatcgcagtcagagctagctgggtcttaaggtctctagggaaagagagcctaccacacccttgtcagctcagttcatagctctacctctacaccaagacgagggggcggggtccagcactacctggtcaagtctcaaagatgtctccactctggagcagaggacggaggcatcctcggg

SEQ ID NO: 975 - DNA, 1549 bp, Rattus norvegicus
acacaagywwkkkwywytttytttaataaagttgggatttaaaagtcacttagtaaaatgtttaaagagtattatttttatcacatcaaaaagtttgacacatggtaggttctgttttccccatagaaagtaaaaggccatgcgataaaccccagacttggtacgctctggcccgttctgtttccgtaaagaggttgtggcatgagaacgagtttaaattaatcaaaagcaaaatacgttatgtatcaaagkwwktktywwwwtwktytywwwywhkwrraatataatatakatttataattccaggccctcaaaagcaatcatggtagttaagaacagagttttgagtcattatggtaagaggccaatttgrgaaacatctctagtgagatgagattcagacactgsmatgagaaccccacagagctctgtgaaatcaccctcaaagcggcacattccttctcacagcaggaagcaggctggcgtgtccctctggcacwgasgagwkgcctcagcggggtcaggaaggcarctctgcagggccrcactcccatcctcccttcygctcttgggctsccacccacytkgcctcccaagyccatggctcactaccatcawccatkccaaacactgaacaagcccatggctcactaccatctgcccattccaaacactgagcatcactgaakwakwwktywwtkywwtgtggtttaaaygccartttcttcaagmacctgatatttcagatacaaatcattgaggctcctcttaaawwdwwwwttydwywkbytcawaatcaackactttatgtgaagaaaaaggcattgttacaatggctcaaaaccgttcttgagtccgtgtgacagtcagtccagcttctaactagcaaatgtcttgmccacgtcctccttccctttgtatctcctcttcccgtgtgtgaatggtatgtaccggtatttaatcatgtgctttatttscctcttcattgtgatacagaaaagcatgatgaagtacatcmcmrgratcggcmmgarcacggggacgttgaaagcctcaaagaaggtacagatcatagccacaagaatgccttttgtasccgcatsccaaaatttgaattctggaagccttcgaatgaaggggcgaaactcctcattttgtttggttggtaatgaargsccatcatctgagtcttcmatcarggaagggtccactttgggagaaaggmacgctatgaaaaggtttaggtggtaaattcccaaggcgtaggtcacmmtgtrccmacsytgtmacaggtaaactctaatcatgtagacaaaactcaggcccagtgtcacgacccaccggacagytgtgtrgggggtagayytstccagccaggactgataaatctgyccaagccgtgagaaaaatctgtacaccactgagggcttcccatggacagagtctccaacactgtcccyttcagacattctgtaactcgcagctccggtgcagccgagccgcggtctccctcacggctgcggaaggaggatggygggcagggcgrccg

SEQ ID NO: 976 - DNA, 740 bp, Rattus norvegicus
cggmcgcgcgtgcccggtgaaccggtgcgccggttgggggcgcaraagtcgggtgaatcggctgcgtagaggagatcggctcggccgggaggcttgagggtgcggaccgcargcaacagagctttgccgtcgttggtgcccatgacgcgtgaggcgccgtggaagcgctccagcagccgtgcgcccacctcgcggaacggtggcagcttctgccagcaggtgcgcagagcacaggaacccgaaagcccatggcacttacactcggtgcgcgtgtggctccgcaccgccagtctgcctgcctcgwtgttatscwsktgcmccaaagcacggatatctccacgtccccgcttgtgctgtgcatccataaagagtcttgacttctcatscccaaagtcgacatcatctccgcagcctccccactcccaggctgcgctggcatctggagagccagttggtcccggaggtccaggagtgcccagaaggccggagggcytaggcggtgcgcgcccgcggggtgcctgacaaccacactgtaggagctctcccatggaacaggcstgagtgaccgcgtgactggcacccgcagcggtaattgcaaacacaaaagctgtctctcgaatgtcctgctgcaggacgcgcccaaaggccttgctgtgactggagcagttccagcgtcggaaacggaactggaactgacattctcgaacccccagtcttgcgccccggcacgaggcctcgtg

SEQ ID NO: 977 - DNA, 823 bp, Rattus norvegicus
ttttttttttttttttttggkgktttaagtttttatttgcttataaaaaaagaataaaaacgagtcttcaaaaaacatatctgcatttacaaagcaatccctgtagtcaaggagaggcaagccctgaaacacacttctggacaaatgatttgtcaaaaaatgggtctcttctgcattgaaattggtaggaagtcattattttatacgaatcaaaactgccggaaaacagattctatagtttkttttttaattgccaaatctagaaaggctacactctagctcttattccgaatacccgtgaaaccagttactgagtawtctatgaattggaaagatcgggttagacacgaaggaggtagtttcctcagtgacggtgttacttaatwmccagaaagctcgtagccacgggtatggggtcagtggcataaacagggagtctctgaattcactcttctgttgtttgggcccccaattctctctgatataaccacacttctctcacttatcttacaacttgaaatgatgtaacagagaagctccagggttcagtgtatccttctttggaaggagaccaaattatctggtgtgcggtcaaaacagtgtcacagaaaaaggtggtttaaaaacacaatttcttgaaacagtaatattgacttagccacagaggaaatagaccccataacatcagccctgcctccctctgcaaagtagagtacaaaccacgtgacaacatttgctaggtgaagctccagaagagggcttgcccttgctcttccaatgtctcctgaggtcatcagatgcctgcgctccacagatccaaggc

SEQ ID NO: 978 - DNA, 565 bp, Rattus norvegicus
cggccgccattgtttttttttgttttgttttttctttttttggtttcttyrykwkgsywrtycwttttttttttttttttttttttttkgaaagatggcgccttcgagcctggaagtccgatgttttaatgtatttatttatttatttatttggttaccttcctgttccaagcttccactgactgttgtccccccccccagggttttattatcatgttctgtctttttttttctcttccctcctcctgacttggggacctttttggggagggctgcaaggcttgcttggggtgttggggctccggtgggacagctgctatagctmccttctgtggggasmcmsttrcckacttgckgrasygrststargyyctscwgastgtgtacctaagacagaaaggcagttccggtgtggkgtgccttccggatyctctctggggttgtgctttgagcagcgtgtagcccgcyggtttttctctgagagatactgtacaggggaataaaagagatcttatttttttttttatacttggcattttttgaataaaaaaaccttttgtcyytc

SEQ ID NO: 979 - DNA, 663 bp, Rattus norvegicus
tttttttttttttttttywytttttawtgtaggtctttatttaaaatgtaaacttttaggaagaggggaagttcacaattttttcacagttggtggctcagccattcatctcagcacttagaggcagtcaggtctccatgaatccaaagccagcytggtctacatagccagttctagaccagccaatgttacatggtgagaccctgtctcaaaaaaaagaatgaaaaatctgaatgggcccaactatttgattggcagtgatcccatgcaaggccacaggataggtcacaacctgcttgggtacatctgtgtcagtaatcctacttwgctaragcagsactsgwgmmgggtctcagtgmaaamaagkttsctyccaggaagarwtaawtaagggggcaggcaggctttatgagagacatttctatgtwccacccaggacacccagcatgggaacagctttmtmgatrcctgagagaaagtgctggaaaaacatttccactgaccacctagcctgctctactggtcagatcacccaagggccagatgggttctcttgtccttcyctyrwgctgtgagtcacttcgagcctcacaagccagtggccaatagcagccagcaagcarygcaamtgccrgtsrrgacamcttatcggtcgaggtccag

SEQ ID NO: 980 - DNA, 702 bp, Rattus norvegicus
ttttttttttttttttttkytwwwwwwttayctgtaggrgtkgtyckgctttattacagstctgcmgatgaaggwtgcttaaagmcatctaatgaatgcagawwytkwwktywtwyycttctccaagctctkwktwwktkkwwyywkttaccaaacagctgcttttattccagcatctacaggctgtgagaggacgagcwktwwytkywkwykywgtactacacaccctttatttaatcacagtggtaatggyacagtttattcttcagattctccaggcttayggatgtcatcaatcttcadaatcatcctaaccatctgtgtggyawkagagatctgctgctttttaccaatcaaggtttctatgacatgctgatactgcatatcattamtgcccttgtgcagacagtcaatccccagggcarggttagactccttcacttgtctarckcggacttcartcatggtctggatggsattcatgccactgtttkstkraaggsccatgrkgatracctccarggcgkctgckaaagctctcrtgscgtactgttccagagtgrggyacttgtctgcctcttggctgactgccagggcgcaggatatttcagctgcccctcctccatacacaacacggttatcacggatgaggttccggatgacacacagggcatcatggagmsatcgtkttgccctcgtgcc

SEQ ID NO: 981 - DNA, 763 bp, Rattus norvegicus
cggccgcaggctttccgcggactcccgtggacgacgcggggctagagtatcacaggatgactggcctcgggactgggtggccctggaagcctgcggctcygcctgcagtgcgccgatcccgcctcccagccttaccccgtccccagaacgcggatcccctcaagtttcctggggtcttccagtccaccaagaggtccccttaaactcgggtggaaggaatcagaactaggcaacttcgtggaaggaaggaagtgacacgaacgagtctggaaggccccggacttttaaggccaagctaaacgttatgcccacttgtcttccccatagagtatgaacagcaatggcaagaggrtttaggatscccggattagatatgccgtgcyttttcctggaaaatagggcagctccaagaggacagastggattttgagaatccctaaactgaaaccaaaaactgtgggcaaattgggtgtaaaatgtttcttatgtatggttttccagaaggagcctctgctatctactccccaaaagtagctggcaaatatttattgagcacctactatgtgccargtgttgtgtagatgatgaaagctaaccagtggccagtccagctgatgactccttgccctctctccgccttccccacaaggaaactggtacaggaatgaagccctgctctctagtcacggttatgtctgagaaccccgaacttatgaataataaagctatttcgaagtgctactttaaaaaaaaaaaaaaaaaa

SEQ ID NO: 982 - DNA, 727 bp, Rattus norvegicus
agcctatgacagactgcagcagaacactcttgacttgtgtggggaggttttgtaggaacagggaccataactcagtctgaacgatgccctggttttgatagggatggtaactcatggttgaagctggctttggaggtgccatctaatgtcttgcatcattcatggagcccatgaccttcttggtcatcccttatgaatttttacctaacttttatccctggaaaagggcttgaaactgctttagtgagtggggaakccgagtgkcaggkggaatcctaaggggccttgttccaggagctgccactgccagcctgactaggagagggagcmtgcyggsrcsmkbcaygcccytgctgggttgggcctcatagagcgggtgctckgatgtggacagaaccctgtgatctyccaatggggcaccaagcaggaccccacagcctgctgtactgctagtcccamtagtcaccacggtggcctgagctctcacctggtcctgagtcccmtcatstggactcctcctcgkcttcyttskggcccttcctttatcccacatatgcaatgacttctcacttktgtagtctaatctttgtattacacacggaatatcgctgcatatatggacagacttggaggacaggtcctgtgtgtcctttcctcgtcgtaacaggtcttactcacaaataaaagtctttaagcmrwwwmwwwrwmwaaaaaaaaaaaaaaaaaa

SEQ ID NO: 983 - DNA, 481 bp, Rattus norvegicus
aaaggttaaataataggaactgtgtacgatgcattaggatattgaagaaaattagcattctgaattaattatttggaatatamggmmgmaaaggtkacttttgaaaatggggcgaaagaawwtwcaaattacacgcataatggatgagaggaaccgacaggtgacttttacaaagcgaaagttcggattgatgaagaaagcctatgaactcagtgtgctctgtgactgtgagatagcactcatcatcttcaacagctctaacaagttgtttcagtacgccagcactgacatggacaaagtccttctcaagtacaccgagtacaacgagcctcatgaaagcaggacgaactcggatattgtggaggctctgaacaagaaggaacacagaggctgcgacagcccagaccctgatacttcatatgtgctaactccacatacagaakaraaaaaaaaaaaaaaaacctttgcggccctcgtgccg

SEQ ID NO: 984 - DNA, 520 bp, Rattus norvegicus
cggccgccgccgcctccgctttacccgccaccagcgctgcagctgccgccgccgccgccgctggttctctatcacggagcccatttctgggcagtgcccggccccgcmtgcgcttcagcccctaccagatcccggtcaccatcccacctagcactagcctccttaccactgggctggcggyggagagctccaagggtggaaatagccgtgagcccagtccactgcmtgagctggctctccgaaaagtggggggcccatcccgcggggscctatckcccagcggctcagccaaagaggcggccagtgaactgcagagcatccagagactggtgagtggwctakagagccagcgagccctctcycccggycgggagtctcccaagygagggaccgcttggmtgctgcgctgccacacgagcctgtcsgkctgkgcystctgcctcggctgtttgggacgtgtacagcacagaatgggtatttatttaaatwaagaagcrmargcwrraaaaaaaaaaaaaaa

SEQ ID NO: 985 - DNA, 365 bp, Rattus norvegicus
ttcaaggatcataatgtattgagttgagaattcacaaaaaggtaacatcatacaatcagccatttcttgggctgagtaawwwtkwttktywyyywytgkgcgtcacaaaaaattcttttaatgaataaataatttgatgaaatcaaaaatatttacaatataaacaaatggaaaagctttggatctgtgactgaccaggttacatttcggatggaggcctccccagcttttctcttagaacccatataaatccgctagaaacaacaactcatacaatgtgtctctgttcawtacatctttatctgttagtctttgaaagctatataatcttatattatgcaacatgttaaatacaaatattaaca

SEQ ID NO: 986 - DNA, 488 bp, Rattus norvegicus
ttttttttttttttttyyccttttcagtatttttakkgkkggacaagcatttacaacgttccattcatagacctaaaaacakaaaaatagaccttctttcagcttakaaragaaatatataagaacttttgacakaracmcatcatgaccgtwtwtmcaagagacaakggbmmcctytywaagcaccaractttccaggatccccccascccccatggacatgttgcagggrgaccagaaaacgtgactatcgacgcctctgcctsggtttcccatccggacgcagtcasaatcgaccccgagatgatatgaacagkgcagkggtmcaaagggcatagaaaccactckaaagcttcttaagaaaaccagaagatatagcaaaaacttcaatagartaaaactttcaaaagatcaagctcaaagccctgkgaacccggaggggggaggggtagaggtcgggagagcaggagaagcaagccgaggagggg

SEQ ID NO: 987 - DNA, 1475 bp, Rattus norvegicus
acaattctttgacatgatgaagttgtttgaagttgggggatcacctagtaatactcgctacctcttcctgggtgactatgtggacagaggctatttcagtatagagtgtgtgctgtatctgtggagcttaaagattaaccatcctaaaacattgtttctgcttcgagggaatcatgaatgcaggcatcttacagagtacttcaccttcaaacaagaatgtcggatcaagtattcagagctggtgtacgaagcgtgcatgcacactttcgactgtcttcctcttgctgccctcttaaaccagcagtttctctgtgtacacggaggaatgtctcctgrmaykacttgtttagacgacattaggaaattagataggtttgctgaacctcctgcatttgggccagtgtgcgatctgctttggtctgatcccttagaggattatggtagtgagaagaccctggagcactacacccacaacactgtccgaggctgctcctacttcttcagttaccctgcagtttgtgaatttttacagmacrakrgtttattatcaataatcagagcccatgaagcccaggatgctgggtaccgaatgtacaggaagaaccaagcaactggctttccatcactcattacaattttctctgcccccaattacctagatgtctataacaataaagstgmagymywgaaatmtgarwrmamtgtyatgaacatcaggcagttcaactgttctccacacccttactggctcccaaacttcatggatgttttcacatggtctttgccttttgttggagaaaaagtcacagagatgttggtcaatattctcaacatatgctcggatgaagaaatgtccttagtcgaagaggaaggagccacttcagttcgaaaagaagtcatcaggaataaaatccgagccattgggaaaatggcacgggtctttacagttcttcgggaagagagtgagaatgtgctgattctcaagggcctcactcccacaggcacactcccactcggggtcctctctggaggaaagcagayttgagactgccaaactacaagcagcagaggagcgggaagccatcagaggttttacaattgcacacaggatccgaagttttgaagaagcccgaggtctagaccgaattaatgagagaatgccaccccgaaaagaggcttcttatcaccatgatgcaggaaagacacacccacacccgtcaaaaaggagcgaccwtggaaagaaagccctgtaatgactcagggccctgtgcagctgggacccaaccccatgaacaaatcatatttatttatactggaatttaaacaggaacaactcaaacaamwwaaamwmrrarrwgcatttgtaattcagtcgcatttattctgtaagaaagttgaccattttataaawwmwwmwaawwwatatatatacatatatacatatatacatatatacawaaaaaaaaaaaaaaaaa

SEQ ID NO: 988 - DNA, 535 bp, Rattus norvegicus
tttttttttttcggaacttttttttykkywykwkkgagatttaagaatctttaataacgtacgaaaggttaccaaacagttctggaaactaaagtgtacatacgagttttttttttyyagccataaatattgaatagctgtaacatggataaaccagaccctttacatgckgrtaaatatggaarctaggaattatatacattgtgtggttgtatwttttgccaaaagcaatggacagctatagtttatatctttttaatatcactttacataaacaaatggaacagtttgacacgtagatccaggckcgtactatacgaattcttgacaggacatgaaacaacatttcactgcactaaagtactcagactttgggacgaaatgtttgcactttatacaaaaaaaaarmamawtaatatcaataatattctgttaggtcgacgtggagactgtaatcgtacaaagtagttcamattttggkacacatttactagaacattctcgccattcagtacaaacagttggctttcgggcg

SEQ ID NO: 989 - DNA, 452 bp, Rattus norvegicus
tttttttttttttttttyttttgkatttaattctaataaatgtcacagccgaagagttccaggcgaagtgcaatactttggttccacgttttaggaatgattcggataaatctggaaataataggtgggttgaaaaagttcttcatatgccctttggtattgctattcccttcaaaaatcttgtccaccatggaggatttctgccggtagggtttccaggagacaccctggtcactgwacaggatgctgtagctcttcacatacatctcagaggacagagacttgcaaccctgagttacgatggccgttaccttcttgattttgagcagatcaatttgtaaccactgcttgttgttgtttgccttggcttgccaggcattcactcggccctgggcattcaggcgggcaagggaaggctcccagtagcttccccaccatgactttttaaatga

SEQ ID NO: 990 - DNA, 525 bp, Rattus norvegicus
cacgaggaagaaacagacagcccgggaaatgaaaaagaagattcttgctgaaaggcgcaaacctctgaacattgaccatcttagtgatgataagctgagggacaaggccaaggaactctgggataccttgtaccaactggagactgacaaatttgagtttggggagaagctgaaacgtcagaaatacgatatyaysacystcmggagccrsaktgvmsawgcysrsaagywcagcawgaagsccggtgccacasccaagggcaaagtcggcgggcgytggaagtaaacgasccaagaggtgccytgcagcagagaccatcaaccytgactcttgccagggtcccttattccagctytgtattctccaaccctcatgcccaggcacttttgggaactcagggcccaccctgytgcaatgtcctcgccctytggggtytagaaataaagttwtcagactcccmwmwaaaaaaaaaaaaaaaaaaaaaacttgcggccgcaagcttattccctttagtgagggttaat

SEQ ID NO: 991 - DNA, 481 bp, Rattus norvegicus
tttttttttttttttttywkttkaaagctgctaactgaagagtttattggcttgtttaaaaaaaaaaataggcgtgtctgttgttcttgatacaaaagtcaacactattttccataaataaatacgaagttctcggaagtatgaaatgtaaactgttgtcctttgccccgtacacatttttgagaaatcactcaaaacacacatggrgagggaccttctggagtcacstggagcattcagatttcagcagagtggctattctgccaccgagacactatcatttacagagtacttcttctagaaccctacctagttcaaatccgaggacctaccgtaaaaaggaacaccacctaatgcaggtccaggagccagagacatgcaaagaccgggtcacggtcacagacaggatgcaaacaaagaaaaaagctcggcctgcacgtctccttagcaaaccaagttattatctagacaaccaacctat

SEQ ID NO: 992 - DNA, 323 bp, Rattus norvegicus
tttttttttttttttttggcagtaaccccctcacaaagaaagggcagtcatttaattttgagcagttacaaggttgagcctcgctttacatccactacgggatttaacagtgtcggtgtgacatctattaagggatagtagcctgcaaatgagaagcttagatcaagcctggacctacttgatgtctccccattcaaggcttgtgtaagattcagagctgttaattgggaggtccccagccctccttaaagaaaaaaaaaaaaagtacttcttcactgaacaggaactagaagacgcagggtaatcatgacactcccaaatcc

SEQ ID NO: 993 - DNA, 2597 bp, Rattus norvegicus
cattctccaaagaagcagaaaaatggctatgagaagaaaagggttccagaagcaaccccactccttgatgccagttcactggagtatctgtttgcgcagggacagtatgatttgatcaaatgcctggctcccattcgggaccccaagacagagcaagatggacatgatattgagaatgagtgcctgggcatggctgtcctggccatctcacactatgccatgatgaagaagatgcagttgccagagcttcccaaagacatcagctacaagcgatatattccagaaacattgaataaatccatcagacagaggaatcttcttaccaggatgcgaataaataatgttttcaaggatttcttgaaggaatttaacaacaagaccatctgtgacagcagtgtgtctacacacgacctgaaggtgaagtacctggctaccttggaaaccttaaccaagcattatggagccgagatatttgagacttctatgctcctgatttcatcagaaaatgagccgagtcggtgccattccaacgacagtggcaatgttctctatgaagtcatggtaacaggaaatctcgggatccagtggcggcagaaaccaaatgttcttcctgttgaaaaggaaaaaaataaactgaagcggaaaaaactggactatattaaacacaagaaggaggatgccagaaacaaactccgggaagagtggaacagtttttcctatttccccgagattacccacattgttatcaaggagtctgtggtcagcattaacaaacaggacaacaagaacatggaactaaagctctcttctcatgagggagccttgtccttcgtgtccctggtagatggctacttccggctcactgcagatgctcaccattacctctgtactgatgtggctcccccgctgattgtccacaacatacagaatggctgtcacggtccaatctgcacagatattgcattcaataagctgcggcaggaggggagtgaggaggggatgtacgtgctgaggtggagctgcaccgactttgacaacattcttattgctgtcagctgcttcgaaaagtccgaggtattgggtaatcagaagcagttcaagaactttcagattgaggtgcagaagggccgctacagcctgcatggctctgttgaccactttcccagcctgagagacctcatgaaccacctcaagaagcagatcctgcgcacggacaatataagctttgtgctgaaacgctgctgtcagtctaagcctcgagaaatctccaacctactagtagccactaagaaagcccaggagtggcagcctgtctactctatgagccagctgagtttcgatcggatccttaagaaagatattatccaaggtgagcaccttggcagaggcacaagaacacatatctattctgggaccctgctggattacaaggacgatgaaggaattgctgaagaaaagaagataaaagtgattctcaaagtcctagaccctagccaccgggacatttcactggccttctttgaggcagccagcatgatgagacaggtttcccacaaacacatcgtgtacctctacggcgtctgtgtccgagatgtagaaaatatcatggtggaagagtttgtggagggggggccattggatctcttcatgcaccggaaaagtgatgcacttactaccccttggaagtttaaagttgccaaacagctggccagcgccctgagttacttggaagataaagacctcgttcatggaaatgtgtgcactaaaaacctcctcctggcccgtgagggcattgacagtgacattggcccgttcatcaagcttagtgaccttggcatcccagtctctgtgctgaccaggcaagagtgcatagagcgaaatccctggatcgctcctgagtgtgttgaagactccaagaacctgagtgtggctgctgacaagtggagctttggaaccacactctgggaaatccgctacgatggcgagatcccactcaaggacaagaccctcattgagaaagagaggttttatgaaagccgctgcaggccagtgacaccatcttgcaaggagctagctgacctcatgactcgctgcatgaactatgatcccaaccagagacctttcttccgagccatcatgagggacattaacaagctggaggagcagaatccagacattgtttcagaaaagcacccaataacagaggtggatcccactcattttgaaaagcgtttcctaaagaggattcgtgacttgggagagggtcactttgggaaggttgagctctgcagatatgatcctgagggagacaacacaggggaacaggtagctgtcaagtccctgaagcctgagagtggaggtaaccacatagctgatctgaagaaggagatagagatcttacggaacctctaccacgagaacattgtgaagtataaaggaatctgcatggaagacggggggaatggtatcaagctcatcatggagtttctgccttcgggaagcctaaaggaatatctgccaaagaataagaacaaaatcaacctcaaacagcagctaaaatatgccatccagatttgtaaggggatggactatctggg

SEQ ID NO: 994 - DNA, 8575 bp, Rattus norvegicus
gaattcggcacgagggcaggacagggagggactgcggcggagatacgggtcccacgggcaagagcagagaccgcgatttaggcggccgttccaacgcgtgctctctgggcggggtgcggcgggggatgtgcctacccaggccgggcggagtctctctgacagggcgggggatgcgcggccgccgctctctcggascctgakgcggctgggcccaccctcgaggaaccatcctacccccggcggccttggcctctgctttctccggmctgaccctggaaaccgaggcggggaagcggataccgccgaagaggaaggggctgtggwggccaccgcggygcagccagagttcttttgccaagaaaatggtttgcccagtcctgaacacatactgtcctttctgatgggacaagatccaatatgaatgtaagtgatggargaagacgacgctttgaggataatgaacacacattgcgaatatatcctggkacaatttcagaaggaacaatttactgtccaattcctgccagaaaaaactccacagctgctgaggtgattgactccyttataaacagacttcamctagacaagacaaaatgctacgttttagcagaggtaaaggaatttggtggagaagaatggattctcaatccaaccgactgtccagttcagcgaatgatgctgtggccccgaatggctttggaaaatcgcctaagtggggaggactatcgctttcttctgagagaaaaaaacctcgatggatcaattcattatggtagcctccagtcatggctacgggtaaccgaagaacgccgaaggatgatggagcggggttttcttccacagcctcaacagaaagactttgatgatttatgtagcttgcctgatttgaatgagaaaactctcttagaaaacctacggaatcgctttaagcatgaaaaaatttatacttatgttggcagtattctaatagctattaatccattcaaatttcttcctatttataaccccaaatatgtcaaaatgtatgataaccaccagctgggaaaacttgaaccccacatatatgctgtggcggatgttgcttatcatgccatgcttcagcgcaaaaagaatcagtgtattgtgatttcaggagagagtggttctgggaagactcaaagcacaaactttcttattcatcaccttactgccctcagccagaaaggatttgccagtggagtagaacagattattcttggagctggaccagtacttgaggcctttggaaatgcaaagacagctcataataacaattcaagtcgttttggcaagtttattcaagtaaattaccaagaaacaggcactgtacttggggcctatgttgaaaaatatcttctggaaaaatctagacttgtttatcaagagcataatgaacggaactatcatgtattctattacctccttgcaggagcaagtgaagaagagaggttagcattccaccttaagcagcctgaggagtatcattttctcaaccagataacaaagaaacccctcagacagagctgggatgattattgctatgattctgagccggattgcttcacagtggagggagaagatttgaggcatgattttgaacgcttacaattggccatggaaatggtaggatttcttcccaagacacgaagacagattttctcactgctctcagcaatactacatttgggtaatatctcatataaaaagaagacctatcgagatgactctattgatatctgtaatcctgaagtactgcctattgtctcagaattactagaagttaaagaagagatgctatttgaagcattggttacaaggaagacggtgacagtgggtgaaaagcttattttaccatataaactggcagaggctgtgacagtgagaaactccatggctaaatctttatatagtgctctgtttgactggatagtgtttcgtattaatcatgcacttctgaatagtaaagatttggaaaaagatactaagactttgtccattggtgtacttgatatttttgggtttgaagattatgaaaacaatagttttgaacagttctgtattaattttgctaatgaacgtttacagcactactttaatcagcatatctttaagttggagcaagaggaatatagaactgaaggtatcagttggcacaacattgattatattgataatacttgttgtataaatcttattagcaaaaaaccaacaggactgctccaccttttggatgaagaaagcaactttccacaggctacaaatcaaacattacttgacaagtttaaacatcaacatgaagagaattcttacattgaatttccagctgtaatggagcctgcttttatcataaaacattacgctggaaaagtaaaatatggagtaaaggattttcgggaaaaaaatacagatcatatgcgtccagacattgtggctcttctgagaagtagcaggaatgcttttgtttctgggatgactggcattgatcccgtagctgttttccgatgggcagttctccgagcattttttagagctgtggttgctttcagggaagctgggaaaagacatattcagagaaaaagtggacatgatgatacaacaccatgtacaattttgaaaagtatggatagttttagctttctccaacacccagtccaccagaggagcttagagattctgcagaggtgcaaggaagagaagtacagtataacccggaaaaacccaagaacacctctttctgatcttcaaggcatgaacactctgaatgaaaaaaatcaacatgatacatttgatattgcctggaatgtcagaactggaattcgccaaagcagactaccaactaacaatacttccttgcttgataaagatgggatatttgctaattcagcaagcagcaaactcctggaaagagctcatggaattctcacgagaaacaaaaatttcaggtcaaaacctgttcttccaaagcacttgctggaggtaaattctttgaaacatctgaccagactgacccttcaggatcgaattaccaaatctcttcttcatttgcataagaagaagaaacctcccagtatcagcgcccagtttcaggtctccttaagcaagctgatggagacacttgatcaagcagaaccatattttgtaaaatgcattcgctcaaatgctgaaaagctgcccttaagattcagtgatgccttggtactaagacagcttcggtacactgggatgctggagacagttagaattcgccaatctggatatagctccaaatattctttccaggattttgtgagccactttcatgtacttcttccccaacatattatcccatcaaaatttaacattcaagatttcttcagaaaaataaatatcaatcctgataattatcaagttggaaaaaccatggtgttcctaaaggagcatgaacgacagcacttacaggatctgcttcatcaggaagtgcttcgcagaatcatactgctgcagcggtggttcagggtcttgctctctaggcagcagttccttcacttgagacaggcgtctgttattattcagcgattctggaggaactatctaaatcagaagcaagttagaaatgcggctgtggagaaagatgctttcatcatggctagtgcagcttcccttcttcaagcgtcctggcgtgctcacttagagaggcagcggtacttggagttacgagctgcagctgtcattatccagcagagatggagggaactctgtaggcgtagacacagggctgctacctgtatacagtcaagatggaggggctacaggcaaagtaagaagtacaaagaacaaaggaataaaattatcctgttacagtcaatatatagaggattcagagcacgacaaagatataaggctttaaaagaggaaaggctgaaagaaacaaaactagagcatggattggcgcagatcaagacatgtggacctctagaaatccagggttcagacccttctgagtgggaggatcgttcctttgccaacagagtgaaagccatagaagaatgtaaatctgtgatagagagtaatcgaattagccgggagagttcaatggacttctcaaaggagtctccagasragcaacaggagagaggcaggagccaaagtggtacagatttacagggggatgtgattgtaagacagaggcccaagtcattggaagatctacatcagaaaaaagtaggtcgggccaaaagagaaagtcggagaatgagagaattagaacaagctatatttagcttagaattgctcaaagtccgttctcttggtggcatgtctccttcagaggaacgtagatggtctacagaattgatgcctgaaggccttcaatctccacagggtacacctgatagtgagagctctcaagggagcttagaacttttaacctgtgatgagaaccaaaagagcaaaccagagtccctcattttagatgatggagaattgaaaatttcatcacccagtacatttaccaatccaaaatttgattcacaaaataatgccctcagtgcctcaagtgagacaagctctacgttttctggaaaaggagcatcctctgactcagagcatttgaagaatggaactgcagaggaaaagcttgtctatagttctcaacccatcacttgtaaatctcagctgagagactcttttgtttcaagtagtctgcctacatttttttatattcctcatcaagaacctctgaaaacaagctcccaactagatacaagtatccaaagaaacaaactaccagaaagagaaaccactttgaagacaactcttactctggatattaacagagaagccaggaagtgtcagttttcaggtcaggtgactcctttgaatccagattcttcatgtactgtgcttaagaagctagaaaagctgaatattgaaaarraraaaarrmaaaagcagttacagcagcagaatgaaaaagaaatgatggaacagattcgtcagcagacagatattttagagaaggaacgcaaggctttcaagacaattgaacagtcacgaactgaggcctctctcttggcaccatccttttaccagtcaagacaaaaagtagagaggccatcttctctgcatatccaaaatactccaagtaagggagaagctggtgtactaggttccccatcagctcttgccacaaaagatagtccctccattcatttacccccaaaagaccgacctgttaccctgttctttgaaagaaaaggaagcccatgccaatctagaactgtcaaggaattaaccaagacagaaagaatgggtacccaacatgatgctgcctgtagactctccaataatcacaatacagaaagagaacactttaagtcaactcactcttacagccacagatctgatgacccttccagagagggaagttcgagacctattttcttcacaccaaaagacaatgtgattactccccttgtacacagtggaaatcctcaagtccacaaacaagatgaaccagcttggaaatctaagttagcagggcctgggcaacgagaggttgccagaccggcccataaaaagaaagctcgaatggcgcggacgcgctccgatttcttgactagaggtacttttgccgatggggagggggatacagaggaagatgattacgatgacattattgagccccttctctcccttgaccaagcttctcactctgagctagggcctgtatccagcctgggtcaggcctctcacagtgactccgaaatgacgtcacaacgattttcttcagttgatgaacaagcaaggcttcataaggctatgtctcaaggagagattacaaaattggcaggacgacagaagtcttcagatttggacataagaccccagagagcgaagatgagattctgggccaaagggaaacaaggagagaagaagactactagagtaaaacctgctccccagtcggaggtctcatcactctttgctggctcagatgtgacacctgttcatccattttctgatgagttaactcagtaccacccaacacctcctttgagtccagaactgcccgggagttgtcgaaaagagttcaaagagaataaggaaccatcgccaaaggcaaaacgcaagagaggtgtgaaaatcagcagtgtggccttggactctatgcactggcaaaatgactctgtccaaatcatagcaagtgccaacgatttaaaaagtatggatgagtttcttctgaaaaagatgaatgacctagataatgaagacagcaagaaggatacattagtggatgttgtatttaaaaaagccctcaaagaatttcggcaaaatatcttcagctcttactcgtctgcactggcgatggatgatgggaaaagcatacgctataaagatctgtatgcgctatttgaacagatcctggaaaagaccatgaggtttgagcaacgtgattggaatgaatctccagtgagagtttgggttaacacttttaaggtgtttttagatgaatacatgaatgaattcaagactttggatagcacagccccaaaggtgcttaaaacagaaagaaaraaaarrarraaaaaggaaactgatttggtggaagagcacaatggccacatgtttaaggccacccagtacagcatccctacctactgtgaatactgttcttccttgatatggataatggacagagcctctgtttgcaaattgtgtaagtacgcttgccataagaagtgctgtctgaaaaccacagccaagtgttctaagaagtatgatccagagctgtcatctcggcaatttggggttgagctgtcccgtctgactagtgaagaccgagctgttcctttagtggtagagaagctcataaactacattgaaatgcatggactttatacagagggtatttaccgaaagtctggttcaactaataaaatcaaggagcttcgacaaggtctagatacagatgctgaaagtgtaaacctagatgactataacatacatgtcattgcaagtgtattcaaacaatggcttcgtgatttgcccaatccactcatgacttttgaactctatgaagaattccttcgagctatgggccttcaggaaagaaaggagacaatccgtggtgtgtactctgtaattgatcagctctcccggactcacctcagtacactggaacgccttatctttcatctagttaggattgctctacaggaagacactaatagaatgtctgctaatgctttggccatcgtgtttgcaccttgcattctccgttgccctgacactactgacccactacaaagtgttcaagatatcagtaagactaccacatgtgtggaactgatagttgtagaacaaatgaataaatacaaggctcgtctcaaagacatcagtagcctggaatttgctgaaaataaagcaaagaccagactatcactgattcgtagatcaatgaaacctgtcctaattgcagttagatttatgagcattacccgcagttcagtctcgggaaaggggcgtctacatcgaggaagccatccaaatccatcctcccctgttatagtccgattgccttccatgtctgatgtcccagaagagaccttgactagtgagacagccatggacactgacgtcacagaccagcagcaagcagcaatgcagcaggaggagaaagyactgastgagcagattgagaacctacagaaagaaaaggaagaactaacatttgagatgcttgtattggagcctcgtgcctctgatgatgaarcmcttgagtctgargcttctattgggactgctgatagctyggaaaatttgaatatggatcctgaakagagaagmttarcscttakctccctgaaagcagctggyaagtctgagccttcamrcaagtttcgaamrcakctaagaaagcagccagactctttggactcagtcagctcctccgtttcttcatgtctatcaaacactacatcatctcatggcactagaaagcgatttcagatttattccaagtctccattttaccgagctgcctcagcttgtgaggcccagggaatggaaggaccactaggccaagccaaatccctagaagacaggcctcagttcatcagcagaggaaccttcaaccctgaaaagggcaaacaaaaactaaagaatgtgaaaaactcacctcagaaaaccaaagagaccccagaggggacggtttcatctggccgaaagaaaactgtggactcagactgcagctccacacagcaactaccactgtttggaaataatgagtttatggtctaaatggacagaaatgtctccacatctcatctttggggcctcttctggtcaccttgtttgtaacagtcagtcctaatggtcctaccttgtcttcagctgacagtttgtgtgctggaacactgcacttctggcaaaagtggcctctttgaagtttgctagggatgggccagctgtgccttggctgctgtatttgatttgagattccactaaacaaagccacctgagacctgggtgattttggccaacagtagttgctctcgtgccgaattcgatatcagct

SEQ ID NO: 995 - DNA, 3166 bp, Rattus norvegicus
tagaattcagcggccgctaaattctaggtggccacggaatcctgcggcgtggagctccggggaaaastcagtcamcmatggacctgcgtcagtttcttatgtgcctgtccctgtgcacggcctttgctttgagcaagcctacagaaaagaaggaccgagtacaccatgaacctcagctcagcgacaaagttcacaacgatgctcagaatttygactatgaccatgatgccttcttgggagcagaagaggcaaagagttttgrtcagctgacaccagaagagagcaaggaaargcttggaatgattgtagataaaatagacaccgataaagatgggtttgtgacsragggsgagctgaagwscyggatyaagcacgcccagaagaaatacatatatgacaatgttgaaaaccagtggcaggagtttgatatgaatcaagacggcttaatctcctgggatgagtacagaaacgtgacttatggcacttacctggatgatccagaccctgatgatggatttaattataaaccgattatggttagagatgagcggaggttcaaaatggccgaccaagatggagaccttattgccacaaaggaggagtttaccgcttttctgcaccctgaggaatatgactacatgaaagacatagtcctgcaggaaaccatggaggatatagaccagaatgctgatggttttattgatctagaagagtatattggtgacatgtacagtcatgatgggaatgctgatgaaccccagtgggtkaagacagagcgggagcagttcgttgagtttcgagataagaaccgggatggaaagatggacaaggaagagaccaaagactggatcctcccttcagactatgaccatgcagaggccgaagccaggcatctcgtctatgagtccgaccaagacaaggatggcaagctcaccaaggaggagattgtcgacaagtatgatttatttgtgggcagccaggccacagatttcggggaggccttagtacgacacgatgagttctaagctgcaaacagaggagcctwcatttcttcaaaagtaatttatttttacaggtctggtttcacataaaattgtttgcgctactgagactgttattacaaactttttaagacgtgaaaaggcatatcgagatagtgaaatcacccgyccccattcctcctccctctgaggggctggaaggaacccatgcttctgaggaacaactctgattagtacacttgtgtctgtaggtttacactttgtataatgtataacatggtgtgtttatttttgtattgttctctagttgggagtataatatgaaggwtggagatcctcaacccacacttgtaggcatacattagccatttacactttctcaatcccttaccacattttttttttaataattctcacttaactaattttttaaagcctaagatcaataagaaatgttcaggagagaaaaagcagaaggaaagcatgtacttcgtgatttacgttcagagagagaatgcttcatcttgcttgttgagaagtctcatttcatgagtagctgttcagttgtcacaggcccagccacggagcctgccattgtctgggcaaggacagagtcctccgctgtaagacagcgtcacgcagctccacttcactcttcccctcaggactagctgtttgctaattttgtcaagcacagctgtggtaggaagaattagggcccagtgtcttgaaaaatcaaccaagtagtgtgtatgatgtcttcacagggctatttctagctctttctagagctgtttctaaccagaaacagctggaaaacaaaaagaacaaagtgtatgcagggcatgcatctcattcttagtgaaatcactacaaggacccatcccagcccctttctaagtcttaaccttgggttttactgcagtttaaattgattcttttccmatcatgacattgwaagttgccctttaacaggaaaaatggtcaccgaatgagawytgggactcaagaataacgaatttggggcrcccttacgttgaaagcatttgaacctcyctgatacmgaaggggattcccctccccgcctttttctcttgtraacaggaastaaatagcabkakkagttaaagcttggttgcagtgttcttatcttgwgggctggtttctaaaacctcatgctgctgatttgaccagggcatcckcatacctcaratgcaraccactcttctaccgggcctctgtttaccggagctttgcctcaaggataraasgctgtacagaggggctctttggtttgaggaccactgctcacccttcctgtcattaacctgtcacaccccattttatcatctccctttctctctgacacacaaaggtggggtasgtgggagggtcgwggattattcttattaaaaaacaaaatcatctgttgccaaccccatttacccatctttggtctcttactgatgggcctcttaagaattattgtattccaagtctttaaccctcakgttactaakgtaaatatacatctgsrcagtctttattacttcctgtatctctgagtaatacatcaagctggtgctgggtgatggtcatatctgaacctagacctccccgtgggtcttccacaatcctgttgatgtgggctgcttggtgtggtaaaaagcccagtcgtggtgtaacttaaccttggcgattgcatcaagcttcttgatagcagatacactctaaggttttagccccagtagaggtgaaatgaacatccctcactgccttccccagatcctcaactctccattgttaaggagaccagagataattaatgccaccaaccctggcttagaaagggtacgtcatacactgtgtagcaagagggcattacagagcctaacgctggcgtgaaaatcatgtacttagccagcaagtgagtctgcgagggtggcgtagtctggacagggtgttcagcatcgggaactgtgctctcaggtccataagctccacatagtgttggggtttgggtttgggtttctggttgaatttgagtatttgttctttttttatagagtgtaaaccaagttttatattctgtaatgcaaacaggtacctgtcgttttttgaataaaactgtttacatccaaaaaaaaaaaaaaaaaaaaaaaaaa

SEQ ID NO: 996 - DNA, 1251 bp, Rattus norvegicus
cggccgcaggactgggatgccgaggacgcgagccacccgggcagggcgcgtctgggcaccggcggggtaggacccgcgcgctcccggaggcctgcgcgggcgtcgcctggaagggagaacttgggatcggtgcgggaacccccgccccggctggatcggccgagcgagcctggaaaatggtaaatgatcatttggatcaattacaggcttttagctggcttgtctgtcataattcatgattcggggctgggaaaaagaccaacagcctacgtgccaaaaaaggggcagagtttgatggagttcgtggacttttctgtgcggctcgcctccacacctagaggataagcacttttgcagagcgcggtgcggagagatcatgtttgactgtatggatgttctgtcrgtgagtcccgggcagatcctggatttctacaccgcgagcccgtcctcytgcatgctgcaggagaaggctctcaaagcctgcctcagtggattcacccaggccgaatggcagcaccggcatactgctcaatccatcgagacacagagtaccagctctgaggagctcgtcccgagccccccatctccacttccgccgcctcsggtgtacaagccctgcttcgtctgccaggacaagtcatcgggctaccactatggcgtcagtgcctgcgagggctgcaagggctttttccgacgaagcattcagaagaacatgatctacacttgccaccgggataagaactgcgttattaacaaggtcactaggaatcgatgccagtactgccgcctgcagaagtgctttgaagtgggcatgtccaaagagtctgtcaggaatgacaggaacaagaaaaagaaggagccytcrwrgcaggagtgcacagagagctatgagatgacagcggagctggatgacctcaccgagaagatccggaaagcccaccaggaaacctttccctcactctgccagctgggtaaatacaccacgaattccagtgctgaccaccgggtccgattggacctgggcctctgggacaaattcagtgagctggccaccaagtgcattattaagatcgtggagttcgccaagcgtctgccgggcttcacgggcctgaccatcgcagaccagatcaccctgctcaaggccgcctgcttggacatcctgattctcagaatttgtaccaggtataccccagagcaagacaccatgactttctctgatggccttaccctaaatcgaactcagatgcacaa

SEQ ID NO: 997 - DNA, 2037 bp, Rattus norvegicus
gacttttttgcagaagaagggcgcgcgcctgggagtgctttggggtcccggcgcttgcggcggctgccaggagttggagagcgagaaattaaagcgattgagagagagagcgcgcgcggttccgggcccgccgccgcttcttttccggtcgccgcagccgccgccgcagcagggaacgggaccgggggggaggggggcagccgcggacccgcggggccaaggactttgcaacttgccggagaaggtggaggggcgggagggggaggggcgcccgcgcaggagaccgagcgcccagccccgccgcggaccatggtgcagcaggccgagagctcggaagccgagagcaacctgccccgggacgcgctggacaccgaggagggcgagttcatggcgtgcagcccggtggccctggatgagagcgacccggactggtgcaagacggcgtcgggccacatcaaacggcccatgaacgccttcatggtgtggtccaagatcgagcgcaggaagatcatggagcagtcgcccgacatgcataacgccgagatctccaagaggctgggcaagcgttggaagatgctgaaggacagcgagaagatcccgttcatccgggaggcggagcgcctgcgcctcaagcacatggctgattatcccgactacaagtaccggccgcgcaaaaagcccaagacggacccagccgccaagcccagcgcgggccagagcccggacaagagcgcggcgggcgctaaggcagccaagggcccgggcaagaagtgcgccaagctcaaggcgcctgcgggcaaggcgggcgcaggcaaggcggcgcagcctggggactgcggcgcgggcaaggcagccaagtgcgtcttcctggacgacgatgatgaagaggacgacgaggacgacgagctgcagctacggcccaagccggacgcagacgacgacgacgacgagcccgcgcactcgcacctgctgccgccaccggcgcagcagcagccccctcagctgctgaggcgctacagcgtggccaaggtgcccgccagccccacgctcagcagtgccgccgagtcccccgagggcgcgagcctktacgacraagtgcgcgcgggcggccggctctactacagcttcaagaacatcaccaagcagcagcctccgcccgcgcctcccgcgctgtcgcccgcgtcctcgcgctgcgtgtccacctcctcatccagcggcagcagcagcggcagcggcgccgaggatgccgacgacctcatgttcgacctgagcttgaatttctcccagggcgcgcacagcgcctgcgagcagccactgggcgcgggagcggcggggaacctgtccctgtcgctggtggataaggacctggattccttcagcgagggcagcctgggctcccacttcgagttccccgactactgcacgccggagctgagcgagatgatcgcgggggactggctggaggcgaacttctccgacctggtgttcacgtattgaggggcacagggctcctcgggaggcagtcgtggcggtcaggataaagaggatggtggggggagggggagaagatgctcatggtcagagatgtggcgcagagaaattggaaasrrtkmkgadakgttggagttaaagtgaaatgagtasytttaaacagattttccarrwttttttttttaatcttttaatttttaaaaaaattttttggtctccccactcttyccttcctttatcgtgtctcaaggtagttgcacacctagtctggattgtgatttcccccacccstaaaaaaatcgtgttttgtaatttctatttctttttcctgaaattcgtgattgcaacaaaggcggaggggaccgggcgggggaggggaggaggccccgctccggaaggcgctgtttgaagctcgtggctctttgaagtctgaaagacgtcggcagaggaccctttagacggcacaactgttactctagggagttgatatttttttttcttaagagatttaaaaaggaactggtgatttaaaaaaaaaaaaaaaaa

SEQ ID NO: 998 - DNA, 3144 bp, Rattus norvegicus
gaacaaacagcttcctgtaccccctgaaacccatcttctgttaggaagactgggccaaaggtgaaccacaatcagagaccaagcccatgacatgagctcgtgccgaattcggcacgagggtattaaggggccaccaggtgatgatggacccaaggggaatccgggacctgttgggtttcctggagatcctggtccacctggagaacctggtcctgcagggcaagatggtgttggaggtgacaagggtgaagatggagatccaggacaaccaggtccccctggtccatccggtgaagctggccctccaggtccacctggaaagagaggtccgcctggagcttccggttccgaaggaaggcaaggmgagaaaggtgctaagggagaagctggagctgamsgacctcctgggaaaactggcccggtcggacctcagggtccttctggaaagcctggtccagaaggtcttcgaggcatccctggtcctgtgggagaacaaggtctccccggtgctgctggccaagatggaccccctggtcctctgggacctcctggtttacctggtctcaaaggtgatcctggctccaagggtgaaaagggacatcctggtttaattggattgattggccctccaggagaacaaggggaaaagggtgacagaggacttcctgggactcaaggttctccaggagccaaaggtgatgggggcatcccaggtcctgctggtcccataggtcctcctggtcctccaggattaccaggtcctgctggtccgaagggtaacaaaggatcttctggacctactggccagaagggtgacagtggtatgccaggacctcctgggcctccaggtcctcctggagaattcatacagccattacctattttgtcaccgaagaaaacaagaagacacactgaaagcatccaggccgacgcaggtgataatattcttgactactcagatggcatggaggaaatatttggttccctcaattctctgaaacaagacattgaacacatgaagtttcccatgggtacacagaccaacccagcacgaacatgcaaagacctgcagctcagccaccccgacttcccagatggtgaatattggattgatcctaaccaaggctgctcaggtgattccttcaaagtttactgtaatttcacagctggtggtgagacgtgcatctatccagacaaaaaatctgagggagtaagactttcatcttggccgaaggagaaaccaggaagttggtacagtgaatttaagagaggaaaactgctttcctatttagatgtggaaggcaattccatcaatatggtacaaatgacattcctgaagctcctgactgcctctgccagacaaaayttsacctacaattgccaccagtcaactgcttggtatgacgtcttatcaggaagttatgacaaagcacttcggtttctgggatctmakgakgaggaaatgtcctacgagaacaacccacacatmaarsstttgtatgacggctgtgcgtcccgaaaaggckatgaaaagacaktgattgagatcaatactcckmaaattgatcaagtacccatcattgatgtaatgatcaatgattttggygatcaraawcagarktttggatttgaagttggtccagcttgctttcwkggctaagattaggatgaagaccatwtgaaaccaacagaaaaaataccttggtgccgycaatccawtttmkgccrcawgcargttttgaataaggacggtatasgaaacctgtttaggaatcactgatgcctgacggaggcacagtccaaggaaagaagttctggtagtcataaccatgtaaggtagtggctgagatggcaacagggctcattcttgawtctcaaccctcatctctccttttcctatwtggattttgttggtgctgtrgaaaacaaaaagagagaaaatatatattcktramrrmrvabgrdgmtcmttyccatccatcaaagatatagtaaaagtgtctttartaaattgtaattattttatgtacagttckacactgtcttccctgtgtccattkccaaaacttgcacgtgactctgaatcccacstatctcgaattttgtgacagttgtgcaactgtgatgacaataaatattgtgatacaaaawmwmaarwwrwawwwmwrmaractctaattgcctttctttgattgataataaaatgcctttgtatgtgtwrawrwwraararwwmarwtatttgatgtcattgacgaatttcacagtggtcaaacccagacacgcccatcatccctgttctgctaagagtaactttttgagtttcagcaagaaatgtcacgcattttaaaaattaattaagtgctatacctcgaaaattttcttctcagaacccagacttcaccaaatacttgtatatatggaaaacaagaaaatttatatttttggacaggaaagtatgtatgagaaactgtttttaacatccacccaggaattaagtttttgtacaattatttctctacctaatctttcattgccttcagtgtgcttcagtaatgcaaactgatattaaasatggaaaataagcmattgtttatgaatttgkgcaatgttaggtttttaacaatgracttttaaaatctgatacaagtggcatagtccaaaatattattttacttgcccaatgaatacagttcctttattttaaagtaattattttcaacatctgaccaacctagtagctaaatacatagggtggactgtttcaaaagtcatatttgctcaagacaatcaattcctctctttttttccactaaggtatttttctttaacataccttggagtagcaataaaattttaaaatcaccaactgaattttgtatctattttaagtaatatatgtaagacttgaaaataaatgttttattataatttcttatatgaagtgttaaattaattgataccagataccactggaacatttatcaactgataatttatctcaaagaacataatctgtaatcttgacatttaaaagtgaacatttgtaattcggaatttctttatttctgaaaccaagtttgtaaatgtcctttggaggaaggagatatgaattttatcaataaatcaagtcttgtctacctgg

SEQ ID NO: 999 - DNA, 988 bp, Rattus norvegicus
ctttggtcgacccctagctccatcctccagcaagactcaagacagctccggaaacacctccttcccccagttccccagacaacaagatctcaggctcctccctcgggacttcctctcagttccaccctcttcttcagggtccaccatgggacgccccccaccctgtgcaatccagacgtggatccttctgtttctgctaatgggagcgtgggcaggactcaccagagctcagggctccaagatcctggaaggtcaggagtgtaaaccccactcccaaccttggcagacagccttgttccagggcgagagactggtctgcgggggtgtcctggtcggagacagatgggtcctaactgcagcccactgcaaaaaagacaagtactccgtgcgtctgggtgatcacagccttcagaaaagagatgagcccgagcaagagatccaggtggctcggtctatccagcatccttgcttcaacagtagcaacccagaggatcacagccatgacataatgctcattcgactgcagaactcagcaaacctcggggacaaagtgaagcccatcgagctggccaatctgtgtcccaaagttggccagaagtgcatsryaysaggctggggcactgtcaccagccctcaagagaactttccaaacaccctcaactgtgcggaagtgaaaatctactcccagaacaagtgtgagagagcctacccagggaagatcaccgagggtatggtctgtgctggcagcagcaacggggccgacacgtgccagggcgactcgggaggtcctctggtgtgcaacggggtgctccaaggcatcaccwcgtggggctcagacccctgtgggaaacctgagaaacccggagtctacaccaaaatctgtcgctacactaactggatcaagaagaccatgggcaagagggactgatcctggggatgggcggtcaataaagaccactgctggctcctcaaaaaaaaaaaaaaaaaa

SEQ ID NO: 1000 - DNA, 3999 bp, Rattus norvegicus
cccagcctagcttcccctccagttcccctccttccttctctcctcctgtccactggagaggtttgcccaacctctgcaaagagggacaattgacatcatgtctttgctcaaccctgtcctgttgccccctaaggtgaaggcatatctgagccaaggggagcgcttcatcaagtgggacgatgaaacctcaatagcctcccctgttatccttcgggtggatcccaagggctattacttatactggacacatcaaagtaaggagatggaatttctggatgtcacgagcatccgagacactcgctttgggaagtttgccaagatacccaagagccagaaactccgggaggtattcaacatggactttccagacaaccacttcctgctgaaaacattcacagtggtatccggcccggacatggtgggcctcaccttccacaattttgtctcttacaaggagaacgtaggcaaggattgggctgaggatgtactggctctggccaaacacccaatgacagccaatgcttctcgaagcacattcctagacaagatcctggtgaagcttaaaatgcagctgagccctgaagggaagatccctgtgaagaattttttccagatgtttcctgccgatcgcaaacgtgtagaagctgccctcagtgcctgtcaccttgcaaaaggcaagaatgatgctatcaatcccgaggacttcccagaatctgtgtacaagagcttcctcatgagcctctgtcctcggccagaaattgatgagatcttcacttcttatcatgctaaagccaaaccctacatgaccaaggagcacctgaccaaattcatcaatcagaagcaacgagaccctcgactcaattccttgctgttcccaccagcccggcctgagcaggtgcaggcgctcattgacaagtacgagcccagcggcatcaatgtgcagaggggccaactgtcaccagagggcatggtctggtttctctgtggaccagagaacagtgtcctggcccatgatactctgcggatccaccaagacatgacacagcctctgaatcactacttcatcaactcctcacacaacacttacctgacagctggccagttttcaggcccttcctcggctgagatgtaccgccaggtgctgctatctggctgccgttgtgtagaattagattgttggaaaggaaagccccccgacgaagaacccatcatcacccacggcttcactatgaccacagatatcttgttcaaggaagcagtcgaagccattgcagaaagtgcctttaagacctccccatatcctgtcatcctgtcatttgaaaaccacgtggactcaccccgccaacaggctaagatggccgagtactgccggaccatgtttggagagaccttgctcacagagcccctggaaaactttcctctgaaacctggcatgcctctgcctagccctgaggacctccggggcaagatcctcattaagaataagaagaaccagttttctgggccagcatcccccaacaagaagcctgatggggtgtctgagggcggcttcccatctagtgtccctgtagaagaggacacggggtggactgctgaggaccggactgaggtggaggagggagaggaggaggaggaggtggaagaagaggaagaggaggagtcaggaaacctggatgaagaagaaattaagaagatgcagtctgatgagggcacagcaggcttggaggtgacagcttatgaggaaatgtccagccttgtcaattacatccagcccaccaagtttatctccttcgagttctctgcacagaagaacaggagttaccttgtctcttccttcacggagctcaaggcctacgagctgctctccaaggcctccatgcagtttgtggactataataaacgccagatgagccgcgtgtaccccaagggcacgcgcatggactcttccaactacatgccccagatgttctggaatgccggatgtcagatggttgccctcaatttccagacaatggatctgcccatgcagcagaacatggcactgtttgagttcaacgggcagagtggctacctcctaaagcacgagttcatgcgcaggcaggacaagcagttcaaccccttctcggtggaccgcattgatgtggtggttgccactaccctttccattacggtcatctctgggcagttcctgtcagagcgcagtgtgcgcacctatgtggaagtagaactgtttggcctcccaggggaccccaagaggcgctatcgtaccaagctgtcacctactgctaactccatcaatcctgtctggaaggaggaacccttcatttttgagaagatcttggtgcctgagctggcctccctcaggatagctgtaatggaagaaggcggcaaatttattggacatcgcatcatccccatcaatgccttacattccggataccaccatctgtgcctgcgcagtgagagcaacatgcctctcaccatgcctgctctcttcgtcttcctggagatgaaggactatgtacctgacacgtgggcagatcttactgtggctcttgccaaccccatcaagtacttcagtgcccatgataagaagtctgtgaagctcaaagaagtgacaggaagtctgcctgagaagctcttctctgggattcctgttgccagccagtccaacggggctccagtctccgcaggcaatgggtcaacagcgcctgggaccaaggccaaggaggaagctacgaaggaagtggcagagccacagaccactagcttggaagagctgcgggagctgaagggcgtggtgaagctgcagcggagacatgagaaggagcttcgagagctggagcggcgtggagcccggcgctgggaggagctgctgcagcgtggcgctgcacagctagcggagctccaggacccagcagcaagctgcaagctccgcccgggcaagggctcccgcaagaagaggatcgtgccctgtgaggagaccatcgtggtgcctagggaggtcctcgagggaccggacccccgcgtgcaggatctgaaggacaggctggagcaggagctgcagcagcaaggcgaggagcagtaccgctctgtcctcaagcgtaaggagcagcacgtgaccgagcaaatcgccaagatgatggagctggccagagagaaacaggctgctgaactcaagagcttcaaggagacctcggaaactgacaccaaagagatgaagaaaaaactggaggccaaaaggctggagcggatccaagccatgaccaaagtcaccacagacaaggtggcccaggagaggctcaagagagaaattaacaactcccacatccaggaggtggtgcaggctgtcaagcagatgacagagaccctggagcgtcaccaggagaagctggaagagaagcagacagcctgcctggagcagatccaggcaatggaaaagcagttccaggagaaggcgctggcagagtatgaggccaagatgaagggcctggaggctgaagtaaaggagtcaatgcgggcttgcttcaaggcctgcttccccacggaagcagaagagaagcctgagaggccctgtgaggcctctgaggagtcgtgtccacaggagccacttgtgaacaagacagacactcaggagagccgcctctgaatgccagcatctcactccgacattttagcaaggatatccacgcctttctcctcgggagaaaaggaccttattactctggggctgtgggagcctggggctgcttggctgccgcagccccgcttctcagccacataaggcagaaatgggagaccattggggcaagagccccatggaacccgagtcttttctaagctggcttcttctgtcgtcccacctgtagtgccatatacttattgaaggcaaaggaatatggaccaagagagaggaaattgggtcctggtctccctctgcctttcctaacatacatgcaggggctctcacttggagctccgttcctttcctggatgctt

SEQ ID NO: 1001 - DNA, 2162 bp, Rattus norvegicus
cgctaccagcctgatccatggaaaggaagtgcagcaaaaggcacaggcatcaccaggaagaagacttttaaggaagtagccaatgcagtgaagatctctgcctcactcatgggcacggtgatggcgaagcgtgtgaaggcgactatcctgtatggctctgagactggccgcgcccagagctacgcacagcagctggggaggctctttcggaaggcgtttgacccccgggtcctgtgcatggatgaatacgatgtggtatccctagagcatgaggccttggtattggtggtgaccagcacatttggcaatggggatcccccggagaatggagagagctttgcagcagcgctgatggaaatgtcgggcccctacaacagttcccttcggcctgagcagcacaagagttacaaaatccgattcaacagtgtctcctgctcggacccactggtatcctcttggcggcgcaaaaggaaggaatccagtaacacagacagtgcaggggccctgggcaccctcaggttctgtgtgtttgggctgggctccagagcatacccgcacttctgtgcctttgctcgagcggtggacacaaggctggaggarytgggcggggagcgactgttgcagctgggccagggtgatgagctctgcggccaggaggaggctttccgaggctgggcccaggcagccttccaggctgcctgtgaaactttctgtgtgggagaagatgccaaggctgctgcccgagatatcttcagtcccaagcgcagctggaaacgccagaggtaccggctgagtacccaagctgagagcctccaattactgccaaggctgactcacgtgcacagacggaagatgttccaggctacaattctttctgtggagaacctacagagcagcaaatccacccgagccacaatcctggtgcgtctggacactggaagccaggagggactgcagtaccagccaggggaccacataggtgtgtgcccacccaaccggcctggcctagtggaggcgctgctgagccgagtggaggaccctccgccatccacagagcctgtggccgtggaacaactggaaaaaggcagccctggtggccctccccccggctgggtacgggacccccggcttcccccaggtaccgtgcgccaggctctcacttacttcctggacatcacttccccgcccagccctcgccttcttcgactgctgagcaccctggcagaggagtccagcgaacagcaggagctagaggctctcagccaggacccccggcgctacgaagaatggaagtggttccgctgccccacactgctagaggtgctggaacaatttccatccgtggcactgcctgccccgctgatcctcacccagctgcccctgctccagccccggtactactctgtcagctcagcacccagcgcccacccaggagagatccacctcactgtagctgtgctggcatacagaacccaggatgggctgggccctctgcactatggggtctgttccacatggatgagccaactcaaggcaggagacccggtgccctgcttcatcaggggggctccctccttccggctgccacctgatcctaacttgccttgcatcctggtgggcccagggactggyattgcacccttccggggattctggcaagaccgattacacgacattgagatcaaaggactgcagcctgcccccatgactttggtgtttggctgccgatgctcccaactggaccatctctaccgggacgaggtactggacgcccagcagcgtggagtgtttggacaagtcctcaccgccttttccagggatcctggcagccctaagacctatgtgcaagacctyctgaggacagagctggccgcggaggttcaccgcgtgytgtgcctcgagcaaggacacatgtttgtctgcggtgatgtcactatggcaaccagcgtcctgcaaaccgtgcagmgaattctggcaacagagggcagcatggagctggatgaagccggtgacgtcatcggcgtgctgcgggatcagcaacgctaccacgaggacattttcggactcacattgcgcacccaggaggtgacgagccgcatccgcacccagagtttttctttgcaggagcgacagttgcggggcgcagtgccctggtcctttga

SEQ ID NO: 1002 - DNA, 3422 bp, Rattus norvegicus
atgtgcttccgctctataatgcctcctgctatggcagacacccttgacatctgggccgtggattcacagatcgcgtctgatggctccatctctgtcgatttccttctgcccactgggatttatatccagttggaagtaccccgggaagctaccatttcttatattaaacagatgttatggaagcaagttcacaattacccaatgtttaacctccttatggacattgactcctatatgtttgcctgtgtgaatcaaactgccgtatatgaggaacttgaagatgaaacacgaagactttgtgatgtcagacctttccttccagttctcaaactagtgactagaagctgtgacccagcagaaaaattggactcaaaaattggagttcttataggaaaaggtcttcatgaatttgatgccttgaaggatcctgaagtgaatgaatttagaagaaaaatgcgcaagttcagcgaggacaagattcagtctctggtggggctgtcttggattgactggctcaagcacacgtacccgcccgagcacgaaccgtccgtcctggagaacctggaagacaaactttatggagggaagctggttgtggctgtgcattttgaaaatagccaggatgtatttagttttcaagtgtctcccaatttgaatcctataaaaataaatgaattggcaatccagaaacgcctcactattcgcgggaaggaagaggaagctagcccctgtgactatgtgttacaggtcagtgggagagtggagtatgtgtttggtgaccatccactgattcagttccagtatatccggaattgtgtaatgaacaggaccctgccccatttcatccttgtggaatgttgtaagatcaagaaaatgtatgaacaagaaatgattgccatagaggctgccatcaaccgaaactcctccagccttcctctccctttaccaccaaagaaaacacgagttatttctcatgtctggggcaacaacaaccctttccaaattgtcttggtaaaaggaaataagcttaacacagaagaaaccgtgaaagttcatgtcagagccggactttttcatggaaccgagctcctgtgtaaaaccgtcgtaagctcagagatatcaggaaagaatgaccatatttggaatgaacaactggaatttgatattaatatttgtgacttaccaagaatggctcgattatgttttgctgtttacgcagttttggataaagtaaaaacgaagaaatcaacaaaaactattaatccctctaaatatcagaccatcaggaaagcaggaaaagtgcattatcctgttgcatgggtaaacaccatggtttttgacttcaaaggacagctgaggtctggagacgtaatattgcacagctggtcttcgtttcctgatgagctggaagaaatgctgaaccccatggggactgtgcagacgaacccatatgctgagaatgcaactgccttgcacattaagtttccggagaacaagaagcagccttattattacccccccttcgataagatcattgagaaggcagctgagattgccagtggagacagtgcgaacgtatcaagtcgtggtgggaaaaagtttcttgctgtactgaaagaaatcttggacagggaccccctgtctcagctgtgtgagaacgaaatggaccttatttggactctacggcaagactgccgagaaaatttcccacagtcactgccaaaactactcctgtcaatcaaatggaataaacttgaagatgttgctcagcttcaggcgctcctgcagatttggcccaaactgccacccagggaagcactggaactcctggatttcaactatccagaccagtatgtccgagagtacgctgtaggctgcctgcgacagatgagtgatgaagaactctctcagtatcttttacagttggtgcaagttttgaagtacgagccttttcttgactgtgccctctccagattcctattggaaagagcacttgacaaccggaggattggccagtttctgttttggcatcttaggtcagaggtgcacactcctgctgtgtccattcagtttggtgtcatcctagaggcatactgtcggggaagcgtggggcacatgaaagtgctttccaaacaggttgaagcactcaataaattaaaaactttaaatagcttaatcaaattgaatgcgatgaagctgaacagagctaaaggaaaggaggccatgcacacgtgcttaaaacagagtgcctaccgggaggcgctctctgacctgcagtcacctctgaacccatgtgtcatcctctcagagctctatgtcgaaaagtgcagatacatggactccaagatgaagccgctgtggctggtctacagcaacagggcctttggagaggacgcggtgggagtgatcttcaaaaatggcgacgatttgcggcaggacatgctgaccctgcagatgctgcgcctgatggatctgctgtggaaagaagctggcttggacctgcgaatgctcccctatggctgtctagcaacaggagatcgctctggcctcattgaggttgtgagcacctctgagacaatcgctgacattcagctaaacagtagcaacgtggctgccacagcagccttcaacaaagatgctctcctgaactggctcaaggagtacaattctggggacgacctggacagagcgattgaggagttcaccctgtcctgtgctggctactgtgtagcctcttatgtccttggcattggtgacaggcacagtgacaacatcatggtgaagaaaaccggcsagctcttccacatagactttgggcatattcttggaaatttcaaatctaaatttggcattaaaagggaacgagtaccttttattcttacttatgacttcattcatgtcattcaacaaggaaaaacgggaaacacagaaaaatttggcaggttccgccagtgctgtgaagacgcgtacctgattttacggcggcatgggaatctcttcattaccctgtttgcgctgatgttgactgcagggcttcccgagctcacatcagtcaaagatatacagtatcttaaggactctcttgccttaggaaagagtgaagaagaagcactcaaacagtttaagcagaagtttgatgaggcactcagggaaagctggaccactaaggtgaactggatggctcatacagttcggaaagactacaggtcttagcgtccgctctgctctgctgcacttgcctgtttgtctcctttccattttgcacttgcactattgaacatgaccctgcgggaaatgccaagggaatgaaatcctgaagctcagcgtgaagttcagaacacggcatcccacagaagctcgtctgaaccaccccaatgcccaccctctgtaactgagtgcttccaggactcatgagtgtcagc

SEQ ID NO: 1003 - DNA, 1479 bp, Rattus norvegicus
gyggccgctgtctcgcgcacctgccgagcggctgccagccgggggccgcttggrgggaaggggctgtcaaagcgcctgcagtcgcgtcccagccccgagccscgacccctcttgagatctctctttcccctgttctgcaggttcgsttgcggcgtcatggctcagagggcctttccgaatccttatgcsgattataacaagtcgctggccgaaaactattttgattctactgggaggctgactcctgagttttcacatcgcttgaccaatawgatccgggagctccttcagcaaatggagagaggcctaaagtytgcagwccctcaggacggcactggatacaccggctgggcaggcattgctgtgctttaccttcatctccacaatgtgtttggggacccggcctatctgcagatggcgcacagctatgtaaagcacagcctcaactgtttgagcargcggtccatcaccttcctgtgtggggacscgggccccctggctgtsgctgctgtgcygwwccacaagatgaacagcgggaagcaggcagaggattgcatcacacggctcattcacctaaataagattgatccccacgtaccaaatgaaatgctctacggccscatmggcyacrwsktcgctctgctttttgtcaataagaactttggagaggagaagattcctcagagccacattcagcagatttgtgaaaccatcttaacctctggggagaagctgtctagaaagagaaacttcacaacgaaatccccactgatgtacgagtggtaccaggagtattacgtgggggctgcccacggcttggcgggcatttattactacctgatgcagcccagccttcatgtaagccaagggaagttacatagtttggtgaaacccagtgtagactttgtctgccagctgaagttcccttctggcaactacccttcatgtttggatgacaccagagacctgcttgtccactggtgccatggcgcccctggggtcatytatatgctcatccaagcatacaaggtgttcaaagaggrgcatyamctgtgtgacgcccagcmgtgtgmtgacgtrawytggcmgtacgggctactgaagaagggctatgggytgtbccacggtgytgcagggaatgcytatgctttcytggcactytataacctcacacaagatgygaaatwcctgtacagggcctgtaagyytgytgagtggtgcttagactatggrgagcacgggtgcaggacaccggacacgcccttytytytctttgaagggatggctggaacgatatatttcytggctgacctgttagtccccacaaaggccaagttccctgcatttgaactytgagaagaaagcatgtcccctgcsgctcacagcatggttytgtgtatccyyctgagctctgtgtgtccmttgcttttgaaggaagcagaatgaaactgtatactttgaaaaaaaaaaaaaaaaaaa

SEQ ID NO: 1004 - DNA, 3264 bp, Rattus norvegicus
tgacctctgtggatctgatatacatgtaagtgacagaccatccgagctatatagtgagacctgtgcaaggaaggatggagtgcacgttccctgatgttcagagcaaccctgtgtcactccaggtaggtgagatgagaggaagagggtggccttggcctgggcctcctacgggcctggaagttgggagaaggatgtaagcagactctgttctcttctgagaaatatcaggtattgcagtcagcccaggctcctcagaccctcctaagtgcagattctctgcagaatctggtgttgacaacactaatgagtaggatgagacttcagttccctagccctcaccgtcagcttctgattaccaacaactctcccagaggagagccatctacctttgggacagatgctctctgccctgcactgcctcctgtttctcttcattgtagaggaagatagtactttaaaagcttcataaatggtctcaaggtgggaagaccccggctcaggtgaaagaggacaagcgtcacctcacacaggccacccagtagaaaacaagtgatcactgatactgagaactctggcaattgcagagctgcccaagaccacaacagggcagtgcaatgcaaggaaaaggtttgttgctcgattgcaaacctaaagtttaaagtgcatcaggagaacgcttactcaaagaggaagtgtaagcctaacttaagtagctagaagctcagaatttcttgcatcagccctggaagggtacacaggccaccggtgggccagagaaccacacgctttggggcggtgtccaagcttgtgaacaagtaggcaagagcgcctggtgttgtagctgtcattggcgggcaatacagcccagcgaactgtggtctccaaggtgcccctcgaccctcccactctacccgagactccagggacgcgatgggccagacagcaagagctccgcctacgggggcggggacaggagattcccgtgatgctcctcgaccacttccggacagggcgcaggcgctagctgtcatgttgcgggctttgaaccgcctggccgcgcggcccgggggccagcccccaaccctgctccttctgcccgtgcgcggccgcaagacccgccacgatccgcctgccaagtccaaggtcgggcgcgtgaaaatgcctcctgcagtggaccctgcggaattgttcgtgttgaccgagcgctaccgacagtaccgggagacggtgcgcgctctcaggtgtgtgtaaagggcaggcggccttcggcgccccctgggaagtgctggggctggaggatgggtgctcacttgaagcccgtcctcacccaggcgagagttcacattggaggwgcgagggaaattgcacgaggcccgagccggggttctggctgagcgcaaggcgcaagaggccatcagakagcaccaggagctgatggcctggaaccgggaggagaaccggagactgcaggaactacggtgcgagaggcgcggggctgggtgggctgggctaggctcacccacggccccgctcattctcggctcctttttcctcgcaggatagctaggttgcagctcgaagcacaggcccaggagctgcggcaggctgaggtccaggcccagagggcccaggaggagcaggcttgggtgcaactgaaagaacaagaagttctcaaactgcaggtgggccgaggtcgtgaggaatgtgggtattggagattccggtgagggaggctctggggagagcagcacagggtgtcaagtgaccagtcttcaggaggcttctctctctgctctgcacacacagagtgcctcccagacaatggtcaatgaaaggttacaggctagtattgccgtgtgaaacttgaaggtcagggaaaccataaatgagaatggagctgtttttattgtgtaagggagagtgacaaggttgagagagtccaccaccccgcacctccccccgcccccaatcaggttgtcacgattcgattcgttcttgggttgtggctgagagatctgatgggtaattgtccgaggaagagggatataatggttgaggtcacctagtacagttgtgctggcctattggtgggacactcaaaggggccctgggctcttttgacacccttcttaaggtgggctagagacagtaagttatgcaggcagccagctctgagagatcccacgtagctaacctttctcttcccgtaggaggaggccaaaaacttcatcactcgggagaacctggaggcacggatagaagaggccttggactctccgaagagttataactgggcggtcaccaaagaagggcaggtggtcaggaactgagaacagaggcctctcaggcccaaataaggacagtgcttgcctagggactggatattggggtagaaattggtgcatcccaggagggtggcacagcyttgtccagagcagccyccattcattctagatttggcamcaggtatagtacctgttstgacaccacatacaaactccggacagcattaaactctgggaagttcctatcacacagaagatcagactggactgtcccctmtagaagccaagagctgtctcctgagtttcttggaatagtgtgagcccaatgtttcctgcttttataaataaactattggaaagcaaarmmwwwwrwwawrwrgcttgctttttcttgttgtagaataagtttatttgtcccagttatttgggtcttaaggttattagccaaaagccagttcacctaactgagccaggagttagttatctgctttgctcaatcctgggctttgctgggtagggtcaggtgtgtccaaggtccagaaagcaaaaagggtgccccgtttctcctgggaaggcttccccgtcagtgatttctgtaaccggaccctgccctgacacagcgtcattggactacccagcagacagtagactccactctaaacccgcttcttgcggtcagttgctgtccttcagtgtgtgtaagcagtggccagacagcacccttgggtgtcatttcaagactctctcaccttggtctgctttacgtttggtttgatttggtttgttctggtttttgagacgaggcctttcactggaacctggcactcagtatttagactgcccagccagctagcctcagagaatgcatctgcgtatgcttgcctggcgctggaattcggtgcacatggctttgatgtgtaccggggatcagacacagatgtttcatgagtgcagtgcatgcctgttagtggtagagctc

SEQ ID NO: 1005 - DNA, 2067 bp, Rattus norvegicus
  misc_feature (1424)..(1424): n is a, c, g, or t
ttctttttgaacctcggggacagccacaccgtcccctcctccgcccgcctccctcgccgcctccagcgccctccccgcggaggtcccccccccatcccgcctccctgcgtcctccgggccgcaccgcccgggccggcgccgagcgcggggaagctggcgggttagggcgccccgctcctctgctattccctcccccgtcccggctccgcgaggccgcaggtcgccgcccgcgagatgatgcaggacgtgtccagctcgccagtctcgccggccgacgacagcctgagcaacagcgaggaggagccggaccggcagcagccggcgagcggcaagcggggggctcgcaagagacgcagcagtcggcgcagcgcgggcggcagcgcggggcccggcggggccacgggcgggggcatcggaggcggcgacgagccgggcagcccggcccagggcaagcgcggcaagaaatctgcgggcggaggcggcggcgcgggcggaggcggcggcggcggcggcagcagcagcgggggcgggagcccgcagtcgtacgaggagctgcagacacagcgggtcatggcyaacgtgcgggagcgccagcgcacccagtcgctgaacgaggcatttgccgccctgcgcaagatcatccccacgctgccctcggacaagctgagcaagattcagaccctcaaactggcggccaggtacatcgacttcctgtaccaggtcctgcagagcgacgagctggactccaagatggcaagctgcagctatgtggcccacgagcggctcagctacgccttctccgtctggaggatggagggggcctggtccatgtccgcgtcccactagcaggcggagctccccaccccctcggcaggccggagacctaggtaaggaccggctcccgggatcaatccggccaggccgcgggtccctggtcacctcgccacggcactgggtatccccccactgtcctcgctgaccttcacctagccaggcaccttcacctcattccacgcgcgtccctgccaagcaattaagtccctacaggggaaacaggttcgggggtcggggagactgggtccaggagaggtgtgtgtgtgcttgcgcgggagtgtgcatgacagaagacagagaaaatcaagagtaggggccttgtgccctgaacgccattctccaaccccctttctttcttctttaaaattcccttcttaaaacaaatgtttccaaattccaccccctcctttccgcccacccacttcctcttgcccttgggctgaaatccttccaggttggtcagcgaatattctcgctggtagtgataacagggcttagcggtcctagaaaacagccaataaccaactttcccccctctgggtttttgcagatgtcattgtttccagagaaggagaacatggacagtctanagactctggagctggataactaaaaataaatctatatgacaaagaywykmkkggaaattagaagagcagagaccaaatttcacaagaatcagggcgtggggcacacttttaaaagagaaagcgagacaggccsgtggacagagattcccagaggcaacggcatcaccctcacacctctgcattctgatagaagtctgaacactcgywygkgtgtcccccccttttgacgaagaatgttttatttttatttwtcatgcatgcattctcaagaggtcttgccaatcagtcaytgataggaaagacatccttgtggactttctccattttaaaatggtaacaatcagaggaattttaacaacgcctttagaaataaaaacgctgggatcaaactggcctgcaaaatcataagtcagtgaattcctkmarmmssrkrswtccwctagwwskararcgrmmrmcacmgmrtasaraaacracattctatttatttattgatgacccatggtaaaatgcaaatagatccggtgtctaaatgcattcatatttttatgactgttttgtaaatatcttttgtatattatttttctgcaataaataaatatgattgaaaaattttaaraamwwwaaaaaaaaaaaaaaaaaa

SEQ ID NO: 1006 - DNA, 1927 bp, Rattus norvegicus
ggatatcctggggatccaggtctcaatggtcctaagggtaacccagggttaccaggaccaaaaggtgatcctggagtgggaggagcccctggtcttcgaggtcttgttggccctacaggacctaaaggagtgcctggacacaatggtgaggcaggtccaagaggtgaacctggaataccaggtaccaggggccctattggaccaccaggtatcccaggattccctggatctaagggtgacccaggaaagccaggtgctccgggcccagctggaatagtaactaagggcctcaatgggcccgctggtcctccagggcgtcctggtccaagaggtcatactggagagcctggtctcccaggtcctccaggacccccaggacctccaggacctcccrgccaagcagtcatrcctgatggcttcacaaagagcggacagagacccaggctttctgggatgcctcttgtcagtgctaaccagggggtaacaggcatgccggtgtccgcttttactgtgattctttccaaagcttacccagcggtagggtgctcccatcccatttgatgagatyytgtacaacaggcagcagcactatgacccaagatctggaatctttacctgtaagatcccaggcatatactatttytcctatcacatccatgtgaargggactcacgtttgggtaggcctgtataagaayggcacgccyacaatgtacacgtatgatgagtacagcaaaggctaccttggwtcaggcttcagggagygcratcatggagctcacggaaaatgaccaggtgyggcwcsagktgyssartgcggaatcgaayggmctctactcctctgagtatgtccactcgtccttctcaggattcctagtggctcccatatgaacamttcctgtcaagctcatcctaatcccccgcttagaacctcccaccccattccatcgcccgatcccgccctggtgatgcatatggaggtaggctaaaagtaatgtgaataagctttctaaagtgcactccgggaccaggtttcctcctgtaagagtgagcagcaatagtgggtatgtgaggatcctcccgaacactcggcagttctaaggccctgggtgcagggtcgggggtgctcctgtyktyyywtyyttatttaaatttcttaacgtaagtttaaaaaaaaaacaaaaaacctcccrmaaactgaaataaggctctagcgcatcatgaatctcgttttaagaactcaacattcctttttcaaaaaagtccaattttaataatatgagaatatctcggaaacatgcaggagatatcatgtcactttatattactttaaatacttgaatattcaaattcaaatgacactgtccaccttaggatatttctgatggtgcatcactccatggttcacacaaccccttacatcgagataaagtcagaygsmcgsawagwtttttttgaagtgctcctaagaaactaaaacactgtagtgaagttaatttcaattacaaggtgctttaccacagccatttcgagcttttctgcaacggcaggaagtccacgtacctggggcaacttagaaaaagtccacatacctggtgcaacttagaaacargtgtctgacttactcttatgtcagcaacgcagtattactatggtataatttctkgcatctttgtcaaatgattttaatgggcttatacgacatcagaatagacactctgtgtgccttctattccactgkaagtataaattaacattaagcttttcaaagtcagactgaaaacgaaaagacattatttatttatgctctgtactgtatttttaccgttactgtttaaaactgggaagctgtacctcayttactaaagcacgcagtatttaatytacttggtattasgagataataaaacaactggaataccctcgtg

SEQ ID NO: 1007 - DNA, 7688 bp, Rattus norvegicus
ggggagagggagggagggggcgctggctgcaaagcacaggtctctgcatccccagtgcctgctgctggctcgtgcacagaacaaacggagagaacctgatctcctctttaagccccttcaagaaatagcaaagcagctgccttggttattcctccggctgatttcttctgcttccctggaagatgcgtctggccgagacaggcctggggacctccttcaacacgctgctgcctctgccgccgccaccaccacccgggccacttactttctttgctctgggcggtggcatcctggccagccctcgggtcccttgagccgggacccctgctcccccagcggcctgggcagtccctccagcatccatgactccttcccctggctggctcccgcgcccgccgcccccctccacatcccactgtgccccgctcgcccatcctgctacccccccacccccagctcttcctgcaccgagctgctgcccaggctcctccatgctgcctggatctgagctgggtgattaattggctgtgatgatgagcgtccccggcggtggagcagccaccgtgatgatgaccggttacaataatggtcgctatccccggaattctctctacagtgactgcattattgaggacaagacggtggtcctgcagaagaaagacaacgagggctttggatttgtgctccgaggggcaaaagctgatacccccattgaggaattcacacccacgccggcatttccagccctgcagtacctggagtccgtggatgaaggaggggtggcatggcaagccggactaaggaccggggacttcttgattgaggttaacaatgaaaatgtcgtcaaggtgggccacaggcaggtggtgaacatgatccgccagggagggaatcacctcgtccttaaggtcgtcacggtgaccaggaatctagaccctgatgatacagccagaaagaaagctcccccacctccaaagcgggctccgaccacggccctcaccstgcgttccaagtccatgacagcggaattggaggaactcgtggataaagcctcagtccggaagaagaaggataaaccggaagagatagtcccagcctccaagccctccaggactgcagagaacgtggccatagaatccagggtggcaaccatcaagcagcggcccacaagccggtgctttccagctgcctctgatgtgaactccgtgtacgagcgccaagggattgctgtaatgacgcccacggtccctgggagcccgaaaggcccatttctgggcctccctcgaggtacgatgcgaaggcagaaatcgatagacagcagaatctttctatcagggataacagaggaagagcggcagtttctggctcccccaatgctgaagttcacccgaagcttgtccatgccagacacttctgaggacatcccccctccgccacagtctgtgcccccctctccccctccaccttcccccaccacatacaactgtcccaggtccccgactccaagagtctatgggacaattaagcctgcgttcaaccagaaccccgtcgccaaggtgcccccagccaccaggtctgacactgtggccaccatgatgcgggaaaaggggatgttctacaggagagagctggaccgcttttccctggactcagaagacgtctacagccgcagccccgccccacaggctgccttccgcaccaagcggggacagatgcctgagaacccgtactcggaggtgggaaagatagccagcaaggccswckakgtccctgccaagccagccargcggaagggcatgctggtaaagcagtccaacgtggaggacagccctgagaagacgtgctccatccccatcccaaccatcatagtcaaggaaccctccaccagcagcagcggcaagagcagccaggggagcagcatggagatcgacccccaggccactgagcccggccagctgcggccagatgacagcctcaccgtcagcagcccyttcgcggcagccatcgctggggccgtgcgtgaccgggagaagcgtctggaagccaggaggaattccccggccttcctctccaccgacctgggagatgaggacgtgggtctggggcctcctgctccccggatgcagccctccaagtttcccgaggagggtgggtttggtgatgaggatgaaacggaacagccgctattgcctacccctggagcagcgcccagggagctggagaaccacttcctaggtggtggtgaggctggtgctcagggggaggctgggggacccctgagttccacatccaaagccaaggggcctgaaagtggcccagcagccgccctcaagagcagcagcccagccagccctgagaattacgtgcacccactcacggggcggctgctcgaccccagctccccgctggccctggcactgtccgccagggaccgagccatgcaggagtcccagcaaggacacaagggggaggcccccaaggccgaccttaacaagcctctytacatcgataccaaaatgcggcccagtgtggagtccggctttccaccggtcaccagacagaacaccaggggtcccctgcgaaggcaggagacagagaacaagtatgagacggacctgagcaaggaccggagggctgacgacaagaagaacatgctgatcaacatcgtggacactgcccagcagaagtcagccggcctactgatggtgcacacagtggacattcccgtggcggggccacccctggaggaagaggaggacagagaggatggggatacaaagccagaccactcaccctccacagtgccagaaggcgttcccaaaaccgaaggtgctttacagatctccgctgccccggagcccgccgctgcgcccggcaggaccatcgtggcagcgggctccgtggaagaggcggtaattctgccattccgcatcccccctccccctctggcgtccgtggacttggatgaggactttcttttcacagaaccattgcctcctcccctggaattcgccaatagttttgatatccccgacgaccgggcagcttcagttcccgctctggctgacctggtcaagcagaagaaaagtgacacccctcagcccccttcgttgaactccagccaaccagccaactctacagacagtaagaagccagccggcatctcaaactgtctgccctcctcattcctgccaccccccgaaagctttgacgcggtcaccgactcggggatcgaggaggtggacagccggagtagcagcgaccaccacctggagacaaccagcaccatctccacagtgtccagcatctccacgctgtcttcagagggcggggagagcatggatacttgcacagtctatgcagacgggcaagcctttgtggttgacaagcccccagtacctccaaagccaaaaatgaagcccatcgttcacaaaagcaacgcactttaccaagacacgctcccagaagaggacacagatggctttgtgatccccccacctgcacccccgcccccgcccggcagtgcccaggccggtgtggcgaaggtcatccagccaaggacctccaagttgtggggtgatgttacagaggtcaaaagcccaattctctcaggcccaaaggcaaatgtcattagtgagttaaactccattctgcagcagatgaacagggggaaatcggtcaagcctggggaagggctggagctgcccgtgggagccaagtcagctaacctcgctccaagaagcccggaggtcatgagcactgtctcaggtacacggagcacgacggtcaccttcactgtccgccccggaacctcccagcccatcaccctacagagccggccccctgactatgaaagcaggacctcaggaccgagacgtgccccaagccctgtggtttcgccaacggaattgagcaaagagattctgcccacccctccgtctgctgcagcagcctctccctcccccacactctcagatgtctttagccttccaagccagtcccctgcaggggacctctttggcttgaacccagcaggacgcagcaggtcaccatctccttcaatattgcaacagccaatctcaaataagccttttacaactaagcctgtccacctgtggacgaaaccagatgtggcagactggctggaaagtctgaacttgggtgaacacaaggagacgttcatggacaatgagattgacggcagccatctgccaaacctccagaaggaagacttgatagatcttggggtgactcgagttgggcacaggatgaacatagaaagggctttgaaacagctgctggacagataagggtggctgtcctgggccttcacagactcctttcttataagtagagatgggcttatgttgaaatgtgtggtggccaagcagaggctgacagcaccaatctctggtctgtgggtttgtctctgggtacccaaagaagtgctgtggatgtcccttggtgtggccaaaccagggcctcaaaacccagctctctgtgcagatttcttgggtggcttctgtccaaagggacagtaagggggtgtctgtcctggtctcagaggctgccatagatggcatgtgggaccctctcctcctgtggcagataccagtgtactccagatacctcccgaggcctccctcctctgccttctgggcaactctcacccctcagccccggaacacagcctttcttcaggcctttggcctctgggtgggttcgttggctcggtccctcccctgtgcttggctctcagtgagcagccccaggtggagccctgcctgagccagaccttagagaaacactgtcccacccacctctagtctgactcttgtgacacgcatctgaacttctttggccccaaggtccttggcagtggtggctgtgtggacaggatcgtgcccagcttgcataacttgctttctttacttctgcaaactgattagcataattccagggtggccaaactgaagtcacacggagttagtcaaagcacaaagtcacgatcctgaggaggagggaggcctggccatagagccagccaatgtgtggctgcccaagcacacaacctcctccagggcaaggacaggtgtctgcccagagcacctggccagaagggagaggtgggggctcttgaaatttactctaattggatgtctgcagagctccacagaggtcagaacaggtgagcatcttcttttacaaggacaagaagacccaaggtttgggggaagcacggttgccatagagaagctgttgtcctcccctggtggcgggtagaatgtcacgcccttcactgcatcaggccacatgtgagcatcctgataaggcagcacttcggctctcagaggccaagaaaggtggaactcaggggcctttctcccttctctcagatagcggggatcccaccggcttgtcttaacatctggatctcagagaagcctgtggtcaggacctggtggagaacagaaagtggggcacaggctgtggcgaagtttagatgtgtgcggaaaggaaggtggggagcatcctggaccaagcctcacctcaggcccggccacctgagcctaccgttcttgccccaagatctctccctctaatacctctaacatcccagggaggtcgatcggctgcacacagccaccacgcagccagctaggctgccgcaaccccctctcccccacactcagaggagactagaatgtcaggtgatggttttatcatttcagaactagcccagcccatctctaattataaaacatgtttttccttttttttccctccacttatgctcacagccgtgtgtctgacgaggcctggaacagcactacaatgaataccataaagtttagcaatttaaaaaaaaactttctttactgcaagtttaaatacgtgtacagatagttcataagcacaatatcttaagaaaaaagtggccggtctaccgggcagcccctgtgccacctagtgctggaaagctaaaggaaaaggggttgtggtttaacaatactgtttccttgggacaattatagaagcaaccttttcaaaattacccttccctggccacttcctcagaacctgcaacacggagtctttcttcagcttttgccacaacttcatcactgaagggcaattatttcgtcaaaaggattagaatccacgactccacagtttctccaacaacaacagacagacatgcatattcgtgcatgcgtgcggacacacacacacacacacacacacacacacacacacgcacacaccctctcatgcatgcaccacaacccttgatatggagaccagggctttgaaccttattctgtcccccaaaccctttgcaggtcaaccccaacttctgaatcgtccaatgagctggtaccaggtgaccgttgagcactttgctctgggttctgtcattccccacagcgaggcgaatgaatcagtaatgctccagagatgttgagtccagacactgcgggtagccactgaagagttcagagagtgtgaaaatgtggcccgccactaatttgtcttccaatgggtggttcttcgaagtcctctcagtgtgccacagtactaggtccctttcctgtgcctctggttggcattaacctctgtgctcaagtgccaaggcagatgctaggcaggagagacctggtggcttgggggcccgctgaacgtaggcagcaggtgacaggctgcggactgccttctatagacttcaagccacaggcatccaggcagaagcaagctgactgccagccccgggagctgataggccagctttgctttgcagtgtctggtcacagaaacacagctggacctatcagaactgacccctaatcatccaaacacacatttgcctcgatagtgggtctctgtctctgacagttgatttttgcgcagaaagcaatagtccctcattgaagttgcagcccactgtccccccctcccatttggaacatgtcaggaccaggccctaccccaggaccctcctcagtggtgaatcagatgttaaactgctcataaggaccatgttaccactattccaggttttaagatcaacttttgttatatactgtaatttaataactgcataaatttacatgcctagatttctgtaatattgtgtatacaaaaccaaaatctctcaagctgtaaattgtgtatacccgccaggatccccattttggggcatccatgcgcattttagatttaattcatacaattaaaaactcaatgtgactgctgacgtgctgaaactttacataagaattatttgtgatactttagttaataaaatggtgaggttttttttttcctgagttattgaacaagcaaacattacccagctgacctggcaatgactttttgtgtgtgtgcgggtagggggccacaaatattgatttttttttcctcccattagcaattttgggttttaaatactaacatggttcacactatagtttgtgtgtaacaacacatgtcacattatctttgttgctgttaattttgtgctttttttttagactttatttatttagaaggagagagagaaagagagagggagagagagagggagagagagcgagagagaaagttcctgtactttgcacttttccccccaaatccttcaatctcttgtatggcaaccaaaattaagtaaaaaaaaatatatataaaaa

SEQ ID NO: 1008 - DNA, 1081 bp, Rattus norvegicus
gcggccgccatcttccagtcccgggtagccagcgccagtsggagccagcgcgagcsgccgccgctgtcactgcctctgccaagtcctctgcccgctacccccgccatgtcggctaccgctgccaccgtcccgcctgccgccccggccggcgagggtggcccccctgcacctcctccaaatcttaccagtaacaggagactgcagcagacccaggcccakgtggatgaggtggtggacatcatgagggtgaatgtggacaargtcctggagcgrgaccagaagctatcggaactggatgatcgcgcagatgccctccaggcaggggcctcccagtttgaaacaagtgcagccaagctcaagcgcaaatactggtggaaaaacctcaagatgatgatcatcttgggagtgatttgcgccatcatcctcatcatcatcatcgktkastggagcaggagtggccagggccctttccctggagaagtagagggtttccctgtggggtcggggctttgaaggtcattgacctagtttttactcttctaccaaaacacattttgctgctattggcagttctgactcacgtagagccccaacttgagtgttatagccttattttcccttgttatgggtagttctgggtaagattttggggataggaatactgggtagtccctggtgcctttctaggaaccctttgagcctaaaagctcagtctggggtttctaaaactggagagtagaaaacaggtcaggctgagggtcttgaactccaatcacaggatacacttactccactatttgaaagctatcgtcacatgccagtgccttaaaggtttgatacccctttgtgcgatcgtggcgtttaagggatctcaatacccacttgtgcagtccctttgaagaaactgaggcagagagggaagggatgtcagtgggggactggggaagtttgggaacagggccaggcctgatacactgctgtctttctcttccttcccttcccccaccccctacccctcctcatgccctctctctccacagtttacttcagcacttaagtccctgaggagtctgccctgcct

SEQ ID NO: 1009 - DNA, 1699 bp, Rattus norvegicus
  misc_feature (1280)..(1280): n is a, c, g, or t
ccctgggacccgtaggacctccakgttccaatggtcctgtgggggaacctggaccagaaggtccggctggtaatgatggtaccccaggacgggatggtgctgttggagaacggggtgaccgtggagaccccgggcctgctggtctaccaggttctcagggtgcccctgggacccctggccctgtcggtgcaccaggagatgcaggacaaagaggagagccaggttcccgaggccctgtaggaccacctggtcgagctggaaagcgtggtttacctggaccacaaggacctcgaggtgataagggtgacaatggagacagaggtgacagaggtcagaaaggccacagaggcttcactggcttgcagggtcttcctggccctcctggtccaaatggtgaacaaggaaktgctggcattcctggtccttttggcccaagaggtcctccaggaccagtaggtccttcaggaaaagaaggaaaccctgggctacttggaccaattggacctcctggtgtgcggggaagtgtaggagaagcaggaccagagggccctcctggtgaacctggccctcctggccctccaggtccccctggtcatcttactgctgctcttggtgatatcatgggacactatgatgagaacatgccagatccacttccagaatttacagaagaccaggcagctccagatgacacaaacaaaactgaccctggagtccatkctactctgaagtctctcagtagtcaaattgaaaccatgcggagtcctgatggttccaagaagcacccagcccgcacttgtgatgatttaaagctttgccatcctacaaagcagagtggtgaatattggattgatcctaaccagggatcagctgaagacgcaatcaaagtttactgcaatctggagacaggagagacatgcatttccgcaaacccagccagtgttccacggaaaacgkggtgggccagcaaatcccctgacaataagcccgtgtggtatggtytcgacatgaatagaggatytcagttcacatatggagattacaagtyccctaacacagctattactcagatgacmwtwckrckcmytwtaksraawkwrgccyycsagamcmwkamttmkryaygwrrgaacactgktggttatatggmtgatcaaactaaaaacctcaagaaagctgtggttcttaaaggswcaratgayttagaaataaaaggagaaggmamsakmmgaytcasatayasbgwwyttsrmsmtacswgkycaargcrmrwkggmrmnrkrggmaagacwgtctttgmmtacagaacacagaatgtggsccgcttgcccatcatagatatcggtyctgtggatattggcaatgcwgaccaggaatttggytttgaaattgggccagtttgtttcatgtaacagaagtccagargtatcgagactwccatcaatgaccamytttacaaraastwractgdttgaagttcatcctgagactcttgaagtaatggctggtcctgcatcagctttrtacatatgatctgaagtgcctgaccaccttatcyttcagaatatttattttacttacaattytcaagtttaattgacttaatttttttcaatatggcagtttagattaaaacaacgacaatgaccacctttacaaaaagtaaaytgdttaaaaawwwaaaaaaaaaaaaaaaaaa

SEQ ID NO: 1010 - DNA, 2542 bp, Rattus norvegicus
cacgaggcttcwgmcsktgcakstrtycwgsttamcatstyacwgascmrkactgmwwrtgmwyaaaswytatwctgractaaaccttcttccctgagacatcatggccctggccccagaattgagcagacagacaaaactgaaagaggtcgcagggatcccactgcrggmtycaactgtygacaactggagtcagattcagaccttcaaggcgaagccagatgacctcctcatctgtacttaccctaaatcagggacaacatggattcaagaaattgtcracatgattgagcagaatggggatgtagagaagtgccagagraccatcattcaacaccgacacccttttattgagtgggctcggccaccccarccwtcaggtgtggacaaagccaatgcgatgccagctccaaggataytaaggacccatcttcccaytcagctgctgccaccgtctttctggacaaacaactgtaagtwcctttatgtggctcgaaaygccaaagactgcatggtttcctwctaccacttctacagratgwgccaggtgctccccratccaggcacctggaatgagtattttgaaaccttcatcaatggaaaagtaagttgkggatcttggtttgaccatgtgaaaggatggtgggaaattcgagacagataccagattctcttyctcttctatgaagayrtgaagagggacccaaagcgtgaaatccagaaggtaatrcagttcatgggcaagaatttggatgaagaggtcgtggataaaatagtcctggagacatcrtttgagaaaatgaaagasaatcctwtgacaaatykttctacartccccaagwctrtcmtggaccagtccatttcccctttcatgagaaaaggaaytgtgggtgattggaaaaaccactttactgtrgcycagaatgasaggtttgatgaaatctatragcaaaagatggrcggaacctctctaaacttctgcatggaactctgatcaagaagrasatctaagacaggagtctgtctgcaagcctcaatycagccaaaggaagmtcwgaaagcaamctgtaaakgccaaggaytgtgrcwccdactctgtkatwactracatcacwttacmattcayaaaakcatmatgtyyagtrtatacttyctccamtmttcagtacaaatcagtaasayrgcttaayragctartaaataaacayataamtwraactctagtagwatacawwwwawrawramatyyttctagraggtatarccwrkatwctaactctgaaayacacatcawtagtgatcatcwaaawyaaartaywwgaaatcctaaawraawrwamaraaawkcctaatgtctttctgctcaatcggtatttttcatggttacagtgggaagactcagtttgtagacaacttgttgcaacatgctcactggaacattttctacctggtaggaggaaattgagggaaggacttcaaggagatgtcagaaatccaaatcttaataaacagaatcctagttctggagcataaaagaaacagaagaaaggcatgagggtgacctttggaaagcacaaattgtgtcttgaaaaaagcagaatggatgcttggtgttcaacttgcagccagttgagttttgatctcctgtcatctcttctgaggaacagcttgtacttttgcccactttagcagagtccatctgcatttgcttgccagcatacttccttccacctcccactcgctccatgtcttgggcatccttttactcccagtaaccaggcaatatggagaacacagcatgttgcacgatggctcggaagacggaaaggcaaacacgtttcgggtcacaaattctcagcacttaccctttcactttagttgcagatgtcagcactgctaagctgagatcagcaggagcagcctgtggtatgagcaggatatatatgtgagttcagggtacctagcatgagctagaatgacatttgctttctatcactcaaatgtacactttctcctaaatgttgaggacgtgggcacagcatgtgttactaccagcaagagctatgagaaggtgtagtagaagttagtggatggaagctaagaaactggaacatggcctagaagaraatgagtgctcctggccctgggtcttccyttcccttgtttcttggccatgaaaaattcaataaaatgaggtggttagtttwrctttgccatttaccctcaccatgatattctgtccatctctccacagaatgtaaattccaaacccaagagctaaaataaagcttctgtctttataagttgctttccccagatattgttataatgaaagaaakctcactaatacattcccaatgatgtggttataaaatactagaaaagtctgaaattttgttgaacttatagacaatcgcttggttactgccgaaatctaaccatatgtgtatagttaattaacaatgtctattatattaaaaaattatatcctaattgtattgtaaaaaaaaaaaaaaaaaagcggccgctcgagcatgcatct

SEQ ID NO: 1011 - DNA, 2739 bp, Rattus norvegicus
ctgggacacagttgtccaggtgctgttggccagtcccaacatggaccataaggaaataatccttctgtttctcttgtttctgaaaccaggacaaggggactcactggatggctatgtaagcacacagggggcttcactgcatagcctcaccaagaagcagctagcggcaggaagcatagcagactgtttggccaaatgtgaaggggaaacagacttcatctgcaggtcattccagtaccacagcaaagagcagcagtgcgtgatcatggccgagaacagcaagacttcctccatcatccggatgagagatgtcatcttattcgaaaagagagtgtatctgtcagagtgtaagactggcatcggcaagggctacagaggaaccatgtccaagacaaagactggtgttacctgtcaaaagtggagtgacacgtccccccacgtacccaaatactcccccagcacacaccccagcgagggactagaggagaactactgtaggaacccagacaatgatgaacaagggccctggtgctacacaacagacccggaccagagatatgagtactgcaacatccccgaatgcgaagaggaatgcatgtactgcagtggagaaaagtacgagggcaaaatctccaagaccatgtctggactcgactgccagtcctgggattctcagagcccacatgctcacggatacatccctgccaaatttccaagcaagaacttgaagatgaattactgtcgcaaccctgacggggagccgcggccctggtgcttcaccacagaccccaacaaacgctgggaatactgtgacatcccccgctgcacaacacccccacccccaccgggcccaacctaccaatgtctgaaggggagaggtgaaaattaccgagggaccgtgtctgtcactgcgtctgggaaaacctgtcagcgctggagtgagcaaacacctcataggcacaacaggacgccagaaaacttcccctgcaaaaatctggaagagaactactgccggaacccagatggagaaactgctccctggtgctataccactgacagccagctgmggtgggagtactgtgagattccgtcctgcgggtcctcggtatcaccagaccagtcagattcctcagttcttccggagcaaacacctgtggtccaggagtgctaccagggcaatggaaagagctatcggggcacatcgtccactaccaacacagggaagaagtgccagtcctgggtatctatgactccacatagtcactcgaagaccccagcgaacttcccagatkctggcttggagatgaactactgcaggaacccagataatgaccagaggggcccttggtgcttcaccactgacccgagcgtcaggtgggaatactgcaacctgaagcggtgctcggagacaggagggggtgttgcggaatcagccatagtcccccaagttcccagtgcgccaggcacctctgagacagactgcatgtatgggaatggcaaagaatatcggggcaaaacggccgtcactgcagctggaaccccctgccaggaatgggctgcccaggagccccacrgtcacagaatcttcaccccacagacaaacccacgggcaggtctggaaaagaattactgccgaaacccggatggggatgtcaatgggccctggtgctatacaatgaaccccagaaaactttacgactattgtaacattcccctttgtgcatcattatcgtcctttgaatgtgggaagcctcaggtggagccgaagaaatgccctgggagggtggtgggtggctgtgtggccaaccctcactcctggccctggcaaatcagccttagaacaagattttctggacagcacttctgtggcggtactttaatatccccagagtgggtgctgactgccgctcactgcttggagaaatcttcgagacctgaattctacaaggttatcctgggagcacacgaagaacgaatccttgggtcagatgttcagcaaatagcagtaaccaaactggtcttggaacccaacgacgctgacattgccctgctgaagctaagccgcccagccaccatcacagataatgtcatcccagcttgtctgccatctccaaattatgtggttgccgaccggacactgtgttacatcaccggctggggagaaacgaaagggactccaggtgccggccgtctcaaggaggcccagctgcccgtgatcgagaacaaggtgtgcaaccgcgctgagtatctaaacaacagagtcaaatccaccgagctctgtgccgggcatctggctggtggcatcgacagttgccagggcgacagtggaggacctctggtttgcttcgagaaggacaagtatattttacaaggagtcacttcttggggtcttggctgtgctcgccccaataagcctggtgtctatgttcgtgtttcccggtacgttaattggattgaaagggagatgaggaatgactaattgggtgggaggcagaacaaaactactaaatatggggaggggattagggcgcttgaaaaaaaacctgacagcaatcaaaccaaagacacyacactggaccactacttcctgtcacccctcagcycctccctctttttgtattattgtgggtaaaattttcctgtccctggacttctggattttgtgacaatagaccatcacttctgtgacctttgttgaaaataaactcgatacttacttwrraaaaaaaaaaaaaaaaa

SEQ ID NO: 1012 - DNA, 2849 bp, Rattus norvegicus
ccgccatgggctgctgcagctccgcctccgccgcgcagagctccaaacgagaatggaagccgttggaggaccgtagctgcacagacataccatggctgctgctcttcgttctgttctgcattgggatgggatttatttgtggcttttcagtagcaacaggtgcagcagcaagactagtgtcaggatacgacagctatggaaatatctgtgggcagagaaatgcaaaactggaagcaatagcgaacagtggcctggaccacacccaccggaagtatgtgttctttttggacccatgcaatctggacttgataaacaggaagatcaagtctatggcactgtgtgtagcggcatgtccacgacaggagttgaaaaccctgagtgacgtccagaagtttgccgagatcaatggttcagcactgtgtagctacaacataaagccttccgagtacactctgactgcaaaatcctctgccttttgccccaaactaccagtaccagccagtgcacctatyccattcttccatcgctgtgctcctgtgaacatttcctgctatgccaagtttgcagaggccctgatcacctttgtcagtgacaatagtgtcttacacaggctgattagtggagtaatgaccagcaaagaaattatattgggactttgcttgttatcactagtyctgtccatgattttgatggtgattatccggtatatctcaagagtgctagtgtggatcctaacgattctggtcatcctgggttcactaggtggcaccggtgtactatggtggctatatgcaaagcagagaagstcccccaaagaaacagttattcctgaacagcttcagatcgcggaagacaatctgcggscgctcctcatctatgccatttctgctacggtgttcactgtcattctcttcctgatcatgctggttatgcgtaaacgcgtcgctctcaccatcgccttgttccacgtggctggcaaggtcttcatacacctgcctctgctagtcttccagcccttctggactttttttgctctcgtcttattttgggcatactggataatgacacttctcttccttggcactactggcagtgctgttcagaatgaacaaggtttcgtggagtacaaaatctctgggcctttgcagtacatgtggtggtaccacgtggtcggcctgatttggatcagtgagttcattctcgcctgtcagcagatgactgtggcaggagctgtggtaacatactactttacaagggataaacggaatttgcctttcacacctattctggcatcagtgaaccgccttattcgttaccacctcggtactgtggccaaaggatccttcattatcaccctcgtcaagatccccargatgatccttatgtatatccacagtcagctcaaagggaargaaaacgcttgtgcacgatgcatgctgaaatcctgcatttgctgcctttggtgtcttgaaaagtgcctgascyacttaaaccagaatgcatacacagccacagccatcaatagcaccaacttctgcacctcagcaaaggatgccttcgtcattctagtggagaatgctctgcgagtggctgccatcaacacagtgggggacttcatgttattcctaggcaaggtgctgatagtctgcagcacgggcctggctgggattatgctgctcaactaccagcaagattacacagtgtgggtgctgcctctcatcatcgtctgcctctttgctttcctagtcgctcattgcttcctgtccatttacgaaatggtagtggatgtgttgtttttgtgttttgccattgatacaaaatacaatgatgggagcccaggccgagaattctatatggacaaagtcctaatggagtttgtggaaaacagtaggaaagcaatgaaagaagctggtaagggaggcgccgcggatgcccgagagctaaagccgatgctcaggaaaaggtgacctgtctctggggactggaagaatggactcaaaggaggctgtttacacaaggctctcccactcaccagctgttgagtttgtgaggaagacaggatcttattacttcaatggccgcgatcamgarggttctccaaccatatacagccaaatggatttactaccatggggctggctaattaatgattaattcaggggcawtttgatagtaatctgccttggcagccacatcytcaaacttcatgttgctttctcttctggccttgtcatgttgaggtcaagccctgctagtgggtgctggcttgaagtcagaactcacggggtgggggggaattctctgcgctcatctgtccyctckgaactctgctawttatagadtccacgtkgaytgytaaytattamtwaggggcctgctgcatgctaagcactgggatgggtgcmtgrcayrakrctgaatcctcmcacggccctgtaaagktgctttgtatcgctgacattttgmccatgatgaaatgagatgctcmsararawymtgtkttgtggktaaraycacmcagttgatargatcsgtattccmatttcagaggccctccactataacactatgctttgctcattcytgcyacaaagataactgccctgtagcatcccctgtgggtatcactccctgtctcaaattggggtgggtatggcggtgtatgtgcatgggaagtgtcttggggggagggttgtagaagcacagaggaatcacagaattattttytaagcgagataacactgtttgtttatggcccatggatcatatctccctgtccccacctatttttgtaaataaagttttatgggaacacaaccacawmmwwwawaaaaaaaaaaaaaaaaaaa

SEQ ID NO: 1013 - DNA, 3087 bp, Rattus norvegicus
tttaagaccattgtggacaaaatggccattgataagaaggttctggagatgctcccggggtcagccagcaaggtgctggaggccatcttacccctggtgcagactgaccctcggatccagcacagctcagccctctcctcttgctatagccgagtgtaccagagccttgccaaccttatccgctggtcggaccaggtgatgctcgagggtgtgaactcagaagataaggagatggtgacgactgtgaagggtgttatcaaagctgtgctggatggagtgaaggaactggtgaggataaccattgagaaacaaggccggccatcaccaacaagcccagtgaagcccagttccccagccagcaagcctgatggccagcctgagctccctctgacagaacgagaaatggagattctgaacaagacaagtgtgtcaccatccactgaactgctcccagactccaccagtgaagaggttgcgccccccaagccccctttacctggcatccgggtggttgataacagtccaccagcattaccacccaagaaaaggcaatctgctccatcccctacccgggtggctgtggtagcccccatgagtcgtgctgtcagtggctccagtttgcctgttggaatcaataggcaggactttgatgttgaatgttacacccagaggcgcctgtcaggaggcagccgctcctgtggtggtgaatctcctcgcctgtccccctgcagcagtacaggcaagctcagccggtcagacgagcagctgtcctccctagacagggatagcgggcagtgctcacggaacacaagctgtgaaacactagatcactatgaccccgactatgaattcctccagcaagacctctccaatgcagaccagacccctccacaggcagcctgtaacctcagcccactgccggagtccatgggggagtctgggcccccatttgttggctactctttccagctgcctctgggcagctgtctccagcaggatggacagcagacagatactccacctgcccttcctgagaagaagcgtaggagcgcagtctcccagaccacggacagctctggctgcagggtgtcctatgagcgacacccctcacagtatgacaacatctcagaagatgatctgcagaacccagcccagcctgtgtcctacccgccctttgctgctatcctgccctttcagcagggagcttcttccacccctgttgagtttgtgggtgatttcagtgttcctgagtcagccggtgacccagaaaagccacctcctctaccagagaagaaaaacaaacacatgctggcctacatgcaactgctggaggactactcagagccacagccctccatgttctaccagacaccgcagagtgagcacatctaccagcagaagaacaagatgctcatggaggtctatggcttcagcgactccttctgtggtagtgactccacgcaggagctggcccctccacccgctttgccccccaagcagcggcagctggcctcctatgctgcttcttccttctctgtctcccactgtgtccagcaaactaaagtggccttcacccccgaggacggcagtgccgctcagggcctcagtgtatccgtgtctaactcctttctcaaccggcacggcagcttgcctgtgccctcggaaccgccatctgggaaggacggacatcccagagatctttcggtcagcagtgcatctgggaaggacagcagagaaaatggggagaggtccccgaagtcactggatgctctggagtcagcccagtcagaagaagaagtggatgaactgtccctcattgaccacaatgaaatcatggccaggctgacactcaagcaagagggtgatgatggaccagatgttcgtggaggttcaggagacatcttactggtccatgctactgagacagacagaaaagacctggtcctgtactgtgaagccttcctgaccacctacagaaccttcatcagccccgaggagctcatcaagaagctgcagtgccggtacgagaagttctctccctttgctgacacattcaagaagcgagtgagcaagaacacattcttcgtgctggtgcgggtggtggacgagctctgcctggtggagctgacagaggagatcctgaagctgctgatggagctagtcttccgcctagtgtgcagtggagagctcagcttggccagggtactccgaaagaacattctggacaaggtggaccagaagaagctgctcaggtgtgcccattccgaccagcctttggcagccaggggtgttgcagccaggccaggaaccttgcatgatttccacagccacgagatagctgaacagctgacactgctggatgccgagcttttctataagatagagattcccgaagttttgctttgggccaaagagcagaatgaagagctgaagagccccaacttgacccagttcacggagcacttcaacaacatgtcctactgggtccggtccataatcatgttacaggagaaggcccaggaccgggagaggctgctcctgaagttcatcaagatcatgaagcacctgcgcaagctcaacaatttcaactcctacctggccatcctctccgcactggactcggcccccatccgcagactggagtggcagcgacagacctcagagggcctggctgagtactgcacgttgattgacagctcatcctccttccgagcctaccgggctgccctctcagaggtggaacctccatgtatcccatacctaggtttgatcctgcaagacctgacgttcgtccacctgggaaacccagactacatagacgggaaggtcaacttctccaagcggtggcagcagttcaacatcctggacagcatgcgctgtttccagcaggtgcactatgaaatccggagaaacgacgacatcataaacttcttcaatgacttcagcgaccacctggccgaggaagccctatgggaactctctctgaagatcaagcctaggaacataacaaggcggaaaacagaccgtgaagagaagacctaggacagctggtgtgaggatgctcaagcagccaggagagctggacgt

SEQ ID NO: 1014 - DNA, 506 bp, Rattus norvegicus
tgcgcagtgaagccaaacgactaaagacctttgagacctatgacacgttcagatcatggaccccacaggagatggcagcagcagggttttactacacgggtgtaagacatggggttcagttcttctgctgtagcttaatcctctttgtactagcctcaaggaaagttcccatagagagccacaggaaattacagaccccaatgtgagttcctctcgggcaaagatgttggaaacattggcaagtaggacatacgggtgaagagtccaagacgcgctgccgagaggtggcacagtcaggtacccatgaggaggaggccagactggagtcctttgaggactggccgttttatagccatgggatgggacatcaccactgtgtactctcagctgctggctttgtccttcccgggtccccgggcacatgttgcagtgtttctcctgtggcggaagcttgggcaactgggaagaaggagatgacccctggaaggacatgccaagtggttccc

SEQ ID NO: 1015 - DNA, 3001 bp, Rattus norvegicus
tatgtgccacagcaggcctggattcagaatgactctctccgagagaacatactgtttgggcgccccctgcaggaacattgctacaaggcggtgatggaagcctgtgccctccttccggatttggaaatcctccccagtggggacctcacagagattggtgagaagggtgtgaacctgtcggggggccagaagcagcgtgtgagcctggctcgggctgtgtattgtaactctgacatctacctcttggacgaccccctctcggctgtggatgcacatgttgggaagcacatctttgagaaggtggtgggtcccatgggcctactgaagagcaagacacggatcctggtcacccatggtatcagctacctgccccaagtggatgtcatcattgtcatgagtggcggcaagatctcagagatgggatcttatcaggagctgctagaccgggatggggcctttgctgagttcgtgcccacctatgccaacactgagcaggacctggcttcagaggatgacagtaagaatggtgtcagtggtttagggaaggagtcaaagccggtggaaaatgggatactggtgacagacgcagtagggaagcccctgcagaggcatctcggcaactcttcttcccacagtgtggttactaaccagcagcacagcagcacagccgagctgcagaagtctggagttaaggaggagacttggaagctgatggaagcagacaaggcccagacagggcaggtgaagctttccgtgtactggaactacatgaaggccattggcctctgcatctccttcttgagtatcttccttttcctgtgcaatcatgtatctgcactggcttctaactattggctgagtctctggacagatgaccgccctgctgtcaatgggactcaggagaacaggaattttcgactaagtgtctatggggccttgggcatcttgcaaggtgtggcagtatttggctattccatggctgtgtccattgggggcatctttgcctcccgtcgcctgcacctagacctgctacagaatgtcctgcgatcacccatgagtttctttgagcgtacacccagtgggaacctagtgaaccgattctccaaggagttggacacagtggactccatgatcccgcaggtcatcaagatgttcatgggttcactcttcagtgtcattggagctgtcatcatcatcctactggctacgcccattgccgcagwcatcatccccacccttggtctggtttacttctttgtgcagaggttctatgtggcctcctctcgacagctgaagcgcctggagtctgtcagtcgttcccctgtgtactcacacttcaatgagaccttgctgggggtcagtgtcatccgtgcctttgaggaacaggagcgcttcattcgccaaagtgacctgaaagtagatgagaaccagaaggcctactaccccagcattgtggccaacargtggcttgctgtgcgcctggagtgtgtgggcaactgcattgtgctgtttgctgcccttttcgcagtcatctcccggcatagcctcagtgctggcttggtgggtctctctgtgtcttactcactgcagataactgcatacttgaactggctagttcgaatgtcctctgagatggagaccaacattgtggcagtggagagactgaaggaatattctgaaacggagaaggaggcttcttggcaaatccaagagacagctccacccagcacctggccccattcaggccgtgtagagttccgggattactgcttgaggtatcgagaagacttggacttggttctcaagcacataaatgtcaccattgagggtggagaaaaggttggtattgtgggtcgtacaggagctgggaaatcatctctcaccctgggtttgttccggatcaatgagtctgcagaaggggagatcatcattgatggsatmaacatygcyaagattggcctgcacaacctgcgcttcaagatcaccatcattccacaggatcctgttttgttctcgggttccctccgcatgaacctggaccctttcagtcagtattctgatgaagaagtctggatggctctggagcttgctcacctgaagggctttgtgtcagccttgcctramrrgmwkaascwtgmgbsygcagaaggtggagagaatctgagtgtggggcagcgacagcttgtgtgcctggccmgggctttgctgaggaagacaaagattctagtgttggacgaggctacagcagctgtggatctggagacagatgaccttattcagtccaccatccggacgcagtttgaagacagtactgtgctcactawtgctcatcggctgaataccataatggactatacaagggtgattgtcctggacaaaggagaaattcrsgagtgtkstgcaysytvtgagcksctgcagcaaagaggcgtcttctatagcatggccaaggatgctggcttggtgtgaactgatctctggcatatctgatgargactgcarggccaggatcccagtgtccaggcatgagccagcaaccctggaaacctmcmctcbbsmgagaaaaaccaaaaawwraaaraaammmaaactaaaaggamgcaaaacacataaagcatcagtcacagtttgccccagcctggatctgacctcgaagaagcctgaagacagatgtgycccacttcaaacacgtctggcttctggcaccacttgtgaggctccctgaaagttcacccatgctcctgctgtatcccaaagcaaggccatgagcagccaaacacactagtgaccaaacacaagccactgcctcatgcctmttcagccacatttatagagccaagccagagcctctctgccctgccagctcttctgtctcctacagtcctgttggtgacagaagagtgtatcttgccttcaggtcttgcagttgaawgcmtggaawccwaaacaaacaaacaaaaaarararaaaraaagaaaactcctaaaaaaaaaaaaaaaaa

SEQ ID NO: 1016 - DNA, 2018 bp, Rattus norvegicus
tgagacatgtctgacacaagcgagagtggtgcagatccagctcgctctcagggcaaagcttcagaaaaggacggcggctccatgatgcaggacctgttgactgtgacccagaacttggaggtctcagagacaccaaaggctgaaaaggcaccagaggtctcagaagctgcaaaggtccccaaagcctctgggaacccaaaggcgacagaggtctcaaaggccccagaggcttcggaggcagctgccacccaggcctcacctaccacacagctgagtgagacccaggttctggcagctgaaaacaagagtccagcagctgacaccaagacacagaaggctgacctgcaggctatgacaatacctgcaacccagaccaaaacggtcagttctgttaccgattctaaggtcaatacaaagactccggagaccgaggctcctgcctctcagtctggggcagatgaaccagagcctgagggtgcagctgtccaagttcaggagaatcaggatactcggcccaaggtcaaagccaagaataccgaaaaggggaaacacctggaaggggaagaggacggcaacagtgatcagagtcagactccagaaaccacaggtggtcggagggtctcaaaggccctaatggcctccatggcccgtagagcttcaaggggacccatagcgttctgggcccgcagggcakmaaggamtmgrttkrmtrymkrgkstcggaswkcwttgmtctsmywgmggtcacctagagctcggagaggcaaggcccgaagaagagctgccaagctgcagtcatcccaggaacccgaagcacccccacccagagatgtggcccttttacaaggaagggcaaatgatttggtgaagtacctgttggctaaagaycagacaaagattcccatcaggcgctcagatatgctgaaggacatcatcaaagaatatacggatgtataccctgaaatcattgaacgagcaggctattccttggagaaggtatttggaatccaactgaaagaaattgacaagaatgaccacttgtatattcttctcagtaccttagagccaactgatgcaggcatcctgggaacgaccaaggactcacctaagctgggcctcctcatggtgcttcttagcatcatcttcatgaatggaaatcggtccagtgaggctgtcatctgggaggtgctgcgcaagttggggctgcgccctgggatacatcactcactctttggggatgtgaagaagctcattactgatgagtttgtgaagcagaagtacctggactacgctagagtacccaatagcaatcctcctgagtatgagttcttctggggcctacgctcttactacgagaccagcaagatgaaagttctcaagtttgcctgyaaggtgcaaaagaaagatcccaaagaatgggcagctcagtaccgagaggcaatggaagcagatttgaaggctgcggctgaggctgctgccgaagccaaggcgagggctgagattagagctcagatgggcattgggcttggctctgagaatgctrctgggccctgcarctsrgatgamsctrryaydrgrsmsbggscaaaggyccsratccaggcgggagctgaaactaaagccaaagcccaagaaagtagtgktgccagtgctggtactggtsccsgtgccagtgccagtgctkgtacmagtgtcagtaccagtggcactgctggttctggtgctawtgctgggscmagtgggggcttcagwaccaaccccagtctkmckgcmagtctyacgtttgggctyttcgctkgccytartggarctkgggccagtammagwagcagctytggtgcctgtggkttctyctmmaagtgagatacarrttgstwatcacagmgksttyttctyaagccrgggkgcactctcagacacttattcaatgcagcactctaggcaaccgytatcaatcaattgaagtsgacactctatattaaatctatttgccatttcwraraaaaaaaaaaaaaaaa

SEQ ID NO: 1017 - DNA, 5210 bp, Rattus norvegicus
  misc_feature (1498)..(1498): n is a, c, g, or t
  misc_feature (2010)..(2010): n is a, c, g, or t
  misc_feature (2013)..(2014): n is a, c, g, or t
  misc_feature (2028)..(2028): n is a, c, g, or t
  misc_feature (2035)..(2035): n is a, c, g, or t
  misc_feature (2056)..(2056): n is a, c, g, or t
  misc_feature (2065)..(2065): n is a, c, g, or t
  misc_feature (2093)..(2093): n is a, c, g, or t
  misc_feature (2748)..(2748): n is a, c, g, or t
  misc_feature (3469)..(3469): n is a, c, g, or t
  misc_feature (3681)..(3681): n is a, c, g, or t
  misc_feature (3754)..(3754): n is a, c, g, or t
  misc_feature (3918)..(3918): n is a, c, g, or t
  misc_feature (3937)..(3937): n is a, c, g, or t
  misc_feature (4091)..(4091): n is a, c, g, or t
  misc_feature (4093)..(4094): n is a, c, g, or t
  misc_feature (4200)..(4200): n is a, c, g, or t
  misc_feature (4209)..(4209): n is a, c, g, or t
  misc_feature (4238)..(4238): n is a, c, g, or t
  misc_feature (4245)..(4245): n is a, c, g, or t
  misc_feature (4248)..(4248): n is a, c, g, or t
  misc_feature (4268)..(4268): n is a, c, g, or t
gcgcgcacgggcgatggcgaaagcgaggtccggcgccgcagggctggggctgaagctgtttttgctgctgccgctactgggagaagccccgctgggtctctgcttctcaagggatgcttactgggagaggctgtatgtggaccagccagctggcacacctctgctctatgtccatgccctacgggatgcccctggagaagtgcccagcttccgcctgggccagtatctctatggcgtctaccgcacgcgtctgcatgagaatgactggatccacatcgatgcgggcactggcctcctctacctcaatcagagcctggaccatagttcctgggagcagctcagcatccgaaatggcggcttccccttgctcaccgtcttcctccaggtcttcctggggtccacagcccagagagagggagagtgtcattggccaggctgtgcccgtgtctacttctccttcatcaacgacaccttcccaaattgtagctccttcaaagcccgggatctctgcaccccagagacgggtgtgtccttccgcatcagggagaacaggccccctggcaccttctaccagttccgcatgctacctgtgcagttcctttgtcctaacatcagtgtgaagtacaaactcttagaaggggacggtctgcccttccgttgtgaccccgactgtctggaggtgagcactcggtgggcactggatcgtgagcttcaggagaagtatgtgctggaggctgagtgcgcagtggcaggccctggagccaacaaggagaaggtggccgtgtccttcccggtgacggtgtatgatgatgaagacgactccccgcccamswwytcsgsasgwgtgggcaccgccagtgctgtggtggagtttaagcggaaggagggcactgtggtagccactctgcaggtgtttgatgcagatgtggtgccagcatctggggagctggtgaggcggtacacaagcacactactctcaggggattcctgggcccagcagaccttccgggtggagcacacacccaacgagaccttggtccagtccaacaacaactccgtgcgggcaaccatgcacaattacargctggttctcaacaggagcctgtcsatctcagagagccgagtcctgcagctagtagtcctggtcaatgactcagacttccaggggcctgggtcaggtkttctcttcctccatttcaacgtgtctgtgctgcctgtcaccctgaacctacccatggcctactccttcccagtgaataggagagcccgccgttatgcccagattgggaaagtttgcgtggagaactgccrggagttcagcggtgtctccatccagtacaagctgcagccctccagcaccaactgcagtgccctaggtgtggtcacctcaacagaagacacctcagggaccctatatgtaaatgacacggaggcgctgcggcgacctgagtgtaccgagcttcagtacacagtggtagccactgaccggcagacccgnaggcagacccaagcttcgttagtcgtcacagtggaggggacatacattgcagaagaagtgggctgccccaagtcctgtgcagtaaacaagaggcgccctgagtgtgaggagtgtggtggcctgggttctccaactggcagatgtgagtggcgtcagggagatggtaaagggaccaccaggaacttctccacctgttctcctagcaccaggacctgtcctgatggccactgtgatgctctggagagccgggatatcaacatttgcccccaggactgtctccgtggccccattgttggcgggcatgagcgaggggagcgccagggaattaaagccggctatggcatctgcaactgtttccctgatgagaagaagtgcttctgcgagccagaggacagccaggccccattgtgcgatgagctgtgccgtacggtcatcacagccgctgtcctcttctccttcataatctctgtcctgctgtccaccttctgcatccaccgctaccacaagcatgngcnnaagccacccatcgngtcagcngaaatgaccttctgccggccngcccagggnttcccaatcagctattcttcctcgggcncccgccggccctcactggactccatggagaaccaggtctctgtggactctttcaagatcccggaggatccgaagtgggaatttcctcggaagaacttagttcttgggaaaaccctgggagaaggcgagtttggaaaagtagtcaaggccacagccttccgtctgaaagaccgggcaggatacaccacagtggctgtgaaaatgctgaaagaaaacgcctcccagagtgaactacgagacctgctctctgagttcaaccttctgaaacaagtcaaccatccacatgtcatcaagttgtacggggcttgcagccaggatgggccacttcttctcattgtggagtatgcaaagtatggatccctgcgggggttcctgcgggacagccgcaagatcgggcctgcctatgtgagcagtggaggcagccgcaattccagctccctggaccacccagacgaaagggtgctgaccatgggcgacctcatctccttcgcctggcagatctcgaggggtatgcagtacttggctgaaatgaagctcgtacatcgagacttagctgccagaaacatcttggtggcagagggacggaagatgaagatctctgactttgggctgtcccgagatgtttatgaagaagattcctatgtgaagaaaagcangggccggattcccgtcaattggatggcaatcaattctctctccgatcacttctataccactcaaagtgatgtgtggtcctttggagtgctgctatgggaaattgtgaccctgggaggcaacccctaccctggaattcctcctgaacgactcttcaaccttctgaagacaggccacaggatggagaggccaaacaactgcagcgaggaaatgtaccgcctgatgctgcagtgctggaagcaggagccggacaagaggccagtatttgctgacatcagcaaggatctggagaagatgatggtcaaaagcagagactacttggacctggctgcatccaccccttcggactcactgctctatgacgatgggctctcggaagaggagacgcccctggtggactgtaacagtgctcccctcccgcgctccctcccttccacatggattgaaaacaaactctatggtatgtcagacccgaactggcctggagagagtcctgtaccactcacgagagccgatggcactagcactgggttcccaagatatgcaaatgatagtgtatatgctaactggatggtttcaccctcagcggcaaaattaatggacacatttgatagctaacatttctttgtgaacggtaatggacctcccaagggggaagaaacatgccaagagcatcaagtccaccgaccactttgtgcacaccatactggccaagaccagccngaggtggcagacttgttttctgtagtttgttttagctggtttccaaagtggttttacttcaagtagcctcagggctgtccttggcccagcatatgacatcctgaatatagattttttttgagttttttttttttttaaccatgtagccttttcttaggaaaacgttgtttctgacgtggttaagcggctcttagatttagcacaattgaganattgggtgttgcccttgcttgtacaaggcagctcgaaagaagtggccccacaagacacagtccccctgttgancccagggcatcattctcctgttcagcgctgcgtgacacctacccgcagaccagaacagggtgaagaagcagggcatttggagtggagcagccttcaggcccagaattgctggcagcagaggccttgagccacaaatgctgcacccccagcacagcattccgcanaacgccctacccacctganagtgtgcttgacctctgatggggcaggcaggtctgccttgttttaatcactaccttgtcagctcatgcccggagggaaggacagttcatctagttgtattagaggtttccctgacaacgactgaggtgagagaatgaggttttggctcttatananncttgtgtgaaaggcacatggatcagctctccccatccgacatttatgctgctgctatggtacgtgttttggtctcctccgttctgacacaactcccgtgtaaggtncttgtcttnctgtactgacggttgtagcctcagacatnctgcacnccnctggggttttaggggtggcncttggaagtttctttggctgtctatggacttgtcacttcccacgaaaaggtcacattaccaaaacactgcctggtcttcaracttcaagcactgtgataggacttttaaatagtcgtaataaaatactatattttatgggcatttcacaaacacagtaaaattgtgacattttatgtggctgagaatgstcagataagtacaccggatagagccttacggagtgtgtgtaatacttgtgtgkgcacacagccagacggaaaawgaaaaatgcttatttcascatatawtatggctttaktttgggccattttycttycaataccygkgaaaawtttttttaaaaaawatcycyarkcygggatccmttttgkttttcagatgtgcttaataatagktttattaaatgcagaaatacagrtaagttcaaattactcaacmtgcctacacagkattgstacagsaggtttagcttcaagggctgagsyccatgtctaaatagckgacccatctgtggggaattaacactkgactaataaccatttgtctgkctgktcckgagatacaaaagtacccatacttgktwaaagtacctatacctgktagcamtawyagacagwtttttcatctacatatatgcagaagttaccacatatkaaatattactgagtattaagtagcaatctgtcagmcactaaaawwtgtragatccatytamgaaaggmkattamaccgtaccatgtygactwgttwttgtaatcmasgkgactaargaaatgatttcagcygtgkwaataaarytataaatcctccccaaacacaaaaacccagggggccgggaccaaacacccatagagcgataaaacacggcgcggttcaccacgacgggaaaccccgtgcactatagcgtcgcaaccctcgccggcatgaaagcgcgagactca

SEQ ID NO: 1018 - DNA, 1814 bp, Rattus norvegicus
gccggaggcgtaaaggccggctccagtggacgatgccgctgtgcgcccaggatgttgccgcgtttactcccattcctcgtctcgatctccagcctgagcctgggcttccgcgcacacgggacagaactgccgagcccttcctccgtgtggtttgaagccagatttttccagcacatcctccgctggatgtctatcccaaaccagtctgagagcacctactacgaagtggccctcaagaagtacggaacctcaatctggaaagacatccacatctgtagcaaggctcagacattgtcctgcgatctcacaacgtccaccctagatctgtaccacagctctggctaccgggccagagtccgggcagtggacaacagtcagtattccaactggaccatcactgaaactcgcttcacagtggatgaagtgattctgacggtggatagcgtgaccgtgaaagtaagcaacggcttcatctatgggacaatccatccccccaggcccaatttagtccctgtaggtgacgagtatgaacagatcttcacgcaccaccgtatttacagggtttgcatccggaagttctcagaacaaaagaatataaccaagacagtggagcaagaaaacttcaccctcgaagtccccaaaaggatgagaaagttttgtgtcaaggtgatgcctcacgtggaatcccgaattaacaaggcagagtggtcggaggagcagtgtttacatgtcacgacggagcattatttcaccgtgaccaacctcagcattttcttcttatccatcctgatactctgtggagccctggtctgcctggttctcctgtggtacatccggcacccggggaagttacctgcagtcctggtcttcgagaagcctcccgactttctgctggccaaccctcgctgcccagagactctcgatgacattcacatcctggacctggaggccttcccaaaggtgtcacccgagctgaaagactcagacctgcatggcagcaccgacagtggctttggcagtggcaaaccatcacttcagacggaagaatcccaattcttcctccttgactcccacgcccagatacaggagactctgggaaaggaagggtcttcagagctacaggacacctgtggggacaacacggacagtgggatctgcttgcaggagtccagcttacactctagcatgggtcctccctggaagcagcagttcggatatacccaccaggaccaggatgacagtgacctagtccagaactctccagggcatcctaagcacacacaggatggctccgccttgggccatggttgtctcctagagcctgaagtccctgaggagaaagaccaagtcatggtaacgttccagggctaccagaagcagaccagatggaaggaggaggcagcagaacctttggacggagagattcccttggcagaagcctttgatcctgaactcggggtgcgcctgcagggtgattcagcttggcctcctgtggctctagccacgggttatttgaaacaggagtctcaagggatggcctctgctccaccggggacaccaagtagacagtggaatcaactggctgaggaatcgtcactcctgggtgtggttagctgtgaagacctaagcatagagagtttgggttttgcccatgaacttgtccctctggactgtggggcagcctctagtggcctcctggatagccttggcactaatctggtcaccctgccattgatctctagcctgcagatagaagagtgacaggggataaggtttctttgtattttagccatgcctgctcccctccctgtacc

SEQ ID NO: 1019 - DNA, 1119 bp, Rattus norvegicus
atgggctacgaccagcgccacgggagcccgctgcctgcggggccgtgcctatttggcctccccctgaccactgctccttcgggctactcctccggaggggttccatccgcctatccggaactccacgctgccctcgaccgactatgcgctcatcggccggtgggtttcggctgccaggagagccgtcactcttaccccccggccctgggcagccccggagctctaaccggagccgtggtgggaacagcgggtcctttggagagacgtgggacgcaacccggacgtcactcggttacgggctacggggactgcgccgcgggagcccgttaccaggacgagctaacagcactgctgcgtttgacggtggctaccggtgggcgagaagccggtgcccgcggggaacccttggggattgagccgtcgggtctggaggagtctcctggttccttcgttccagaggcctcccgatcccggatacgggagccagaggccagagaaggtgactttggcacctgtatcaagtgcaacaaaggtatctatgggcagagcaatgcctgccaggccctggacagcctctaccacacccagtgctttgtctgctgctcctgtggacgaactttgcggtgcaaggctttctacagcgtcaacggctctgtctactgtgaggaagattatctgttttcagggtttcaggaggcagctgagaagtgctgtgtctgtggccacttgattctagagaagatcctccaggccatggggaagtcctatcatccaggctgcttccggtgcatcgtttgtaacaagtgcctggacggcgtccccttcactgtggacttctccaaccaggtgtactgtgtgactgactaccacaaaaattacgccccgaaatgtgcagcctgtggacagcccatcctcccctcagagggctgtgaggacattgtgagggtgatatccatggaccgtgattatcactttgagtgctaccactgtgaggactgccgcatgcagctgagtgacgaggaaggttgctgctgtttcccccttgacggacatttgctctgccacggctgtcacatgcagcgcctcagtgcccgacagccccctaccaactatatctga

SEQ ID NO: 1020 - DNA, 1491 bp, Rattus norvegicus
atgaagttttcgttggcagtctccttttttattttaatgtccttgttgtttgaagacgcttgttctaaggaaaagtcttccaagaaagggaaggggaaaaagaagcagtatttgtgcccatctcaacagtcggccgaggaccttgcccgtgtgccccccaactccaccagcaatatcttgaacaggctgctggtcagttatgatcccaggataagaccaaacttcaaaggcattcctgttgatgtagtagtcaacatttttattaatagttttggatctattcaagagacaacaatggactatagagttaatattttcctgaggcagaagtggaacgaccccagactcaagctccctagtgacttcagaggctcagatgcactgacagttgaccccaccatgtataagtgcttgtggaagcccgacttattcttcgcaaatgaaaaaagtgccaattttcatgatgtaacccaagaaaacatcctgttgtttatttttcgggatggagacgtccttgtgagcatgaggttgtccatcactctttcatgtcctttggacttaactctgtttcccatggacacacaacgctgcaagatgcaacttgagagctttggttacaccactgatgatttgagattcatctggcagtcaggagatcctgttcagttggaaaaaattgctttgcctcagtttgatattaaaaaggaggatatcgaatatggcaactgtacaaaatactataaaggcactggttactacacctgtgtggaggtcatcttcaccctgaggagacaggttgggttctacatgatgggtgtgtatgcaccaaccctgctgattgtggtcctctcctggctctctttctggatcaaccctgatgccagtgctgccagagtacctctgggcatcttctccgtgctcagtttggcctcagagtgcaccaccctcgcagcggagcttcccaaagtgtcctacgtgaaggcactggatgtgtggctcattgcctgcctgctcttcgggtttgcctccctcgtggagtatgctgttgtccaggtgatgttgaacaatcccaaaagggttgaagctgagaaagcccgaatcgccaaggctgagcaagcagatgggaaaggtggaaacgcagctaagaagaacactgtgaacggcacggggacccctgttcatatcagcactttgcaggttggtgagaccagatgcaaaaaagtttgtacttccaagtctgatctgagatccaatgacttcagcattgttggcagcttaccaagagattttgaattatccaattatgactgctatgggaaacccattgaagtcaacaatggacttgggaaaccacaggcaaagaacaagaagcctccgcctgccaagcctgtcatccccacggcagccaagcgcattgacctctatgcaagagcattatttcccttctgcttcttgttcttcaacgttatatattggtctatatatttatga

SEQ ID NO: 1021 - DNA, 3107 bp, Rattus norvegicus
gataatgatgctgatcctatgtcagaaagcaaggaagaccagtggatgggagtcactgtccagagtcaaggtccagggggcaaagtggtgacgtgtgcgcatcgatacgagaaacggcagcacgttaacacgaagcaggagtcccgggacatcttcggaaggtgttacgtcctgagtcagaatctcagaattgaagatgatatggatggaggagactggagtttctgtgatggccgattgaggggccatgaaaaatttggctcttgtcagcaaggagtagcggctactttcactaaagactttcattacattgtttttggagccccagggacttacaactggaaagggatcgttcgtgtagaacaaaagaataacactttttttgacatgaacatctttgaagatgggscctatgaagttggtggagagactgatcatgacgaaagtctcgtgcccgttcctgctaacagttatctaggcttttctctggactcarggaagggtattgtttctaaagatgacatcacttttgtatctggtgctccaagagccaatcacagtggggctgtagttttgctaaaaagagacatgaagtcagcacatcttctccttgagtatatatttgatggtgaaggcctggcttcttcgtttggctatgacgtggcggtggtggacctcaatgcagatgggtggcaagacatcgttatcggagcgccacagtactttgacagggatggcgaagtcgggggtgcggtgtacgtctacattaaccagcaaggcagatggagtaatgtgaagccagttcgtctaaatgggaccaaagactcgatgtttggaatcgcagtgaaaaatatcggcgatattaatcaagatggctatccggatattgctgttggagctccctatgacgatctggggaaggtttttatctatcatggatccccgactggcataattaccaagccaacacaggttcttgagggtacaacgcctttcttcggctactcaatcgctgggaacatggacctggacaggaattcctaccctgacgttgctgtgggttccctctcagactcagtaactattttcagatcccggccagtgattaacattctgaaaaccatcacagtgactcctagcagaattgacctccgccagaaatccatgtgtgggtcacctagcgggatatgcctcaaggttaaagcctgttttgaatatactgcgaagccctccggttataaccctccaatatcaattttgggtattcttgaagctgaaaaaraaaraaraaartcagggttgtcgtcaagagttcagtttcgaaaccaaggttctgagccaaagtatactcaggagctgaccctgaacaggcagaagcagcgggcatgcatggaggagacgctctggctgcaggaaaacatcagagacaagctgcgccccatccccatcacggcttctgtggagatccaggagcccagctctcgacggcgggtgaattcacttccagaagttcttcccatcttgaattcaaatgaagccaaaacagtgcagacagatgtccacttcttaaaggaaggatgtggagacgacaatgtctgtaacagcaaccttaagctagagtataaatttggtacccgagaaggaaatcaagacaaattctcttaccttccaattcagaaaggcatcccagaattagtcctaaaagatcagaaagatatagctctgaaaataacggtgaccaacggcccttctgatccaaggaatccccggaaagatggtgacgatgcccacgaagccaaactcatcgcaacgtttccagacaccctgacatattccgcctacagagagctgagggctttccctgagaagcagctgagctgtgttgccaaccagaatggctcccaagctgactgtgagctcggaaatcctttcaagagaaattccagtgttactttttatctgattttaagtaccaccgaggtcacctttgacaccacagatctggatattaacctgaagttggaaacaacaagcaatcaggataatttggctccaattacagcgaaagcaaaagtggttattgaattgcttttatcggtctctggagtcgctaaaccttcgcaggtgtattttggaggtacagttgttggtgagcaggccatgaagtctgaagaagaagtaggaagtttaatagagtatgaattcagggtgattaacttgggtaaacctcttaaaaacctcggcacggcaaccctgaatatccagtggcccaaggagattagcaatggcaaatggttgctttatttgatgaaggtcgaatccaaaggtttggagcaggttgtctgtgagccacacaatgaaataaacttcctcaagctgaaggagtctcacaactcaagaaagaagcgggaacttcctgaaaaacagatagacgacagcaggaagttttctctattttccgaaagaaaataccagaccctcaactgcagcgtcaacgtgaggtgtgtgaacatcaggtgtccactgcgagggctggacagcaaggcctctctcgttctacgctccaggctgtggaacagcacgtttctagaggaatattccaaactgaactacttggacatcctcgtgagggcgtccatagatgtgaccgccgccgctcagaatatcaagctccctcatgcgggcactcaggttcgagtgacggtgtttccctcaaagacggtagctcagtattcagggatagcgtggtggatcatcctcctggctgtgcttgccgggattttgatgctggctctattagtgtttttactgtggaagtgtggtttcttcaagagaaataagaaagatcattacgatgccacctaccacaaggctgagatccacactcagccgtctgataaagagaggcttacttccgatgcatagtattgatctacttccctaattgtgtggattctttaagcgctctaggtacgatgacagtgttccccgataccatgcggtgcggattcggaaagaagagcgagagatcaacgacgagaaacacactgataaccccgaaaaaaagcggccgctcgagcatgcatctagagggccctattctatag

SEQ ID NO: 1022 - DNA, 684 bp, Rattus norvegicus
atgggcaactgcgtcaagtcgccactaagaaacctctcgagaaagatgcgccaggaggagaagaccagctacatggcggtgcagacaagtgaggatgggctggcggatggcggtgagctccctggaccactcatgatgctggcccagaactgtgcggtcatgcacaacctgmtgggtcmmgcctgcrtcwktckccswaagrrwyytsycgagaacagacaacctgatagatcgttacgaccagaggagatcgaagagctccgagaggccttccgggaatttgacaaggacaaagatggctacatcaactgccgggacctggggaactgcatgcgcaccatgggctacatgcccactgagatggaactcatcgagctgtcccagcagatcaacatgaacctgggtggccacgtggatttcgatgactttgtggaactgatgggccctaaactcctggcggagacagcagatatgatcggtgtaaaggaactgagagacgcctttcgggagtttgacaccaacggtgacggggagataagcacgagcgagctgcgagaggccatgaggaagctcctgggtcatcaggtgggacaccgggacatagaggaaattatccgagacgtggacctcaatggagatggacgagtggacttcgaagagtttgtccggatgatgtctcgctga

SEQ ID NO: 1023 - DNA, 1557 bp, Rattus norvegicus
gatcgcagcaccatgaagcttcttcccctgctcgtcgttgtggcactgggcctggcgaccgtggtggtctcggctggaccacagacgattgagtgctggttcgtggaggatgcaggtgggggtggcctgtccaagaaacctgccacattgctactgcgccatggacccaggggaccgccgccccggccagatcttgaccctaagctatacttcaaggtggatgacccggcgggaatgctcctggctgccttcaggcggtaccccgcaggcgcccacgccccacactgcgagatgagcagctacatcccgttccccgcctcggcgaagtgggctaggggtctgagtccgcagcagaactgctcgcgggccctggacggggattggctgatggtcagcgtatccggcacggtcttcagcctctccagcctgctgcgaccactgccggagcctcagcgggagcctgtcttcatcaccatggcaacagtggtactgactgtcctcacacgtcaccccgcccctcggatccatctgggaaaggatgcagtgctggacctgcgttttgcctacgcgccccctgctctggaagatgctccttctgtggcctcagggcctcctccctttgggctggagtggcggcgccagcacaggggaaagggtcacctgctgctggctgcaattcctgggctgcttgagaaaatgccaccagcccgagaaaaggctgtggcatttgctgcttgggatgacgacaatgatccctggggcccgtggactgggaatgggaccttgtggctgccagcagtgagcccttctcaggagggtgtctacctggccaccgtacatctgccctatctgcaaggacaggtgtccctggagctgactgtgcacaagcccccgagagtgtctctaacaccagcacccattgtgtgggctgccccaggagaggcacccccagaattgctctgtcttgtgtcccacttctaccctgaggagggcttggaggtggaatgggagctcagaggtggcccagaaggaagttctagaaaggctgaggggaagacttgggtctccactgtccgtcaccattctgatggctctgtcagccagtctgggcacctgcagctacccccagtcactgacaagcaacatggagttcgctatgcctgtcgggtccgccaccctagcctgccctcatcggggcgcagtgctgaagtcactctggaggtggcaggcttctcagggccctccattgaggacggcataggcctcttcctgtctgcttttctccttttgggcctcttcaakgcactaggctggatggctgcctacctgaccattcctaaaatcttaaaggagaaggcctcagctaccagcctgaccgttcccaaagacgaaaagaagtcagagtgaagacactggtctgtggaagccaccctcatctctggtccaaacgactccagtagcccctgccccagaacaagaggggggtgcctcataccctcttctccctccattaaatgactcagggttgtttwwwwwwmwwwwwmwwwwwaaaaaaaa

SEQ ID NO: 1024 - DNA, 590 bp, Rattus norvegicus
  misc_feature (107)..(107): n is a, c, g, or t
  misc_feature (110)..(110): n is a, c, g, or t
tttttttttttttttatcaatgcttaaactttattatttacaagttaaattacacagcagctttacacagcatgatgggaagaaggaaggaggaggaggaggcaaanaanagagcagaggatgacgccrmaaagaagamrgkwswgkssarymtgrkrrctywatttrgrsscyacswggkcraggcakwrcagmagsgtgggaagcgacwgactggtcgggarwtgraaswsaggatcctgtctgagaggaaaaagmccttgracatcgactacatgggggaggaccakctccgggagaaggcccargagctgtcagaatggatccaccagctggaatcggagaaatttgacctgatggagaaattgaagcaacakaaatatgagatcaatgtgctgtacaaccgcatcagtcatgcccagaaattccgaaagggggctgggaagggtcgagttggaggccgctggaagtgagactgccaggacatgtcccattgtgtggagcccaggagccaccggagtgtgtcccatctgtaactcaaaataaagggtcccctggcatctgtwmaarwwmaaaaaaaaaaaaaaaaa

SEQ ID NO: 1025 - DNA, 444 bp, Rattus norvegicus
ccgggactgggaccgtcgccgccgccgccaccatgagcgatcagcagctggactgcgccttggacctgatgaggcgcctgcctccacagcagattgagaaaaacctcagcgatctgatcgacctggtccccagtctgtgtgaagatctcctgtcttctgttgacctccacagtgatgctatggctgcaaaccaacaaatccggctcaggcaccatgaacctgggaggcagcctaaccagacagatggagaaggacgaaactgtgagtgactgttccccacacatagccaacattgggcgcctggtggaggacatggaaaacaaaatcagaagcacgctgaatgagatctactttggaaaaacaaaggacatcgtcaacgggctgaggtctgtgcagacgtttgcagacaaatcaaagcaggaagcccttaagaatgacctggtg

SEQ ID NO: 1026 - DNA, 667 bp, Rattus norvegicus
cacgagggtccgggttccgagactagcgctctgcagagacaccgatcgctggaccctctcacaggaaggcgtcatgccccaaaacgtagttctcccgggccctgcgccctggggcttcagactctcaggaggcatagacttcaaccagcctttggtcatcaccaggatcactccgggaagcaaggcagaagccgccaacctgtgccctggagacgtcatcctggctatcgatggctttggtacggagtccatgactcatgctgatgctcaggacaggatcaaagcagcatcttaccagttgtgtctcaagattgacagggcagaaactcgcttatggtccccgcaggtgtcggaagatgggaaagcgcatccctttaaaatcaacctagaggctgaaccgcaggaattcaaacccattggtaccgcgcacaacagaagggcccagcctttcgtagcagcagcaaacattgatgacaaaagacaggtagtgagcgcttcctataactcaccaattgggctctattcaactagcaatatccgagacgcgctacacggacagctgcggggtctcatccccagttcaccgcaaaatgaacccacagcttcagttccccctcagtcggacgtgtaccgaatgctgcacgacaatcgggatgaaccagctgct

SEQ ID NO: 1027 - DNA, 680 bp, Rattus norvegicus
tcagtaaccacaccctccccatcccagctcaaattggggctggcacacagaggcagtgctgggcccagtacctcccagggcttctgtgcagcccagggctgctgagaacttgccaggctaggctttctagaaggccactggccactgtaaccaccctctcccacgcctgtcggctgcccagacacctcatacaccaccaggcagcagcggcagccctacccagccacccaactccgaacacactcactcaaagtttgcagtttgcgtagaaaagcacagctctggcgggggtagctgccacagacaatgctcatcaatagaaacccgccccatagatgcaccttgccccgcccctccctactaaggactccccactgtgccccaccacctgcactagttaaacgttctaggttggtwtgttggttggttggtttgtaaagtcaaagaaaatggtcagactggcacctatctctctctctacagactgcttcatggactctttgctgttgatgttgatctcctggtagcatgaccyttggcctttgtaagacacacagcctttctgtaccaagcccctgtctaacctacgaccccagagtgactgacggctgtgtatttctgtagaatgctgtagaatacggttttagttgagtctttacatttagaacttgaaaggattt

SEQ ID NO: 1028 - DNA, 728 bp, Rattus norvegicus
attccctgttcaaaacatgttaaattagaattaatctatctttaccaaaacctatgttgctttcagagaggtgaacattaaacgctgagacaggacagaatgtgttctttgtccttttccagccctgctcatcactgggaagatacaggagtctaccacttgtcatagaagggtactgccaacttgatgttctacctgccaccaaccgccaggaatgaacgaaggaaacagtactgagggcaaagtttacagatgtttttgattctggtattttgtccagaatagcttgtagcagctatagattcctccttggccccaagcctgggacttgagccatcctaactcactaacagggagaattagctggtagcaatgtgccttgatgaagatttcctccaggcagcaaacaccaaatcacaactctttgcttcttgccattgtgggccargtcctcggtttctaaccctttcccttccmcacagtttgttgwcaccatgtggctttggctcagtccaatattccaccttkktttttacattgggaaccctcgcattaccggggatgctacttaccacaatctgtaaccctgaatctctyctgtgctctgatgttcagaaagctgagacaagctggacccarwtgatgttgtaggtgagaaagaggcagtctgttggagaggtatatttgagcagaataaagatttgaaatttcaaaaaaaaaaaaaaaaa

SEQ ID NO: 1029 - DNA, 977 bp, Rattus norvegicus
gccgacaaggaccaagcgcgggcccggcgtgaaggaagttagccgcagaatcccagatagcggccgagagggacwcgrrkccaatggcgaccccagaggccagcggcagcggcaggaatggccagggctccgaccccgccgtcacctactaccggctggaggaggtggcgaagcgaaataccgcggaggagacgtggatggtgatccacgggcgagtctacgatatcacccgcttcctcagcgagcatcctggtggagaagaggttctactggaacaagctggtgccgatgcaactgaaagctttgaagatgtcggccactcccctgatgccagggagatgctaaascagtactacattggtgatgtccatcsgaatgaccttaaacctaaakatggtgacaaggacccttcawawaacaattcatgccaaagttcytgggcawattggattgtccccatcgtgggtgcwattcwwataggtttcctgwatcgtcacttmtgggctgmyagcaaatcctcctragdagdccacgttdaagtgtcggagcacatctcctgggagtgaragggtggagacttgtstgkaggaggctgcagggtgctccttccytggatcctgccagttgwtttctttccccttggagccaagatggttgaccaratatctatcctccttcaatgcaggaccagaatctgtccatcagcytgagcctgacgcccaaagcacctgctcacgttgtgtccttstcagggtttyttytcactggttcccastcattcccttcattwmaamagttratgccaatgacttagagttcctytgttgtagtgacatkkcctttggggacaktacatgatttctgatactttgaattcacagtagacatagttaagggaacagcggtctagttttgagtctttccccatttttcttttaagtaaatttttttwaattctgaaaaaaaaaaaaaaaaaa

SEQ ID NO: 1030 - DNA, 602 bp, Rattus norvegicus
tttttttttttttttttatttawagcctttaktttcctgtcagctcakgaagcasgagtggggagtgggcaaaaataagaagcgagcaatgaggagaamtggggaggggatgtttctagaagaccasctgggaagaaamtaggmamacagggaaakgggttgggakagggaaaggggatcctaaagccagaaatcasaaagaggcagaggakgctgakagtctgagaggaacagmtcaagaccagcagggckagtccttagacccctgamctccccggatgtgtgggaaggackggaggtacagycacctgccacagtgctctccatgaaggaccccggyactgctcacttcccaggctctgcacacactgargggtgggtctctcccagcctcactctaagagaagcagggttttgtcctttggtaaagggccggacagcagtggtcaaggaggatttgaaacaagctctcctccatgctctcatgatctyygcctgkgctatgctcctgtgtgtccttggtgcctaggacttgctccagagctctgtgtggcggtcatccctgtctctcacacagaggctctagggatcagaagttctgg

SEQ ID NO: 1031 - DNA, 811 bp, Rattus norvegicus
tcccgccaaggctgaaccgcccaggagcaccgcccaggagcagcccagaccggaatgtccagcagactcttgctccagctcctggggttctggctgttcctgagccagccttgcagggcgcgagtctcggaggagtggatggaccaagtcattcaggtgtgcggccgtggatatgcccgcgcatggatcgaagtctgcggggcctccgtgggaagactggctttgagccaggaggagccagctccgytagccaggcaagccactgcagaagttgtgccatccttcatcaacaaagatgcggagcctttcgatatgacgttgaaatgccttccaaatttgtctgaggascggaaggcagcactgtctgaggggcgagcaccgttcccagagctacaacaacacgcacccgcgttgagcgattccgttgttagcttggaaggatttaagaaaactttccacaatyagctgggtgaagcaraagatggcggtcctccagagctcaaatacttargctcagatgctcagtcmcggaaaaagaggcagtctggcgcactgctcagtgagcagtgttgccacatcggttgtaccagaagatccattgctaaactctgctgatacggagctaatggtgcgcaacccgggcagtgtcgsgtgcgttcttgctacctggctaatgcctctttctgtccccttttcttatttattaggatctgagaaaccataattcacacttggatttgtcctttgataagagagaaatgttctctgcattgttgtagttctgttaataatatttttatgcaaaaacttt

SEQ ID NO: 1032 - DNA, 1091 bp, Rattus norvegicus
agaacctggagttttggctggcttgtgaggatttcaagaaggtcaaatcgcagtccaagatggcagccaaagccaagaagatctttgctgagttcatcgcgatccaggcttgcaaggaggtaaacctggactcgtacacacgagaacacactaaggagaacctgcagagcatcacccgaggctgctttgacctggcacaaaaacgtatcttcgggctcatggaaaaggactcttaccctcgcttcctccgctctgacctctacctggacctcattaaccagaagaagatgagtcccccactctagggaccaccagtatccagctcagcgttcacaccaagcggagcgggctccctgcccacccgcctcccttccctgtgacggaggggacaagtaagcccccagaggctgtgtctccggacagacagatggacatttgaattcgaggcctgggccgagagagacccaggccactacaggaagtaggaggaccagccgcatcgggtccttaacgtcctggtacgaggggaccaagggccctggcaggtcagggccctggaggagccagatcgggagctgtggctccctgctttggagataatggagtctttacgctgaccaagttcctttgagaactggctggggttgggacargaggcccaggcctgggctcagggtccaacctggggggctgttgggcctcacrgctcagacctttccccatkgaskwkkatttatttaaacagtagttggatgcttggcacatgaacggtaataggagagccctcaccctgtcagttttcttaacttacaagtgcaatgtcttacccaaggccttgtgaaggccacctggaggtgtgatcaccgtcttacagtttcagggcatttgctggtcccaggaaccagtggcggcagctgggccttctagactgacatgaccttggaggggatgctgcagaaatctggcacccaccytgggtgcccaagagatctgggaaagcatagtgccctccggccacacagaaacaagtgctgggggcaaataaaaggcctgtgttattctcawwmwmwrwrwaaaaaaaaaaaaaaaaa

SEQ ID NO: 1033 - DNA, 968 bp, Rattus norvegicus
cttggtttgagctattcacaagctacttttctatttttccttaaaaaataactccaatattttataaagatagaaaaatctacagatggaatgaaaatgtaaagttagagagatctccataaaatagggacttcacaccacactcactgttccttgaatcctgctgcgtgttccgacatgtatgaaatgcttcagaacctgacaggcaaacactgagatatgctcattcaataaacacaagtgtgcgcttataaaacagaaagstgcctctccccaaaggagcctgtcgccaaaatgsaraagggtyttctcaactttacaccaracatttagcaataaaccccttgactaacrackgggttagctmtgatagctctttacagttttataattarcaaaaatarwkkttttttttttttttwwwwscctyaaattagggtaccstaatcaaggcaaaaaacttaagaaatggcttaccgttagcacaacacttgtacagtactacaaaatgcactgtcactaaccaagacattarcggcatgctgaagggtcaccttaaacaaaatgtacagtaatcgaaatgctaaaggcatttacatggaatagacgaggaaggaaaaaagctcgaggttcgatattaaaacaggtgatctggggaggggcttgtatccacactgtttaatggaagcaggcacaacgtgtggctgctgccaactggagtcctaagagaggccttcctttgcagagaatytyrtrymraagtaacagaaataaaggtaccaaaagaggaaaaggaggaaagagaaacgacttgtataaggctttccgctgcatacagcttctyytyktkyyswwtttcttttttttttttaaataaatggtgccaacaagtgtttttgcattcacaccaatgctggttttgaaatcgtacttttcaagggtatttgtgcagatcaacccaagagtgg

SEQ ID NO: 1034 - DNA, 712 bp, Rattus norvegicus
ttttttttttktttttttaaaaatcagarmgygttwaattaattgatgagagaaagctggtccaagaacagcaggcasattctgtggagtragaattagaagcgaggggctccataatcatctggcatccgctcgatgttgtatctgtggttagaaaggkacatgattgggacacmagggatcttccggattcttcgtttgaggtcacggtcaactgtggccacaatgtaacacttgtgstgagttaccctctgcaccasgcagtcatcggcataggttcctttgtgtgtgcatggcaatcggtcaaatcggggatctttggsgattcttaktgcmacacgatacttctgtcctaatttctcaatttcagccaktacacaatcggttatacaagggatacacttggcgtasagacagtccatcattgactgcactaagtccagtttggctttaatggaaaagttgatgaakttggtwtccaccaggatgtggtaaggtggacccagctgtgymtyrkrcyggaagaacaagcaggaaggatgctggggracttctctttccttcagcgcactaggatctttcytttctttctttttaggcttcaacctatccttttctttaagtcgctcatctcttaractaagcattcgcttcatagtcgcatatttccttgttttcttttgcttccccatgttctcgacgcactcctgtt

SEQ ID NO: 1035 - DNA, 842 bp, Rattus norvegicus
ttttttttttttttttttacataatgggtatttttaattataaaattttctgcatgaaatggcttaaaggatctgatatagaatttaaattacaaaagttaaaatwcaataaaatacaatgccaactacacataaataaaaacctaattttcatataaaaatactgtaccgctgttaatacaggaagctactgtttttcctccccgtgtggaggattaaacccagagagttgcatgtgcttcgaagtgagctatagtcccaggaaagaattttgatggtattatttgttttaaaagtcccgctgtgtaaatgatattaaaatctaagtccatgcaattgcaaagtcttcagtagcttatgaactcaactgtagtgtgatgtgtacctgttytaagtacctgtgcaaacttastgagttaaggtctaagtytgaactgctttacaatcctacctgccctaacgtaacaccgcagagagaagccccacacagtaaattagaagcagtaagtgaaaaggtactatgctatacaacgtggtaactcgggtgctatctgtcttatgtacamtgaaattccaccacttaaaggcctaaaaacacgtcagtgtaatgtgaagtaaatgatctgaacttatttataaagagaagtcaacaaatacccatttcgawtttgtgggtaaactgargctgctgggtgccctcagcaatacagtcccgggattttattcttcaggagagagatttaaatccgccatcggggtggtaaattcggagggcgcggaagtaccacagcttaagaaacccagttaggtttcagagtttccttcgccgttctcatgaggct

SEQ ID NO: 1036 - DNA, 899 bp, Rattus norvegicus
  misc_feature (113)..(113): n is a, c, g, or t
ttttttttttttttttagaagaaagagtttaaaaaaaacttgcaggctcagcttacaaagcgtcagacaaacgtccgaagcacgacagagccagaaagagtaaagcagaaacncacactatcctcagaggcacagaatagcagtttgactcgtcacagatgagctctctagagaaggtcaatgacagcttagactcttaagttgttaagtactccaaaggtttgttttattggcatttgaaccawaktcstgcccatggwcaaaggcawaaccctgaacagagkkgggaaatcagcatcttactctcctgatacagcctctgagaatccactcagacactcccacttcaccagtggtmagaraaagggaggtgacttaaggccgkatgtgctgccttcacggggtctgctgatcytgagctggagggcaagragtctttgggtcccaccttttagttccacaagawahcaaggmcagaagtagwkwhywwkhykytwtkkyckgcatcwagctaggtctttattgctgtgtctctcgatttgtaggccactcctcgacttttcagctcccgcacaattccttggggcagacgaccagtgactgacacagcatatacacctggcttaaagttactsacgcgctgccacttggagacccagctgtcctctggactcatcatcgcgatgattccatcaaatgaagagctggtgcagtcgtacaccatctctctgttgcccttcatttgtaggtatgcatcgcmatygtsacacsmatcryattcravctsgycyvkwgycttgactaacgagcacagcaaacaagctcgcagatgccgcaggtcctttggcaccgtctccwgssbmrtkstcgccgtatacgataatacgggcctcgtgccg

SEQ ID NO: 1037 - DNA, 741 bp, Rattus norvegicus
cggccgcgagattttttttktttttktttttttttakgkggswmryktyyakagtmmscmgsrcmdkcccagcthtgggcacmgkgygaagctcgcttctagattcwggaaaatctcatyccattccatccasctycaggactcarggkcmctcctgtgctggtctakggatccatatgagttgatttacttggcggcctgtatctmtgggtctgtggggccatgtgtgtggctccctgaggatgtaaggywtctgktgaargcttctwtgtatggcctyccggtcagctcttgatctgagtgggaccatcckttgggaaacagtccttggatccactctcatttcatccccagcccttgtgcaggctctctcaraggtgacscttcatgtgaagagmtargtgstcsgagcgtgagaaagcacgtgggcagaggccacagcagaaggggcgatgtccmvtgtgcttccggtagtggcgcgtcagttcgtcagagcgagcgaacctccagttgcagccatcccaggagcaggcataaggcttctctccggtgtgcgtgcgcaggtgcgccttcaggtgcgagctcttggtgtagctcttcccgcatccttcgtgcccgcaggtgtgtgccgcctgcctcttttgtgccagagttcgccggctgcgtttgggcggcgcagctcctggggacaagcctgcgtctccggcgatcgcagtggccccgagttctgtgcccaccgcc

SEQ ID NO: 1038 - DNA, 1290 bp, Rattus norvegicus
tttttttttttttttttywcagttcawataatttattgcagttagcacacagtttawaaattcaccaacacaccartagtacrmaactaamcrgtrttgtaagttattccccctcaggaaataraacatactatgattgtcaaagctagatgtcagtctaagatttacaacaawrgaagaatgtgawactaaggaaaagaaaaagcaatcactcacartgaccvcaaaaaaaaaaaaaaaatccaaagagtccgttctttcacagrcattgattgtcttctctarattaatamagattattttarcataamctgtattaaaaaawaacccagaractcttcaagtaactaaagataatgctccaaggccattttcacagctttttttgtttgyttgtttgctygctykwrmygccattacagccaaattaacatacatttgaccaaatatttccrwaacagtccagcaacacacaatggagttttccattcagtatcttaagcacaaaaataggctatgtttacagtagttaaggcgatcaaattttaaacaaaagcaattaaaaaagaaaragggaaaawcaacawccgttttccatgctactcccatagaccttatttgtaagtgcaagacaggaaaacaaacagtgtgcaaaatgctctgccmtgcacgctggccatcagacccacacgtcgagctrcagcctgtgctgccgatacacagtctactaacccccttccccatgtcaatcaaggcagttcagtcctttcagcstggggcttttcagtccatagagtcttttcatgagttagggggtaggggsaaggaaaggwaatakgggagaaaaagaaaagggaagcaaaagggggggagagagagagaatgacctatgacctattgtcaatttgygcagtagytactctaaaatcactcggctgggtacgtgtgtacacmtaaactctgarmtggcaygrgttctgtgcaattacaagtgtggtgtggatggaccctgcacatgcaattctgtaagccgtttgtaaacatttctatgctccttgtaatgtagcgaagttatcgmytygyrgcttaagtttttattcagcttaacagtttcaaacttaaagacgtgggaaaagtcaatttaaattatwtaaaataaaaawaaaaawaaaaacagtgcatttatgttcttcgtaacaccagtttttttttcccaaatggtgctatttttctaaggaaattaaataattttaaactcactcgttaaagttatacaacgcaaacaaagac

SEQ ID NO: 1039 - DNA, 518 bp, Rattus norvegicus
tttttttttttttttttgcgactttgaaagattgtaatatattctgtggaaaacattcggcagagcaaaagccctccctgggccctcccgcagtatgcaaccagtggamcggtctggaaatctgcagctctggaaaggtccctggctcagtccttgaggaatgcaggcagctatatgggaagaacctgctccaggatggttctggatgagatggggatcctatcagggaagatgacttcaaattcgataacaaggtctccacgtttctcaggtgttttgggraggggaarscmttctccaggaactttcctccgcatgccaggcctgatgacatctttgaatacaacaggaatggtcctgccgtccagagtaggaacattcacagtgcaaccacagagagcctcccgaaggctaatcctggctggataaatgacatcagaaccatctctcttgaagatattgtgtggcttgtcctttaaaacaaagacgatgtcagctggaatgttgttcgaggtctg

SEQ ID NO: 1040 - DNA, 732 bp, Rattus norvegicus
ggtcccacaagaacaccaagctaatatctgtaccatatatgcagagggcccggtgcagtcctatgcagacctcatgcttgctccttcagtctctgtgaagccctaagagccctgcttagttaattcagtgggttctcccggtgccctccatcgtgtgtgactattacaatctttcctctcctttttccgaggtgtccacagggatccctaagctctgagggaggggcccagaggagagatccgattctctttaaagctatgatctttcattgggatttagatcaaaactgttgtaataaatcatggcagtgttagcactcttymaaacwswcaywcaymcasayaacacacacacacacacwsasacacaccctstywcwtytgagcttggtctcmagakagagacaactggttcagctccaggcctctgrsastcatgttttcttcctcamatmcatccagtggggatggatcctstgamttaaggggctaccttgggaagcctctgtagcttcagccaggcaagaaagcttmtyccaacttctgtatctggtrggaaggaggactccmtactttttacaatgtctagtcattttcatagtgccccacattcaagaaccagacagcaggatgccttagaagctggctgggttccaggtcagaggctcagtatgagaagaagaaatatgaacagtaaataaaacatttttgtwtwaaaaaaaaaaaaaaaaa

SEQ ID NO: 1041 - DNA, 856 bp, Rattus norvegicus
tttttttttttttttttaaaagaaccacttttgccactggcacaagttttgcactctacagaatggaaagtccaaacagattccckggctgatgctcmtaaacattaaaacattaatacgaaggaactacagaaatgttcaaaagaggaagtgtacttcctttcagagtgtgaactcagaaggccattctgtgaggctgagagttatctggaagacaatgatactgaaatccgaataattccactaacttctgaacccaagactattgagttatttccttttctgagaacatctttttcatactgaaagctgctgcctattatttgagcattttgacagtgtatctccttcaaagggcctcttacacaattccacagaaatacttctgacttttgatgtgtagaacaactaataaagggagatggctttgactctccagcactaatgtgcctgcgtcagtagtatttgaacactccctccatagctacacttcaaggcttttccactccgttgctggaactaacgtctttaaaatattaacagaagtgcctaatccagggatcactgtcaaaaacaacacaggaaatgatcatgtaagaaaagggtgtgagacaaaaaggactgagtcaggaaagagtgcaaggagctgatcccaaataaagtaacaaaattaaggaagaagacacattatatatgtatatatgaactgaagcagagcgtatgaatgcttactctggtgggatgccaggacaacatttataggaaagcttgatgtgtcatgataaggctcagccattgagaaataaggcaatataaaaaaaaagaaaaagaaaaaaaaagaaaacctttgcggccg

SEQ ID NO: 1042 - DNA, 2680 bp, Rattus norvegicus
  misc_feature (6)..(6): n is a, c, g, or t
  misc_feature (2061)..(2061): n is a, c, g, or t
  misc_feature (2079)..(2079): n is a, c, g, or t
  misc_feature (2093)..(2093): n is a, c, g, or t
  misc_feature (2127)..(2127): n is a, c, g, or t
  misc_feature (2223)..(2223): n is a, c, g, or t
  misc_feature (2274)..(2274): n is a, c, g, or t
  misc_feature (2377)..(2377): n is a, c, g, or t
  misc_feature (2502)..(2502): n is a, c, g, or t
ctcgtncscccgcgcrgcctaggcttgccgkgcgagtcggacgtggtccgggmccaccctgctctgtactactactcggctttctcgtcaagatgcctgaggaagtgcaccatggagaggaagaggtggagaccttcgcctttcaggcagaaattgcccagctgatgtccctcatcatcaacactttytactcaaacaaagagattttcctccgggagttgatctctaatgcykmkratgccctgrmcaagattcggtatgagagcctgactgacccttccaagttggacagcgggaaagagctgaagattgacatcatccccaaccctcaggamsscacgctgactttggtggacacaggcattggcatgaccaaggctgacctcataaataacttgggaaccattgctaagtctrrwaywaagsystymatrragsswctccargctggtgcagrcmkcthmakgwttkkkywktttkktgtcggcttmtactctgcctacctggtggcagagaaagtggttgtgatcacgaagcacaacgatgatgagcagtatgcctgggagtcttctgctggtggatcmttcactgkccgtgcagrccacggtgagcccattggccggggtaccaaagtgatcmttcacctcwwwgaagaccagacagagtacttagaggagaggagggtcaaggaggtggtgaagaaacactcacagttcataggctaccccatcaccmtctatctggagaaggaacgcgagaaggagatcagtgatgatgaggcagaggaagagaaaggggagaaggasgaggaagatwmggaggrtkwgragaagcctaagattgaggatgtgggatctgatgaggaggwtkacagcggcmaagrtaaraaaaaraaaamaaaramvmwmrwgsmgaagtacattgaccaggaagagctgaataagacgragcccatctkgaccagaaatcctgatgacatcactcaagrggawtatggtgrattctacaagagcctcaccaatgactgggaagaccacttggcagtcaagcacttctctgtagaagggcagttkgaattcagggcattgctcttcattccccggcgagctccctttgacctctttgagaacaagaagaagaagaacaacatcaaattgtatgtccgtcgtgtgttcatcatggrcagctgtgatgasctgatacctgagtacctcaayttcatccgtggtgtkgttgattccgaggacctgcctctgaacatctcccgagaaatgctccagcagagcaagatcctgaaagtcatccgcaaaaacattgtgaagaagtgccttgagctcttctctgagttggctgargacaaagrgrmctmcaagaaattttatgaggcattctctaagaatttaaagcttggaatccatgaggattccactaaccgtcgccgcctctytgagctccttcgctaccatacctctcagtctggagatgagatgacttccctgtcagagtatgtgtctcgcatgaaggagacacaraagtccatctactatatcactggtgagagcaaagagcaggtggccaactctgccttcgtggagcgtgtgcggaaacggggctttgaggtggtatacatgactgagcccattgatgagtactgcgtacagcagytywwkkwkttckmtkscwmgakcctggtctccrkgmccwmskwggkcmyggagctaccagaggatkaggaararaarararaamwrgakgagagcaaggcaargtttgagaatctctgcaagctcatgaaggagatcttggacaagaaggttgaaaaagtgactatctccaataggcttgtktcttcmccctgctgcattgtgacmagcacytaysgytggacagccaacatggamcggatyatgarggcccaggcmytgcrbgacaactckacmrtgggvtacatgatggcmargaaacacytrvagatcamccytghcsrcmcsakygygragaytytsbgkcagaagsytrakscrkacawwawsgrcaaagytgkcamrrmsbtgbtggtgntshtrtwtvavamtgytntgmtbtyhthtsgntkykmmsdkbassabssccvaacscaywccaacngcatbtaccgcatgattaaaytmggcykgggcatykatraaratraggtcmytgcadadragcccaktghtgywgttchbgwtragatcccccchntggarggygatgrggatgcytskcgcatgraaravgtggattaaagsytmntgggaagcccycsmcctbtgtatagtatcccygtggytcccccwmswgcyttgaytggccbtgacccacytggmtbtbtghtcatgtbdacaaraathtyttntatcckgyccttgtgcsttaaggcargaagatcccctcccacagaatagcaggkwtgggtrwtdtktaktgtgktttkttgtttgttttattwtgttstraaattaaaagtwtgcmardtwarrnwrwwrmarwwwwwwhmvaaaaaaaaawaaaaaarracwwtwgcgkccgcaagcttaktccytwtagtgagggttaattttagcttggcactggccgtcgttttacaacgtcgtgactgggaaaaccctggcgttaccaacttaatcgccttgcagcacatccccctttcgccagctgg

SEQ ID NO: 1043 - DNA, 1180 bp, Rattus norvegicus
  misc_feature (624)..(624): n is a, c, g, or t
  misc_feature (627)..(627): n is a, c, g, or t
tttttttyttttttwtttywytktbkkwwktaaggcaywkwywkywkyytktytackttattcaaataattaatttcttttctctgtgaaactgagtaggactaaagagaggagagcccatatattaaactcttaaatagatmctttgagttcagcgtccagtcaaggagaggcacgggtcacaggtcttatcccaggagatgaggtcaccaaggagcctgtccattrgggaagatagcaaaktsaattcttttaaaraargttctcaaggagaaaaamrraatagaaratccccaagtctctgaaaccgaagtagtctyyccstsctcggkgttgcccrraacagaggttctgagctagcttctgccgagatgtatgactgctccatsctggcatgamcgadagccatgtgcwtgggttagtccagcttccgtgtgcargtcgaggactcargsatctgagccctgtggagactggaaatcacsmwcktsccargtgtggggaggyactgtkcyggttcacctgaaaatawcctttmagattggctggsgttttatmgtctyctttcaagacccggtgtgtgttgttgatgacaatggggkcsgggttcccatagttgggtgnatntgcgtacggatcatagccaagccgggccagcatgggggcaatctgggccatgtccctcaccacgtctctggggatgtggccagtccacttggagagagcttccaggttcacgggtttgatgacctggtccgtggaccgctcaatcttggacaaggagacgcccccasscttgccaatgaggtcctsgtggtgcaggactgtgtcactccaggcgatgcccaggaagtccagsatgcgtttgagtgagcgccggggatgcagcaccaactgctcatagtacacaggcaggcacttgtccctgcccacctccatgcactgtgcgtacatcacctcgatggccttgttccacttggtgaggcagtstcggtagctgctgaggtcaaagcccgcgatggtgaccttgcgtgtgatcatggagtgcacggacgcccggccatcacgcaccattagcaggaatttggagttggggaacaggcgtgccaggyagacggacgacttgagtgtraaggggtccttgttacatagmacgcgtgccggctcgccgtgcctcgtg

SEQ ID NO: 1044 - DNA, 930 bp, Rattus norvegicus
tttttttttttttttttwytttwycacttcttaaatttttatttatttttttaaaatttacttgtttctgcataactttgagtgatgttacatgcttatacaggatgctggggccagtagtagccaaataaaggcwtcaagacatgggtggaaastggaatttccagaggttgtaagcagccatgtgggtggtgggaaatgtccctgtgtcctttgcaagatcagcaacttttcctagtatctgtccttctctccarcattcttacacattgattcagttctaccaggctgtaagttattggytataagttatgagtatcagcggcatagcaaaggctatatggcatcattagacataacctgcaaaagggcacaaatgcattcaggatagggagagctgaatgcaggcatcataagatcaggctggcaggaagaaagtatcctcatcttggaacatggtttccccctacttgcccatcctgrcagagctttggaktggtggagatactgaagagaggactctccccatgtagtaaatgtgtctttatggagatgagaacctgccacagaacagaatgctkytggttttstygtgcytgatgaagaaaaggaaggggtggtcagcacagaatgttgggacaaaagcagcacagcagtattctatgacagcggaggctgctgcagcctctgtgccttcctcattgacctccactacgctcttgtgaacaatcttggacacacacaggtttctctctggagacattgctgataagtcagccttggcctcttggaagacatccactattcccaagcgctgaaacacagactccatgtcataatcctcttgcagtttaaattttgaaaggaaaacctcaacattagtgttcttcataaagtctgggttggtccaggctgttaacttctcaaaag

SEQ ID NO: 1045 - DNA, 786 bp, Rattus norvegicus
acaccaagatgcggatccgggcctttccgatgaccatggatgaaaaatatgtaaacagcatttgggaccttctgaaaaatgcaattcaagaaatccagcgtgcgagaagayrtmcwaamtwcaywgartaacaacttkmttcaaacagttgcagccaaacaaggtgaatctgacccagaraggaaagaaacaagacagaaagtagatgatgacagaaaacacgagatagaagctgytatagtgcggataatgaagtctaggargamgakgcagcacaatgttttagtagcagaggtaactcagcaactgaaggctcgattcttaccaagtccagttgttattaagaaacgtattgaaggacttattgagagagaatatttggcacgaacacytgaggatcgcaaagtatacacatacgtagcataaaatgcattcagaaatttgatttattcttggactgtactcttcgcatggactgggaarttcttttaartcctactattaagacgaccatctcttctgttaaattgcagtacatgttatagaccactcagatcaagcctctactccctytgagagttttcaacatcagttgattgagcttcaggctttccaacgttatccctgtagagatcatctttacagttcctcgggaaaatgtgaatgtgccgcgttttgttttcaatattgtwtgaaaacaggraaaaaaataaaacaaatttrgaaamcmcarmwmawwaaaawaaaawtgttggatttcawwwmmmmaaaaaaaaaaaaaaaaaa

SEQ ID NO: 1046 - DNA, 504 bp, Rattus norvegicus
acccatacaggggagaagccttatcaatgtcaggaatgcaggaaggcattccagtgcaggtcagacctcactcggcatctgagaactcatacaggcgagaggccctatggatgtacggagtgcaggaaggctttctaccgcaagtcagacctcacagtgcatcagaggacacacacmggcgagaarccytacgaatgcaaagagtgcagaaaagccttctactgcaattcacagctcactgtccatcaaagacagcacacaggggagaagccttatgagtgtaaagactgtgggaaagcctttcagtgcaaatatgaactcactcggcatcacagaacacacacaggtgagaaaccgtatacatgtatggagtgccagaaagggttttacaccaagtcagatctctctcgacatctaaaaattcatacagatgacaaaccctgaagatataggagacagtagtatttaataagtcgtccttaactgacatcagagaacacactt

SEQ ID NO: 1047 - DNA, 686 bp, Rattus norvegicus
cggccgctttctccaagcctaccgcgagggggcgctgcgcaccgcactgcagaggtgcatggccgcggcgcttgcccaggaagcagtgcggttgcaactggagttgcgtgctggtgcggagcagctggacagttggctgaccgacgaagagcgctgtttgaattacatcttagcccagaagcccgaccggctcakggacgaagaactcgcggagctggaggatgagttctgcaaactgacgtgtgactccactggccagggtggagccacacaggtagctccagcaggttcgaagtccctggtttcctctccggccgaggagaagccactgccggccgccggscagacttttctgttccayggkcagcysrymgsygarsydsacywdcwgwwbcdksrwsaccakagwsawycgsscrctsartskgcmwsaccagcagacattcgcgcgctcagtgggcctcaagtggcgcakggtagggcgctcgctgcagcgtagctgtcgagcactgagggatcctgccctcgactcgctggcctatgagtatgagcgtsatgggctatatgagcaggccttccagctgctgcgccgtttcatacaagccgasggccgccgtgccacactgcaacgcctagtggaggcgctggaggagaacgagctcactagtctagcagaagatctgcta

SEQ ID NO: 1048 - DNA, 1207 bp, Rattus norvegicus
tttttttttttttttttwwwtkkccccctataactgtttattaggatgagaatatactccaaatcaatagctaaaaaaaataggcaaaatacagagcatgcataaaatacaaagtagcaatttataaatagacagtatctttataaccaatacactaaaacaaataactacaaaagaaaaacaagatgactgactatagcaatgccttctgtgctccccacacatcatgagcactgcaaaagacagaagatttcaccatgaaacacagtcatctatgtaagcccacatagcttttgcaggtatcccaccatccttaataatgtctttgcagttaactttcagaaaacttcagagtaagtgcttaatattatccacaaggaagtaaaactaagtattagtgtgtacattttaatgtgaaactagttgctccatkgatttcaattatgtagkggaaaaatctatttcaggaccctacaatgcctaagtacattctacttaaattcarggyactatyycattttacatactaaaagaacacatgcctttaagtggtaccacttgagcataaattaacttctcatkgtatyytttagacatactaaamccaaaggattaattgaactatactccattatacactgcagaactcaaatataagcattgttaaaataattacccatgctggttggtgaatatggtgataaaattaggwtgcatttcacttactagacgsstykwraaacaaaattaacacttcaaaatgtgatattaccagcataagctagttactgcacaagcaataaaaataccacacaatctactgccaggaaaggagactggttaagctactctggctgccgatcactgcaacagagacacctcagacagaagtctactagactaccaggcagcagggtaactttgaccacataaccacgccctatgcaaaccataacagtcctttgtgtttattaattcttttccagaaaaaaaaatccccataatctttgatgcttacaaaaactaaagaaaaaatttacaacacagacctattaaggcattttagaaactgacttccgcaatgggaaatcttcaagctctcaaaatgctgttatgtttacagggcaatccttagatctgtcaacagatgtactgtattagagagaatgtcttacaagctgctctgaggcaaaacaatagcttattc

SEQ ID NO: 1049 - DNA, 620 bp, Rattus norvegicus
tttttttttttttttktkkkytgcgkaacagtgtttatttcctttaaatacatttaaatawaaaacatcaggcagtggttcagtcaacttaaaaatacaagctgaatgggawtcscatcagtgckgatcawacaaatgaaattctgcataagaaagaagcagawcaactcataagcattgcacwtggactttgccagtctgaggagtcaatcmygtggcatckactactctgtttcaggsaaccttttctcgttcawccaaaaaaggrgswsbtwwraycmshsmchytctgagcrcwgakgcwsrrasscawstrwrgytamaastcatttgtcagtgaattggggaatcacccagctattgcatgkwwatgtggctttwccatggsactacgymwmrtcmrcttttctaacccctgargggtggkargtgggcaacwctgacagcaacttaacaaagcagcatgctgtttaaagtgacacggatagcgwwcttkggaggaagattctcttggctgagraggccctcagtccttgtctccttcagaaagcaccagttctttccacaggcttccttgctacktgcacatgttstggtgggaaaaggacacctgccctcwc

SEQ ID NO: 1050 - DNA, 589 bp, Rattus norvegicus
tttttttttttttttatcctgcataattttattgagattttttttatcattgtaactcaaaacttgccatgactggtggcactatctacctgtgctggtgttattacagaataccacgtgaagactgatgaattggaggagatagtagaatgataacagcatcctgtgaccttaatttagctttatatctagacctaattcttctgatctccctacaatcagtccccctacttgttcccctgaagtaaaattataatgaggatgtaatttctttagtctccctttcaaagaggcggtgatggagaaaagtgtcatgggacagattagaacccatgaagcttgaaaaagaaggccagaacaatagcaagcagccccaggaccttaatcaggaaagacactggggcactagctgaggtctggagagtgcgagtctttaacggcttcaggatccgctgcttctgggtgaggatggmattcctggctccttcccactgcccargtccaactaggcggtactggtaggaattgcagggtccgaagtagagtttcacagccagtttagggtctttgaaaaggagagagatraagc

SEQ ID NO: 1051 - DNA, 552 bp, Rattus norvegicus
cccagggccccccctactcctgcagctgaggccaaggctgcagaagccgctgccagcgcctattacaacccgggcaacccacacaatgtctacatgcccacgagccagccaccaccaccaccctactaccctccagaagacaagaagacccagtagaccctgcccacctcctgcctcttacctgaagaccccttcctgggcctcccatggagctgcatctgggattccaggaggccagggaaggccctgttcttccccaggcctaagtataaagttagcaggagctagccctgatagaaaggtggaactcctggcctctgagagggtsccagctttccaccctagctcagctctcagcgctggtctacccagcctccctttaaccatctctggagctcacaggagcacgggggaaccccttgttcctcatgatagtgggcacacacacacacacacacacacacacacacacacagagggactgtctggccactcctctactgctgtccagccccttgagcctggtgaccatcgatcttcatctattgggct

SEQ ID NO: 1052 - DNA, 1043 bp, Rattus norvegicus
tttttttttttttttttkwwwktwcawhataggtggtttaattgamaattgtataaaagggcahsaaatgtgtcagggaacccadsacaggcccagggcactggtgggaggggctaggcatgatgaactggtgccataraaggcacccctmtgtgtccgtbcatcctacatcgagactgtctgacatcctyacacacatgcagactadaggaaggctaggtgcactctggaagctcctartgctcarttataatgggaggctaggcgcacgcagctgctcaggcccgaggtckarcaggcgcacartgatgtggttggtgcgtgggtgcaaatcccggacggcaaatacagcggwaggaaccatyagtgttgacacarhgcgcattgayscavagtggggaggttgcctcarcctcgtcacactcgttgatgtcsackcargacatgcsggtgatgtccargcggtwrccgtcgaaacaatcacaggtgaagccttctggaacacgtacacagcggccgtgggcgcagccatccaggataccacactcctcggcctctaggccctcatagggctcagacaaggctcctgtatagcttccacgctcagaggattcctcaggctctgggaaggagccacgggtgtctctggaccgatatggccaaccagtgcctcggcttggtgggtcaggagcctcagtctcgccataggggtcaccatcatcctcaaagtccggcatttcgaagggcggggcaccataaggggcctcccggcgagcaaaaggtccaggtgggggtgggtaggggtcatagggtagcacaggtggtggatacagatctggcccataggggagactctgataaggtgggcctatatctgggccatattcataaggaagtccaaagccacccgggcgtggcgggccataagcaggtgggcgcagcacattgcaaagagcctcaaaatcatctgagtcctgggcaggacagagagcacagtccataccccaggcttcaccatagagacagcagcactctgcctcgtg

SEQ ID NO: 1053 - DNA, 648 bp, Rattus norvegicus
tttttttttttttttttkaccagaaaataaagccgttttattattttcgtcttatccaccatakggcctgagggttggggtgggagcagagtaaatggctggccccagatgaaggctctggagtcttctacttggcctgaacagtctyctccagcctgtccaggcgctcttgaagcttttgcactatggcgttgmgattcctcasawcctcctccagccryracaygstktscgagstawgastgckamyrsgctccsgtgtagctcttctgcgagcactgtccargcccctgttgactctyarctccctgckctttgggggcacgtakccatccttgagggaaatgargagggggccagcatcacgaccgctcagccactcctcagctgtgagggcggggtcggrtccggcagtgggtggatacaggtcctcctggaacaggtccgactttctaggcactgtcatggcaataggctcacatttccgctcatgaagcttatagaatctggcaatctcgcacttattcacttccaggccacgtttgggcatgtagcccataccacgttgagactccttggractgaacatggraagataatgcaggaacggagcctcagacgtgatctcaaaataccggatagagctgc

SEQ ID NO: 1054 - DNA, 641 bp, Rattus norvegicus
ttttttttttttttttttcccagtcaccagctgctttattgaacaccgtatttttagctttaraaaggaaggtttcacattcatgcccatgattgtcaaggtccctgggcctagccaagacatccaatcagaggacagacstggccacttcaaggtcttgaaggaaggaaggaagsaaggtcaktatgtcadagttgtaaagactccattcacagkatgaggctcggaraagcggccttgccwtcttcagggggcmtgcccatcagcmtgtggkggctattggtattccttgtaragccgttccagaagttccttcttctsgtcctytgggagraagcttgwcttcgccgcattgatgttcagtctyttgaactcctcttcagkgaagcccatgtcttttttcaccatctggtagtcagtgtccmyrgtgracttgaagatgagggggtcgtccragttgagggagtarttggcytgatcatctttgaagcgaacaactgcatgcgtcgttttgggattccaggcgccartgaggtagctggaccaggggcagacctcaaagtgcatgttttctttcagtagcctgttgtagagggcttcatcctctattgtgtggtagccgtgccccaccggcacgaggc

SEQ ID NO: 1055 - DNA, 951 bp, Rattus norvegicus
cggccgccgcctcctttaggcgtctccccgaagcctcgcccgggttctgactccagccctgatgcggcttctggccccggyctgaagagcaacttgacttcggtgccaatgcccaccagcactggattgttgactctgcctgcttgccctgaggagtccccgctgctcgttggycccatggtgattgactttaatattcctgtggatctggagcttttggcaaagaagaacccakagataaagatgggcggscgttacttccccaaggmctgtatctcccctcacaaggtggccatcattatcccattccgtaaccggcaggagcacctcaaatactggctgtattatttgcatccagtccttcagcgccagcaactcgactatggcatctacgtcatcaatcaggctggagacaccatgtttaatcgagctaagctgctcaacgttggctttcaagaggccttgaaagactatgactacaactgctttgtgttcagtgatgtggacctcattccaatggatgaccataatgcckacaggtgcytttcacagccacggcatatttctgtcgcaatggacaagttcgggtttagcctgccttacgttcartattttggaggtgtctccgytctcagtaaacaacagttccttaccatcaatggatttcctaataattactggggctggggaggagaagatgatgacatttttaacagattagttcataaaggcatgtctatatcacgcccaaatgctgtggtaggcrggtgtcgcatsatccggcactcaagagacaagtttaatgagcccaaccctcagaggtttgaccggatcgcacatacaaaggaaacgatgcgccttgatggtttgaactcacttacctaccaggtgttggacatacagagatacccgttatataccaaaatcacagtggacatcgggaatcactag

SEQ ID NO: 1056 - DNA, 892 bp, Rattus norvegicus
agggaaacaaagktktwtttwywyywykktagcatgtcaagtcyttattaagtaatgtacacattattacagttaagaaattgttgattgtcaaaagaaccttgtatatgtaataactcccctcatatacagaggggagactaatagaaaagtgattggggataagcttcacaggactgaagtagaaaaatatatgaacttatatgtaaagggaaaaaaagaattctacaaaagttctgcaagttgaatgaaaaagaagcgacgatgtwataacaagcatcattaaagacgtgctagtgaccatagtagatatatggcacatggtcgatacatatkkwtwyywywtwttkwktgcacttcarattgaagtttgtttacttgtamcagcaaagtacgcatacatawatacatacacacaatgatatccctggaatgcaaaatctaacacctagggagaaaawagctagcatagcatactcaaaagagaatggttggcatggagccctcagatcggggaaccatggcacacctcgctcctgcagaaagtaacctgtccgctcagcagttagctggaggtttgctatgttctaggaaaacaatgcactcttgtgaatttaaaggacagcactaagcccaggattctcttctacttgttctctacctctggcttctctaccagcttggctttgcttcttctgatccccttgctgactaagggccaagttactcaacaactggtggtcacacaggcccttaatcccagcacttaagaggccgagagccggtggaccactgtgagtctgaggccagccaagtttacacagttagttccaggcaagtcaggattatatagtgaaaacctgtctttgacggaccaaaaaaatgcctcgtg

SEQ ID NO: 1057 - DNA, 980 bp, Rattus norvegicus
ttttttttttttttttttkyyaacgggaagtawattttatttacatttttaaaatckgtaacwagycycyctyccyccttycctttcccararacttgggaagggaaagaacgggaacmtcaaagacctacccccaacatacaaagacgcascccakggstcacaccagcgaatcaaagtgaaagaracatggccyccwaaaaggccccagggctggacagggkarggcaggcctggmaaggkgggtcyccarggaagaaaaggacaaggastaggcaggycasctgaaagggttggaaarcagtccaatgttctcccctcctcttccctytgcacccacacctytgctgggggagggcakgggtccctttatccccccctcaacaccagacaccatgccaragsctgcarccgttwacggtcaggtctytggacacaaaatacttttgctttgtggtctcctgaggtggtcaccaccagggaagcatctttgctgagtgcaaagtccaggatctcagcagtgtggccccggtagwcagtaagcaggcggccagtccgggcatcccagagacgtacaacwccgtycaggctacaggtgtacaccacagcagtgccagcctcccacagcagctgaacaatgcccgactggtgctgacattggtgccgaagtgtctgtgtagacaggtcatagatggccaaggttccatccagatagccaacagcggccagaggcatgacactgcagaagcccaaggactccacggagttggactcactctcctcmycststcccaggctrggctgggaggcgactgtctcaggtctgaacacacccaccaccttgccagtggtggcaactgaccagcttggcctgacagtccacggaaccagtcaggattaagctgccatcctggttggtrrcaacacaggtcagagggccctgatgaccctcagtccctttcagtacatggatggggttc

SEQ ID NO: 1058 - DNA, 1024 bp, Rattus norvegicus
tttttttttttttttttyyytttgkaacgaaaggctttattgctacctttaracaccccgtgtatagcacatacaaatccccgtacagagagtcgttcaagcagtaatactgaraaacatgaacatacacaaaaagattaaaaaattagacatttagattactagaaattttccaagaaaaatttaaaatgtgaagtgctttttagaaactacactacacacaccagtgtaaatttggkttttattaacaatcaacttgaaacattgcatytaaatgtgcaccagttacgcgcyttcatcgctcactccscacagacaagkgcctttgacctccctacgctttgggctttccttgagctgcattatttcaaaccagatttgaacacggagtatttcaaatatgcatgtgcatytaaccacacccacaagatcttmavcytgcccacacagscttmastytyctgkcacttaracatgacccarrgccttaaactatcctaycctcaactgcctgagcctgcacatctgtgtccacttggacacacccacaggtttagaaactaagcctacatgactgaagagtgtaccgaaaccagaaaggagagtcagagaaacctagactaagaagagaatgcttacatttccaggaaattcttgtgatacacttgagcacaacccccaactactcacttgtggcagctaaagtcagagctgtgtgaacgggtctatgacatacggggtaaaggccaagttagagagggcggccagtgacaccctgagactacttcttcttcacttgacccacaagcacaagccctcctggcctggggcatcatcccagatctgcttggtccaactacatgccatcttcccactgcatctaagctaaagtgaggagcaatggggtagacagagagccctgcaaattactcagaggcccaggactagagaagactggaagagcccagagctctgccagaccttcataccatgccttgccagtctcctgcactgagtcgcccat

SEQ ID NO: 1059 - DNA, 890 bp, Rattus norvegicus
cacgagggccgcgaagctttttttttttttttttttttwkagaataaatagaactttattctttctccagtagatctcagtggaaacccagcaggaacaagtgcaccagtgggctccagggtgagaccccacccaggcargagggcaaggtagagcctgctcccccagcccaggggtgtaggggaggggaccccctggagtcccgtcctgcggggcaaggagggggctraggggttasgggtargctggggggaattggwggaaytcaggccasaggygtgtgtgtgtatgtgtgwgtttgtgtgtgtgtgtgygtccacgcatgakkacatgcgcatgtgtgttggasggscscatggggtgctggtggctatgaggctgggggctgggktaaacttggaccccttagccggccccttcacagtggggctggggcttggatgaagtgagctctgacgggcagtgaggagtaacagcctactcatcccaggggccctagcttcacccttacccygcttcttggtgagtaaggasacaagccaaaagccwggatctcctcctcccaggggtagctgcccaagatgcccacacccagtggctakgcaaagggaggakggagctgctttcctgcacagggtaggraaggtggccttggaaagttagtttttcwcagtattagagaaawctgaggagaaaagmctggaggtgggagcatccgctcggacatcaggrragaggggagccctkmtragysstgsscatmmccagggcccacccccttcagctctmsatyswgctcccccaatacacagcacaaattccttcagtataaatgtgcttaaaatgaaaattcttattaaaaaaaaacaaaacaaaaaaaattaaaataa

SEQ ID NO: 1060 - DNA, 624 bp, Rattus norvegicus
tttttttttttttttttgggaggtttgggttgggggctgtatttwktytwtktwtkttccaggggaaaaaaaaactttaatgatgacmcagtttcctgacaataaaggaacgctgaraacaagcgtcgkgcgtcacgtcgggsagagcggaagtaagctccgacgccttcctyttsggmaacccctytcagccaagagctcaagtgaractygggcggkgggaaatggaragtcctttgggaggacatttacagaaaacctgtgagtcccctccaaaggctagctgacaaatcacaggtagkgccttcctccctcctttccaragtcaggtgaagaggctmgcaaagttgttgagcatcagctggatcagctgcccagggtaraccacgtgggccgccatgtcggaagcctcctgctmaggtcgaaacagsgtcggtccaaacacaattcccaggttgtgggcagtcaytcggktcttatcckagtgtgcgatcactctgcacagatgttccaggatgtactgcagagtgtcatggttgggcctcggcaacgagtctattaatttctgtattttagagaggcagtgctctggctcagaaagttcctgagataagtagagatctt

SEQ ID NO: 1061 - DNA, 881 bp, Rattus norvegicus
gtttttttwttyttkttttataagaaatgtccagttttgagtgattgtagtatggcayggmykywmwggttttgttaattatttcaggtttttaacaaatgttcatgaaagaacctatttgatttactgcagagaaaaatactttttagtctggatttctgccctacttagawttttttttttaaagtataagcatggattgccmattccacttgatgtaaacaaaactttttatacataatatataataacttattgtatcagtccaggttcagaaacttgtggtaggccagtttcagatagtttcatttcacctgtaaactgyatcacttttactgawattgtaattttcaaatgtataatatgtttacaratgtgccctgcatttagwagctttgytcctatttttcttttttttttcctttttggttgagtctcctgcctgccaaaagctaggatgcttcaggcccctgtacatcagtgaggcatccttgagctttaaagcactgagcaaactggaaaatgcaacacgccacatactgaactgaaaagtctgtgttttgtgttccttttttttttttaatttttaataaaaattttcaaaaagttaaaaaaattttsrtkmmagaaaaacgaggctccagtttgttttataggttttaaagttctgccgtgtgtttaattgccttgtgtgaccacttgtcgccttagggctgaatccttaccccacttttattaagtgtccgttttgcttgcctggaattttaaagttggtctgttgcacaaatcacaaaaacaaaagaacaaaaaaatacttcctaggtttatggcatacaaggttgaatgaacatacttaaaaaaaaaaaaaaaaaaccctcgtg

SEQ ID NO: 1062 - DNA, 1065 bp, Rattus norvegicus
cacgaggggccgcaacaaaatggatgtgcccagcaagtacaaggtggagatcctctatgaagacgagcccctgaaggaatactacaccttaatggacatagcctacatctacccgtggcggaggaatgggcctctccccctcaagtaccgtgtccagccagcctgcaagaggctcaccctacccacagtgccaactccctcagaaggcaccaacaccagcggggcctccgagtgtgagtcagtcagcgacaaggctcccagccctgccacccttccggccacctcctcctccttgcccagccctgcgaccccatcccatggstctcccagctcccamggscccccagcmacccatcctacctcccccactmcaccttcaactgctgctggaaccmccacagytaccaatgggggcacttcgaactgcctgcagacgccatcctccaccagcagggggcgcaakatsactgttaatggagctcctkgccccccttaacttgaggaaagggaccctytccttccgcagccatcttttccctccttttwactttttctggycccccytttccactttgactttccctggttcctcccatcttcagagtgggaggtgggttttataaataaatctatctatatatawawaaawawawawawrwamawarraaaaaccaaawawamawamwwawwwtctawrrammaammarawwaawwwaaatgccacacacacacaccattgtaccctgttagaaaacagaaggaaatcgtcctcataaacttaaggtgctggcagttggcttgttggcttagtggacactatcattacaaagctctcaggtgagacttcccatttccaagaagggatggagtatattttactgtctctgatgttccctcttcagtttaaatcaccaataaaagctgtattaaatcattgaaatgctaagtctgaatcccccattctgaacacttactcaaaaatctagttagaatcccacattgatacctttctcacttcatatattctaatagagtttgaagcttttgaaattaaacagttcgagc

SEQ ID NO: 1063 - DNA, 940 bp, Rattus norvegicus
ttttttttttttttttttgakttawgaaaaataaatttattaywtwwywyyttkttttttaacmayghdsaattttttttattcagaatacttgkgtcattcatgtaaaatagtttgatacagtacgttgtatgttatagctttttattttcccctcaaaagttctaaggctctccyactccctctcctttytgaagtaagggcaccctaaaaatgtgcgaacaactttttaaaaagaaagttaactgaacaaaactgtwatagcactacactaggcagcttaaatcaggacagaagagtgcwcactgatgccgtgcctcacggargtcgccactcacgcttttgtaatcagaaagcatgctcacaaatcagcaacaccaacaagaaaaaggaaacactgtctgcgacaatcatttcagtttgcggaaccaacaggcttctatcaatgacaacatattaatcaaatarcagctttaggaccagtcaagtcataggttgaaaataaaaacmkwybybkmvgyygsaamttawtctttgkgagkkytgaaacctgtcagtagaaactatgtggttcttttgtactttcaaaacaatccaagcaatattcttggtcataaaacactgatttatgtagaagatgaatcaacccactgataagacactaaaaagaaagtataccaaaataatctttaagtctcggttattttgttaacataatctgtgtttcaagtaccagttaaaccttgcgtctgtgtgtactattggtcagataacgctgttacactgaaagtcaccacacatgaggacaaatgctcgccctagcacatttcacagcttcaactgctacagactgtcactgaaaactatgcttggtcagtctaaaccatgtcaagtaaactatggaaggagcaaacccacaccacaactgtgctagcacttt

SEQ ID NO: 1064 - DNA, 515 bp, Rattus norvegicus
ggccagaagctatcataagttaagcactggatttccattccaagtcaagagactgaagctgatgtgttgccattttcaaagtcaaagcaaaaccagctagcttttcaacccagtggattctttgcttccccttcccagattattactactattgtaataatctaggagtgccaggagagaaagggatatgagagcagagctgagctcactgagtatggaaagtcttggcctgagttttcaggaggatgctccactgtggacacagggagacgacagaagatgaattagcctctccctgtctgaaatacctcttaatagataagccaaggccatkaacattattgtctccaaggcatarccagtcaggacacttgtgtcaaacactatgatgtcccctagtgcatagtaataatctgatatctctgctcccaccatgcctgggggataaaatgatagcagagacttctctcctttgatgctatctgattcccaacaaaatcttgacatgagatacc

SEQ ID NO: 1065 - DNA, 707 bp, Rattus norvegicus
ttcccagtcacgacgttgtaaaacgacggccagtgccaagctaaaattaaccctcactaaagggaataagcttgcggccgcgagattttttttttttttttttttagagccaaatgaaagtctttattccagccatctctgagtgcattcaggtatttgggacccaagtataaccccaagcatttagaacaaaacccacattctattatcttgctcagcagctgcagggagcttttgcccaagcaggcagtttaacagatgccaagataagcagatagttggaggaggaggtttaaacagagccatgataaattatcagaggcaattccatgagattctttatcaagggaatcaaattctagttgaagctacaatgtcctcagcaagaataagagatggaggacccaagaactttgtcttgtcacaaatgtatagtttatcytcwygtgyygaaagggcataaataataggattttaactcttgaattttttatggtttttacccctttagaaagtacttattaccaatgactgtgttttaaaactttaccacacaaatacaaaagaaatggaatcacaattcaaatactttcatgttcagatacatcaaattcaaatacatctgctacatgtaataaaggtatttaaaatctaagagtgggtgaaagcatgaggctttcctaagtgatctgaagtagaattaggcc

SEQ ID NO: 1066 - DNA, 804 bp, Rattus norvegicus
ttttttttttttttttttaaataaagccttcwttkdyttttwttkywywtcatawaaaacaacttcactgtatttaaarcacatrwdkwywttywywwkytgtagaaatcsaaacttctggghtttttctgghcccabartcyasactgggtcaaakakgsctaacacaaatgggcakagcccacaarcatgcttactttgrgggtcttcaaarctgtactgggscctactcacagtcctacttgaasaatgctggygacastsgyaagtgtctgggcargcacadggcggaasagcacctatgacaatagtggtgcaggctgcccatcctgtctggtccgccgtggtgtgcttggctgtgctggacactggcaagagaagaggcttgggtcttggcctggtcagctggtatggcccactgcctttcaggtacacataggatggggaccctgcttgggccaaagggggaaaactagtgctggctgaggggggagggtctgctctgagaccaagggtgacacacacagttagagtgcagaagacttcttgtcctttacacagacacaggtccacgtcctacgacatactgtggaggcctcccttacactaggtgctcaggcctctggcaggtctaactgggtggaggacggtcatttctgatcctttttctttcggcccgagggctgccgcctcttctgtctgagcttctccttgcgggcggcagcagtcgtgaaggtgacacattgagcatccaggatgtccagcagcttgcccatggccacaggaatgccgttctgcttcagc

SEQ ID NO: 1067 - DNA, 959 bp, Rattus norvegicus
gtaaawwkytkwytwktttwytwtkttaaaaaaaggatggcacatttattgctacataaatgttatatacataactgtgttttctgttacagcgacagaaaaaaaaatttgaacttcttgctgctggttgaaaaggtttatcaataataccttgaatttgacacaggatacaaatctgcaataaaccaacaatggaaactggagaacgagatgaaaagcagcccatctccaacaattcgctctcacaatactccataggaactacacggtatgctagaacctactatgctcttaaaatgctattgtaaatttctgatattaatgaacaggttatggtaaataaccctacattttctttaactacytaatataataaaataaagtaagaaactttttactgaaaacttttgatttcaaaaatctagaaagagymwyrtktagaattcaagaaattttcttacaagattattgtataaaagactagctacagtgaaaaataagccaaatgttttttctttctattttatgaargaaagcttytgggcattctgcaaagtytaacatagcgaaaaagacaacaagctctgaagaaaaaaaaaggccaggcagtggcttatgttcactcccacgtcatagcaacaattctgttttagctgattaacactgaaatgaagaacaaggccacagagaaagtctgatgtaactggagaacatatacagattaagtccactacgttcaccaaaaactgacttgttagaaatagtcctgatgagaatctgaagtgctgtcttaatggtttttgttctttcaaattctccggtgtctgtaagttacagaacggtctgggatttttcttctgtgtgcggattgccactgatgttggctctaaggagtaacttagccaagaccattgtgctcagcatgttttcctctcccagggctgctgtggtggaagaca

SEQ ID NO: 1068 - DNA, 619 bp, Rattus norvegicus
tttttttttttttttttkwtkaaagatacggacaagcttcatgttggtctgagcgggggcgttgcactctgggcagtttgtgttgaactggagcacctacaacataatacagggcacagactgagcactcccgcccattcgagctgagacattccgctggtggttacccacgtgagctgtgacagtgacacactggatactcatcagactcaacccataaccccactacgtgttccatgggagccaacaccacgcacttcgtttctaaggtcttcctcttccgacttctcttctggtgcttctgcttggagccccagcatctcagcttgctgtggggtccggtcgtagtatgtgatcaccaaggcgctatctttttgaggagcgtgtgggttttctacaaagctgtttcccgagggatcatcaatgatcagcgtgaacggggaagccatttgctttaggtccttcagtttgccaatgaactcatcaattctttcggctatagcaccttccattgcccgtcgtgtcsgctggtcctgyyycrkgccsaagatttgccggcttatgagtccttcacagtggtcagagctcccttctggctgaaaactggaatttcaaaatc

SEQ ID NO: 1069 - DNA, 524 bp, Rattus norvegicus
cggccgctgcaraagcgcactttgctgaacaccccgaggacgtgcctctcgcacagggagcgcccgtctttgctggggctggagcggcgcttggaggccgacacccggtcgctgttggactccctcgcctgccgcttctgccggatcaaggagctggctatcgccgcagccatagctgctcagcgcgggccggaggccccgggctccactgcgccctcgggttccygctccgccgggatgagggcaggacctcgggggcctggaggaatadgacaggcgcggggaggcagtgctaatatttgaggaggttgcagtatcgaaaacctgsagcccacaaggttaktcagagtctgggcagtgtggcaacamaacstgtgaaaatccggatgtaaacttcsccaaccactggcggykggggcggggcggtcccaggccttcttgcgaagtagacgtttgtaccccaaacttgcaccccaaggcgattcacgtccaaagggcggtggggagtttggtcacactgcgtt

SEQ ID NO: 1070 - DNA, 931 bp, Rattus norvegicus
gacacttaattagtcatgtttaattcactgaacgcaagattagattgatgcatatccaaacacgctattgcaatgcttttttaaaggacagtaaaaatgttgtcatagtaacattatctttagatattgctgaacacaasactttccctgaggtgtamacatcaaataacttgawywkytttwywywtywkycccattaaacagtttattacaacactacatctattgtaatcaaattggtgctgtttacagacattatcatatgaacattttawcaagaacaaactactataaaawcwagcatttacttgactttttccaatwgcttgcacattataatggccaratatataaccagtaatamagttgcaaaagctattaactttttaaatcacacagtttccttcaaataaaacagttaagcaacataawmaataawwktwkwkytwytkkttaccawtwatgcagatttgctttattcagatctattcctgttcagtttatccatgaatccttacaggttcagttcaatcaagaagcaaactgytggacaagcgtcactttccccgtgaagamtgctttgtcttgraaggtgttcctcttccttcagcttctaacgatgacggtattctcgctctcggtcgcgctcccggtcacgatcccgatcgcgatyccggtgtmtctctcgctctctgcttctctctstgymataatcatcatggcgatctctactccgagatttatgacgtcgactcttttcccgtgatctactatggtccctttctcttgatcgttcacgtcttgatccagacccataggacttggactcaattccatgaaggcagtcttgcaaagagctaataagaactttgcagcgatcgtcggcagatactttggattgtttaattagagaaattgctgttaccaatgt

SEQ ID NO: 1071 - DNA, 575 bp, Rattus norvegicus
tttttttttttttttttwykkwkamagatcccgttttcttttatttawacaaaaaaaaaaagtttctttttaaatawaatttaagaacccccttccaagcaccggkgtckgccycckgttgaccgccaccaccctcckgccccttttacaacatcacccccccttccctycactyamaacacagcttggrgsmacttarrgsgagggaaggaggaaggaactaactgtctgaggctatggcatttcaraggcactgttctavaacatatcaacgggtccttgttcccaacaggagatagtcgaaccakgtacccttcaacgcacaaaatctggacaaggggggtggggagggaaragaaggaggrawaraaataacaaaataaaaawtartwaaactccagaaccttcaatatgaaggcasatgagggaaggagcatttacaagggaaaatgattgcctttggbggkgacagcaagttgggacatcagaatccaatgrttacatcaccgagtcctgamagccccgtcctgccttctgggacggsattttccacycccaagytsgyrggctggtca

SEQ ID NO: 1072 - DNA, 721 bp, Rattus norvegicus
  misc_feature (630)..(630): n is a, c, g, or t
  misc_feature (678)..(678): n is a, c, g, or t
tttttttttttttttttwwyytwaagtaaatcagtggctttatttttcttcagtacagagcacggttatggtaggccattctacatttcttcagtatagagcatwywkwtwtwywykkktwyyttaagaaaatcaatagctttatttttcatcaatacacaattagaaaattaggttttgtgatgtaaactagaatatatasaaatctgagaagcacacgatggraggaagcccggctgcctagggtctgcccatcagaggggakgccargtctttgatggttctggagttcagctgagggatcgtgctgatcttcargagcctgctgctggcatatttgttcttgacagcgatgaacttggtgaggttttcattgactttcacgacgtkcttggscakgtgctgcatgacttccagtatttcactctccatgtagcctgtgtaatackgckgckttaaattccattttccktggsccagcaccttctgagagaggcaggaagcagcagctgcgacctgagaagggtggtaatgcaccatgtcktattcgacgagggtcagctccatcaggtacttggctaacgtgtgctgttcaacatccacctccccggcttttgaggctcgccttangaagtggagtggcaaaggccggcccaactcgaatttcaactctttcanaatcagagtctccatttctcggatttgggaactggtgtaagca

SEQ ID NO: 1073 - DNA, 561 bp, Rattus norvegicus
ttttttttttttttttttgagtttgaaattaaactttactcttttcaaagtaatgtaacttagaaatgaatagaggtttaaataaaccacacagaagtcagacagacaaggaaatgggsagacagacagacagacagaagagggctggygacagtcagctgtggtcagatcttcttctccatcttagcaatgagttcatcgcagatcctgttcagttcatcgttctctttagtcttctgctccacagtcttctccagtgactggatctgcaactgtgccttcctcaggcttgcctggagagccagtgcctctgcttgggccttgcttcgcacttgggsgatctcttcatttgccatcttgagtttttcttctgcgtgggccttcagcgcctggtacctctggccttctttyccaatcttcactatgtaatcctcaacacacttcttcagtgaatcttcattctwswggtrgccttcaatcacttccttctgcttctcaaaccgcttgaagaggtcagagaaggacttctccatagagttcagatccgcagtaagcctcgtg

SEQ ID NO: 1074 - DNA, 451 bp, Rattus norvegicus
ttwttttttttttttttwacaggagaagcagaggctttattaaggtctggcagatgaggcsaaggtggaactggacctgggtaggcctagggcagagagctgtccctgcctycacccaacactccccacccccagctgsctccatgtgctcctgcctcccagagcacagyaccaagaacacaggaccccagcccarggcakaactttgtctccctcadgggctgagggggaaracagggtgttctgaggatccccttggccctgctgccatwataaacacasaaagccccttatctgtccccagaacagaacactggttctctgtggagggcgtggggaacttggcccctgagcaagacctaggccgaagccaagctgaactgagggtacaggtgaaccacagcgaacttcagttactgcctttagacttgacctgtccactgtctttccc

SEQ ID NO: 1075 - DNA, 521 bp, Rattus norvegicus
tttttttkwwtkkywttcawatataataattataataaaaatatacattaaacaaaacaaaacaaaaaaaaaaaaacccaaacaagacagaaatttagctgggcttccagcaccgttcacccctatccccaacccccacccagacactctcctctcctytccctccacagggtctcactctcccaagtccccagtaccatgaccaccttcagtggctgaaggagacttcaaatgggtcaactgggtggggaagaggaagggcaggacataagtaaaatgggctgaggagtgcctgcatcaggaaaggggaggcccaccctacccaagagcacccagacgcctgcctcactagggcagtgaggaagactgakcaagcccaggcagctgacagcctcctctggtctccattgagtccctgtacgcatgctctgtttattcccgtatcaattcttatccttcccttytacgctgtgtgcaaggggacaaaaaggggccagtgtggcttcccytcrwgacccttt

SEQ ID NO: 1076 - DNA, 517 bp, Rattus norvegicus
atcttgaaattggaaattggaggccagagcctcaacctggactgcagagagtataacgcagacaaggccattgtggacagcggcaccacactcttgcgcctgccccagaaggtgtttgatgcagtggtggaagccgtggcacgcacatctctgattccagagttttctgatggcttctggacgggggcccagctggcatgctggacaaattctgaaactccatgggcgtatttccctaagatttctatctacctgagagatgagaacgccagtcgctccttccgaatcaccattctgccgcagctctacattcagccttgaactcagctcttctaagagggatgtctccaactggcttctctgtctgttagtctggaacttcagccgggcatctgaaggccttccagactcgctgtatcttgattactcttgatttccaagttttcaggtcttttctacttcagagagaaatgataataaaaaacacctcattgtgaaccaaaaaaaaaaaaaaaaa

SEQ ID NO: 1077 - DNA, 639 bp, Rattus norvegicus
tttttttttttttttktwtaaataattacagawttatttagccagtccccggctgctgggcaaccaggtgccttctarcagcacaagccacaagtcatggactcccgtgtccacgactccttacagtgaaaaccgcagcaagacatctctgggcctgcattgctgcactctgtaratattactgcggacccctgacgccaaagcttttcctccatctttaaaargcaagtckagagatgacaggggcaggcacgawmgttagctgcaccgggctctgccttggctcctckcaracttcaaaagtcagcggctgtcakagccaggcctmtgctccggaaccatcacctycaraacagttccagggctcaraycakgggcttcaaggscatgctgcctgtcacctgccgctcctgcactgagatgcgactctctttaccatcctcctgtgcaacaggctgacacccatgcaacgtctcctgcactggagcagcastgttgtgaccgggataatcttctatctccacaggatcttgtcctcgagcctcagrgggtaagacctsrytgtcctttggtttcttgaccacctttttgatatagagaaaaaccacaaagatggtgatgaggatgaccatcacgacg

SEQ ID NO: 1078 - DNA, 483 bp, Rattus norvegicus
gagatccgagtgcccgacatcaagaaggaccagggctccaaggggccagttacaaagtgtctcctgctgcatgaggtgcccacaggagagattgtggttcgccttgacctgcagttgtttgatgagccgtagcagccctgggatgatcatagatgacttccttctcaaggccccgtgcgggcacgctgtctggtggtcagccacggagcaacagggacggcagacgaagcccctcgaggctgtgaggagttgttttcgacaatcctgaccttcgaaccatgtctcattttgtgaatccaaattctctttccccttgtccttcccatggtcwtgtcatggcttmtagagtctctgaaatccaggaccttcaatgaggttccattgggagcttggatccttgcctggactggaggtgtgggtctgktttctataaaatagakktrtmmacgcagtgactgtawwwwrraaaaaaaaaaaaaaaaa

SEQ ID NO: 1079 - DNA, 866 bp, Rattus norvegicus
tttttttttttttttttwaagaaacaacaaaatatttattttaaggstggggattacggaaaatctaaataatggaaactggactctcctctgggtcttctaggaaatcagaggcagcaccctctgcttcagctcgatgctttccaagtttagcaatcaattctttcgctggattgaaaacgccattggtctgctggtcacagacatagcagcgcgaggtggtgcggaaatgctgcagtgcacagctctcgcagaaataatgcctacacttggtaacaactggattttggaaggtctggcgacagatgaaacatttgaatggtatttcctcatcatcgcttcccacttcatagttttcatcctcatagacgccatagcgaccctcatcaagctcacgttcgatctgccacccgtgcttgtaatctgaacggtcatgaaggaatttgsagctgtccccgaagccgcaraatccagtctccttgtagtccttgcagatgtcgggctggtaatcccagcgcacggtggsacgtagatgctcaggggctcggatggggcctttcctcaccatcccggaggaagcattgcccatagatgtatccttgggcttcacgtatttctgataattattgattccccgatagatcttgtcatcttccttgcccctcagctcctcctggatcttctggctccgctcaaagatggactgtgcatctcgttccttctcagtgtccagttcatagacagcggtcgcccccatatcttcgggccctacgggttttgctgaacgggtagacttgtaggtcacgccaagaccctcaggttcattctcatcctcactactcaaaccgccgtagtttctcgtgccg

SEQ ID NO: 1080 - DNA, 518 bp, Rattus norvegicus
ttttttttttttttttttacccggcagttgtttttattttaaggggcggaggtgacagaagcgaccacacagggcgacaatgcatccccttcttcctttctgtttttcttaaagtcagtatcctccagtttcagcatctccaatccagaagctctggaattacacatgtccatcgccaggcccagacagtgtgtcctctgggctggggatgtagctcagcacagcatttgcctagcttgttccttgttttggwtcccaacccgagagaagaccctggctgagtcagcgacgcacaagtctcacatcctagggatgggaggggaggggcaccccagggcggagctccaccctccttcttgtcctttgscagcgaaggcaccaggcggctgccagcagcaccactgtgagaggcagtagcagcaggagccacagctgcctgggctgaggctttggaagctccgtggstcctaaggctccaggactctctgggggaagcacggtggaggagtccggctggc

SEQ ID NO: 1081 - DNA, 620 bp, Rattus norvegicus
gcatgcctgcaggtcgackwtttykwkykkyykyybrsrcwgkacattctttattactgtccatacccagtaaagtgactttgtgtgaacattctctcactttttcttcttgcctttcggagwttcaatgggcttcccctcagccaaagccaactgtttctttagatccaagagtttagccacttctgcagcaacctggttcttgtcwgccttctgtrctttcagttcccgaactatgtttccctgtttggttacytcatccaccagcacttgtatgtcctgcgaccctgctgtagtaactgcctcaacaactgctggcttgggggaccctttagcctggccccctccaaagcgctgcctcaaattttcaawctggkcattttccaatttctggaacaaaggactgactgtgccaattcggtggcctgctggtaaggtacaaatgaarcttgtggcaaggatgcggcaggctgcctctgggagctggagctgggtctgaatggtggagctgactgtgggcatgtacggctggagcatgacagacagcaaggcagctatgttcactgccattcctgtcaccgtgcctgcccgctgcctgtccatctcatcgcctttaatcc

SEQ ID NO: 1082 - DNA, 352 bp, Rattus norvegicus
ttttttttttttttttyccackgaacagttgtttttaattccaatctgctccttaratgcctgctttcatacagaggkgagagtcacaactgggacacaaagatgggatgaaccctascagggtgattgaaggtggcttctgcactccaragggagagcgctctccctccgytgcytagcccatacaggactmagtcctcccctggagctcacacagatgaccttcagtgagtttatctgccatggagccaaagatgggtcgtsctsstgmcsmwcataggatttctgggtggatgtcccaggagagagcctccttgttttgggccgagtgggcgtgtccacacaggacgtc

SEQ ID NO: 1083 - DNA, 444 bp, Rattus norvegicus
ctcgtgatcgtaatcttcaagaagataacctcgagcgggtcaacttctggtcagctgccaatgtggctgtgctgctgctggtggccgtcctgmagrkktgcacactgaagcgcttcttccatgacaagtgccctgtgcccacgtagccccagccacagaggatgacggaaacaggagggcatgggtgtgtgacttgctggacacctcccggactcagatgagacactgcacagttgggtccttagcagtggccccatgtgtgtcccttcctcagtgaccagggagtgccaatggctcgtagacccckksskkskstctgggtgcagcacctcagacaaggctgaggtgccagagctggcctatgagcctaagggacaagggcattcgtcctgggcactggagtcaataaattatggtcagaaaagttaaaaaaaaaaaaaaaaa

SEQ ID NO: 1084 - DNA, 1172 bp, Rattus norvegicus
  misc_feature (718)..(718): n is a, c, g, or t
  misc_feature (904)..(904): n is a, c, g, or t
tttttttttttttttttcaatcattgaaatatattcttggaaatgtacttttggataagtaaggctaagccagttggacctctggttgtctagtcattgtgagaagtaaacctagcaaaaatcttgttctatttttcaatcaaaaagcaactacgaatgcatattacaagcaaatggatgtttttaatgmccaattgggtaaggacatccctatcttaactggcctgaatttcttctggtagtgtcaattcaactttcagaagtgccacttaaggaggtttgtttgatttattttgwttgtttttgtaatgcactgtttttaatcttttttkttttttttggttttaaaagcacaatcactaaactttatttgtaaaccattgtaactattaaccttttttgtcttattgaggwakctgttgagaagtgtttttagcctgttttgttaatgctctgtgtttctatttgcaatatttgaatggtgacagctagcaaggtcaggtacctymtcgtgsgctgtgaaccaagtggttccaattttttgtggacttaaararaaaaaaaaaaaaaaaaaaaaactcgaggtcgacggtatcgataagcttgatatcgcttttccagttctcctttcaagctttctgttatgttgattttgcctgaagtagatgagggcccttactattatggtgattagttttttgtttgtttaattcctttntatattaaagaaagatggttattcagatattagatttgaaaggttagtagtttaaaaattagcaagccacatgtattttggccccttctgctttattctcccaataaaatgcttgttgggaccctaaggtgaccctgtaccccttgatgttaataacattggcattgtagcttaaatccctagaanattgtatggaccaaaggccaaatattagtgatcaggaataccactttctttgtccgaatgacttttattctactatcactgtgaaagataatttccttgtgttgtgtttactgactggggaaccttagtctatctgcttaagccgactacgactgatgcacttagcttaaccatcagctgactatgcttgctgaaggagcatggttcagacagtagcacggaatggaatcaccttgactgaattggggtttgagttcccaaatggttg

SEQ ID NO: 1085 - DNA, 834 bp, Rattus norvegicus
cggccgctgcagcgccgtcccctggtgggcccaccacgatgatgccctcgccgtcgcctactgggatggcgatttcgccgtccgctgctgtggcttcctcgggtgccttggctcggcgcacactggctgccagcaccttggccgccacacccggccctgacagctctgggtgcaaccgtaggtggcgtgccaggctcttaggctggctgaagcctctgccgcagcgcgggcacacgaagggctttagaccactgtgggagcgccgcagtcggggcaagtataaggtttctcgcctgkgtggatgcgctggtgctgcatgaggtttgagctccagctaaagcgcttgccgcattcagagcaggcgtacggcttctcgcctgtgtggatgcgccggtgctgcaccaggtgcgagctctgcgagaaggtcttgccgcagtcggtacaggcgttaggccgctcgcccgtgtgcgtgcgttggtgccgcgtcagcttcgaccagtggctgaagcttttgccacactcagtgcagatgtagggtgcaggtggccgcggccggggtgggggcccargaggaggtgcagactgaggtggggaaagcttgttcgggggccagcttgggacgtcgtcgtcatccatgatgaggatgtccactgggttctcatgactggccatctgctggtcctcagaatccagtggccctggagaccaagcttcttcccgaagctccatgtctgggtcccgagagtcgtctcatgacgccacttccggaattatctaggaccctggtcctccgtcctgctctatggcgcctcgctcggaggggctcgggccccg

SEQ ID NO: 1086 - DNA, 724 bp, Rattus norvegicus
  misc_feature (87)..(87): n is a, c, g, or t
tttttttttttttttttyywwkwkwyywkbbbbccmmsgagagaggatttatttgwktyccctgggacgggaacagggagagtccanaagagccaargyttcarggacacarscagktkcagagaktctararaacccgggtgmaytcctaycacggggtccrkytggrttabgaraacaggcatgggcaactctgtgcamagccaktgtctactccacgyccttcakgaactccaggaastcgtcatartcgattcggscatcgttgttcttgtcaccgtccttcatgagctcwtcgatgtcatcttccgtgatggtcycacctgtggcctgcagyawcatyttcagttcawccaagtcaatgtarccatcakcgtttttgtcaawcawgcggragagatycgacakskccycstcmgamttccctttgbygtcatccttcatgcaccgravcatcatgacaaggaactcgtcgaagtccactgtgccactgccatcctcrtstacctcgtcgatyatctcctgcagctcctcaggtgtggggttctgtcccagcatcctcatcaccttgcccagctccttggtgctgatgcagccatcctccgcgcccaggacaaagatatcgaaggcagccttgaactcattcttctgttcytctgtcaactsctctrccgctgctttgtagatgtcatccatgctggtggcagctcaggggaccctcgtg

SEQ ID NO: 1087 - DNA, 694 bp, Rattus norvegicus
tttttttttttttttttwttkytgkcktttaaaattacatttatttatttgtcgtgtgggcatggcaaggctgaggaggtgagattccattctcttctgaggatccaacccaggtctttagactgggcagcaagtgcctttacccatgaggtggcctcagcccactccgtgtgggcttttgatagcatgggctgactggggctgatgcttctggggacctggcttargtctgggctctccctggttttggggctaggttcagttccgggactctgtaaatgtgttcagtagaccagccagcagaatcaggcctagcacagccacagccaccagtgacacatcccaccagatccctgaataggcccaggatggtggcagcttccagccacagttacctagctcatagcctgtgagctggcccagtgggcgctgggtagccaagtccgggctggcacagtacacatgtgacagggcctcgggcatgtggtcctccagccagaggcgtaggtaggtgaggctgcagtcgcagtgccaggggttgtgtgccaccttaagttcccacagctgaggcatgtggtcaaaggcaccaggtggcactgaacgtaggctgttgttggtcagcaggagctggcgagtgttagctggcagcacaggcagggctgtgaggcctcgcccctcacagtttaccctcgtg

SEQ ID NO: 1088 - DNA, 574 bp, Rattus norvegicus
ttttttttttttttttttcattatccacctgatttttattccttattacaatggkytwwkyykyywwwyttaygatcagaactttttttytttattttctgaaatgaaaaccatygtacattgtacaaacaatatctaccgatggaataaataagtgaaaaattatactgctgtacaacacaccaaaaaaaaaattgtwagaggggggagaaaaaaaagattaggtaacagtgaaaaaaaggtctttatacctctaaccaggtcctcggcaataataacattccaagccackacaccgtckgacgatgggcagtcaccaccctctaaggatcgcttcatasccttcccggttgtgggtkcaaktgtascactttstggaatgtgtagccgccattcccccaccttcaggttttgcgggagaagtttgccctgggagccctttargccatggggcctgatgtccacggaaggcatttgcttaggatcccctgcccctggcgcagccagatgaaagatcttagattctgtggtggggttgagggctaagggttcagggatggggaccatcggctcg

SEQ ID NO: 1089 - DNA, 557 bp, Rattus norvegicus
aactggagctggcaacccccccactggatggcatcatcctccccggagtggttcgacaaagcctgctggatctggtcaggacttggggtgagttccgggtggcagaacgcaaggtcactatgaaggaattgaagcgggcactggaggagggccgggtgcgagaagtcttcggctcaggcactgcttgtcaggtctgcccagtgcaccaaatcctatatgaaggcaagcaactccacattcctaccatggaaaatgggccggaactcatcctgcgcttccagaaggagttgaaggctattcagtacggaaccagtgcccacgattggatgcttcgtgtgtgacgttagggaggttgtgccctacctggttggatccgctgacgtgcagcatccagttcagcgtcctggtgttcaagagagaaccttggcttcttctcgatctccgttctcaggccggatccccggtgctcttcatgtcttttttttttttttttccgtctctctctccttgctgcaattttgaaataaaatgccaaagaccaaaaaaaaaaaaaaaaa

SEQ ID NO: 1090 - DNA, 418 bp, Rattus norvegicus
ttttttttttttttttttywkkktggagaacctaggattttattgcagttctcagatttgcccaaaacacttcccgctggccttcatccaagggccactccaggtatgtcttagtgttcattatcttgcgcagtttgcagaagcgctggggaatggctttcttctcaatgggttccagcaaaacaaggatggccgcgtcattgttctcgtcaaagagcctgaagtgggagaagtccagttcatacttgcaccactcactgcgtacgaagttctcagaaagcacgaacacagttttgtggctcttttcgatggaatcamtgatgttgtcaatgatccatttgcccggaacmwmgtsccgmttstkgwgmymcagskysaarkgtssstcagagttctccagctgctggaccatgaggtt

SEQ ID NO: 1091 - DNA, 430 bp, Rattus norvegicus
tttttttttttttatttcacaatcatctttattacagtaggatgatggtcctgggccaccagcctaaaccttgcagccttaggaaagacctgtgtcarcaggscttgcctccctctmtagacaggggytcagccacctccagggcatccctgctgcattttccctgytggaggatggggcagagggacaatgggagaggagggcatgaccccaccccaggytatagcagctccttggccacaaagatccttttgccagtagcagaagggaggaaaacagcaaccaccagggttaccaccacttgtgggatggccaggaccccaytacgtcctctyaaagttgtgctcaaagcaattaataaattaaaatgagccttcwgcagcaaakctgtcaatcacacaggagaagctgagcagaaagcctcgtgccg

SEQ ID NO: 1092 - DNA, 714 bp, Rattus norvegicus
tttttttttttttttttwwwdagacaaaaaaatcattttaattgtgtaaaattttacatagaaaatacatagaatgtaccaaaaggataactaaratcttcaacatcaaaagtggacagaacaatttttctcawgttctttggagtcwtgggtttttgrgaaaaacaataattccaggaggtacaaggacaattcttccccaaacgataacccttaacacatcttacacaaaaaaargagcccwgsmgaaactggaggattcacggwgtctaggttataaatatcaatttaaaagtcacccatatcatgtaactcasgagcctytgttccaacccagkgkgttttatgaaacaaagagacarggctaactaaaggaatcaaagaacccttctccaagcactgacamcaatctaactggacaccctactctgakyccatgtgtccttgtcacaaagatgattttaaaagtaagaaagctgctttycwsmwwgktcctacccagtgagctaactgatctaamcatgctcccctctctcttcctgccaaacctctcactcscctaccctttttgcagtagggattaaacccaggcctcacatgccaggcagactctcttycactaagctatgtccccaaccctgtttttatttcatgttttttgagacagtcttgcaaagttactcaggttgcccctcagctcactctagctggggt

SEQ ID NO: 1093 - DNA, 528 bp, Rattus norvegicus
ttttttttttttttttttybaaggagaaagaccatttatttctccacccacagtgggactggtagattttttttcccccaaaggagcaattgctggcgtccctttaaagcttggstaacttccatcccaacagccaatcctcaraggcggagctggtgagttgcctgggcaacggacctctggttggcctgagatgatcagccacccaccgcttakttccaagcagggagaagttaacgctttgctgctcgctcagctcaatgcgtgagcctgaacaaggcctccccatcgctcctgaagccagaagtgggtctcaaatgtccggagcgttttagttggggagaagccagtacagaggcaaggacgatgtctttgcctgggatagacagaggtcaagagatgggcacaggaggaagaagtaagggtcccggaaaggcagacacaagcacaaaataagatagcctcgtccccagtggcctgcgaaaagctactcagtaacccgggatttctaccccgtttggctttgca

SEQ ID NO: 1094 - DNA, 301 bp, Rattus norvegicus
tttttttttttttttttaatatcttgtcattcttggcactgtttctaaagaaaaactccattatcccaagcamaaagcacagaaggtggagtttggcttcaagagatgttaactcaaaatcttaggcctagcagagaatcaccaaatttatggagagttaacaggggtttaacaggaaggaagtgcctttagtaagttctcaagccagaggctggaggcagcagctaaatcagaggacagcatcctcagtgaaagtgagccattcggggtggcatgtcactccaggaataaacacaactta

SEQ ID NO: 1095 - DNA, 556 bp, Rattus norvegicus
tttttttttttttttttacgtgtccaacgaaattatttattgctgtcaggaggcccaggaccctccagactgaagagtccatgggcccctgtgcatgtgagagctacacagggaatcgctgtcaccttccaaggataagcagacaggsccacacatgccatggccactcggtgcacaggggccaggctgtgcccagagacccaggcatccagcttgcattccaagttccttactgagagccccactgcttgatggcaagctctaggcttgcttgggattggtgactttgctcatgaagaagatgttctgggtgtctgtagggacaatgatcatcaggaagggcctgttgaaacgcacaatggtccttgtctccactaatgcakaaaggagggtgattttgactgctgtggcagcagatgcttctgtgccctcctcaaatacatcaagcacagccttatggaccacctgggagactgctaggttcctggcccctgtgatccctgacaggtcagccttgctggtgaaggcttcctcaatgcccagctggagcctcgtg

SEQ ID NO: 1096 - DNA, 1113 bp, Rattus norvegicus
  misc_feature (1059)..(1059): n is a, c, g, or t
tttttttttttttttttggttacaaaaatttattcatacaaattttacacactttatataacagttatcaaagtcctagttatagatattatgtgtgtaataatgcttggttaatatgtttgtataatcagttgcacacaaaataagagcttcaagactaacatctacctatatcatcactatatcataaatctgctccagtttagtaaggctcttggcatttctaaaaagtatacaaaagattaaattgggtgatcactgtaaaatgcttgccactagccacgtgaacactaagttagacttcataaataaaagattcactagagccctgtttcaccactaacagctgacacaaacaattatccaagaaacaaataattaagactaaaacgcaagccgatgtgttgcagcattgtagggccactaaatagccatctgtgattcgtggcgatttaaaaggcaaagaaaggcactaaagctgctgactgcatcacaggtcacattgcctgaggagactgcaggattaaaaattgmtcctgtagctggacacaggctgaaatcgaatgcckgcktactttctctgtttgcaatgtgatctggggcagcatccatccacmcgcctgggaatgcaaatacagtttttttctcttagaygcctgacttcatamtaatcaaatctgtacagsamaaaggaagagttccttaaactttacaaactaatggttttttttcytkttttttttttttttgktttgktttttgttgtttttttttgtttttgtttttgtttttttttttaaaaattgtgcctaaaatttgggaggctggttgaattgttgctgcttgatctggttggtgggtgacggttcttttgtttataaagattactccatatatgttcaagaaattgacaagaaacagacatgcttttttttagccaagacaggatacaagggtggggtgtgggacctcctysyrccacaaatataagatagtactcatacatgtcaagatggggtttaaatgatttatcagttagtcagactgagcagcattggnacactacacattctaatatgacaaagattggttttatgaaataaattttactaa

SEQ ID NO: 1097 - DNA, 415 bp, Rattus norvegicus
taggtctgtattgctcaatattaggaagtcgtattaskkkcgtrkswgyrgakkkmggtmcgrgctgttgggacctggctatggaagctattgtcacttgagaatttagtgttggggtctatgagggtgacacycccagctttgttctgaaggatcaaggacagtctgggaactggttytctacagtckacacctgkttttttttttrggggggagtgcatttttccacttccctctcagttcactakctctcactttgaacaaakaaaggttggaakatkgtgatggaaggctgtastaagggtgtgaggaacgtcmaatgcttatgctaaggctctgagactcmagtcagaggaggagcaatggttaaatgggtattaaaccattggtgggaaaccaaaaaaaaaaaaaaaaa

SEQ ID NO: 1098 - DNA, 450 bp, Rattus norvegicus
ccagggttttcccagtcacgacgttgtaaaacgacggccagtgccaagctaaaattaaccctcactaaagggaataagcttgcggccgctccgggacacgctctgggcagagacgaagcggctcctctgaaccctgggatgtacagtcagaaggcggcccgcccggcgctggaggagcgagctaagagcagtgsggagatcaaagaggagcaggcgcagacagggcagcctgccggactgagccagccaccggccccgccacagatttacccgtggatgaccaaactgcacatgagccacgagacggatggcaagcggtcccgaaccagttacacgcgctaccagaccctggaactcgakaaagaattccattttaaccgctacctcactcgccgcaggcgcatagagatcgccaacaacttgtgtctcaacgagagacagatcctcgtg

SEQ ID NO: 1099 - DNA, 461 bp, Rattus norvegicus
tttttttttttttttttyytttttttgkttttgttttttgtgtttttgtttkttttttktttttttggttagaagctttggaattgcagttagtctatttttgaaattggtttgttattaatctttttttctttatttaaattcatttgtaattgttcatcttcaaagcttacaatctgaaggtgtccgttcmtacactggtcagaccactgtccttggggcagctggggtctttgggaccctccaccgggctcgccggtccgtcggacttttggctgagatccgtgtcagactcctccgaatagtcgtctgttggcatcgagggctgaacccctgaggtgctgcatgaacttgaggtaaccgttgaagatgaggagagaggaggaaamswmgkgggcttcgcggccgaaacccgggagcccactggcggccaagacttcctggaggcgtggggggaagcg

SEQ ID NO: 1100 - DNA, 608 bp, Rattus norvegicus
ttttttttttttttttttyywttwwwaaaccaaraacatcactttattatgaatccaagaacactgtataaaaaacctccagtcgtakaaatgaacagacagcacgtttatatwcagacactgtacatgtgggccctgccctttaagctaaactccacagactatacacatgggcactgcccttacagctatactccaaaaccaggctgctatagtcctcctgctggcacagcttcagggaatgctgccccagggaaggggaggatgcagtcagwgccgggctacaaaactctytggcagcccarcaggtggaaatcttgcagagatgctgggtcagcccaagctgtctctcttgtacctggcttccccgcaggaagctgtctcaagcttttcctttggtcagttcatctgcamattatggcttccttggggaaggacatttttamcaagttcagtgtccaactgcatggcctcaggctctttcagcgcatctcccagtgggtgctcttaatgggccaggtccgcacagcttgtttctttggcttaaaggtagaaaccacagggaaaggaccttctccacttctttctccatccctctgaagtggagg

SEQ ID NO: 1101 - DNA, 541 bp, Rattus norvegicus
cagtcacgacgttgtaaaacgacggccagtgccaagctaaaattaaccctcactaaagggaataagcttgcggccgcaaaggtttttttttttttcttctggggaggaattatttggccttttctgaaacaacagagaatgtattttgtgtttgctcaaatgctctcttctgtatctacatggttggctataattcttttaatatttatcagccttttccccgagattctcctaatagtagtaaagaatgtgcgaagaaggagtgccaggagaaatctgagctgtagaagggcatctgactcattatccgccagaccttcagtcagacctcttcttttacgaacattctcagacgaatctaatatattgtaacagaatccgaatcttgaactgcctatgttattgtcctacaagcatattgaccgtggttgcagctaaagaaagaaagcatgaaggaagagctacagaagatattaactcaggatactcaatgtgaaacagaaaccactctcatgtgtaggcttcagaatgcctcgtgccg

SEQ ID NO: 1102 - DNA, 913 bp, Rattus norvegicus
  misc_feature (896)..(896): n is a, c, g, or t
gaccgctgctttatgtgtttctttgcccgacacctctcagagggacaacggccgggctgtccccctgaccgctgcgcgtcgcctgcaggcattacagtgggykkcygmaagasrtttkkkkwtstgcggraskgarcgsvakmkmggygktcsmgyctcsggtgtcccaawctagwkgtgwkcatggcagaacaggaacccactgctgagcagctcgctcagatagctgcagagaatgaggaagacgagcactctgtgaactacaagcctccagcccagaagagcatccaggagwtccaggaactggacaaggatgatgaaagccttcgaaagtacaaggaggccctgctgggccgagtagctgtctctgcagaccccaatgtccccamcgtcattgtgacccgcttgaccttggtgtgcagcactgccccaggccctctggaactggacctgacaggkgatctggagagcttcaagaaacagtcatttgtgttgaaggaaggtgtggagtaccggataaaaatctctttccgggtgaacagagagatcgtgtcaggcatgaagtacatccagcacacatacaggaaaggggtcaaaattgacaagactgactacatggtcgggagctatgggccaagggctgaggagtatgagttcctgacacccatggaagaggcccccaaaggcatgcttgctcggggcagttacaacatcaagtcccgctycwcagatgatgacaaaactgaccacctgtcctgggagtggaatctcaccatcaaaaaggaatggaaggactgagctccagctgggaggcgggcagggcgacggacagacagaaggaccgacatgcccctccctaaacccctacccaccccaaaccaaagtgcttgacaggnccttcctcaccattcct

SEQ ID NO: 1103 - DNA, 564 bp, Rattus norvegicus
cctgccccggtgtgtctcgcctgaaggccagcctcgtgattccagtccggatcctcaggccacctggaagcagccctgcccatgagcctctctgcttccttcgagactgggtgacctcaaccaagccatgcctcttctctgactgcagcgggtgtaggagtcaactccggcctttcggaactgaagcagtcacagatgtgctctggtcacttccgctgccagagcatagaaagaagcaacaaaactctgtgggcagagatggcaaaaacaggcaagagccaggctccaagaagccttcttgcttgcttctctgcggcygswgaakgwatttttagggattctctttctgcctgccagtcagagttgtcccctgccctataggtctggcacccctctgctttggctagatgtattggctgtccctcacctctgaccacactcatctgcccactgggagtggctccataggtgagccaccaggctgtgaaagcaggaagcctgcctgcccgtcaatgtcaataataaagatgaatttgtttgtgwrwraaaaaaaammwmrtgccg

SEQ ID NO: 1104 - DNA, 472 bp, Rattus norvegicus
tttttttttttttttttacagccatcatccttttataaataagttagaacacagacagggagtgggaagtcacattaaacatgcgaatttytttttyttttytttttcctggggaaaggagcgcaaycacagacacgaggacattcagaaacactggcaacttgggggcgagcctragagaagtggggagcacggrggggaaataataataataattattattattattattaacaataataacaagaataaccagtccaggagagagggagccatgggaagacctaagaccaaacgaaaaattgkaacacagggctggggtgggacaggcgcgtgggaactggtccccagcgggcagcggcagtgcagggaagattggaagggycgggctgggcgtggtgcgggctcttgggcctcccagggctcctcgggatgggctcagggttggaaggcgctgccggcctcgtgccga

SEQ ID NO: 1105 - DNA, 504 bp, Rattus norvegicus
ggcaykwkytyktkyykwttttcggwatacaggtgccatttaatcggttcaaatccggaagctacatcttcaagggtctgagagttcactcctccatattcccsctttacatagtctcttataagacatacagcttaatcaattgacaaactaaacggsttatatactggcaatatattacagatggatttatgtcagagtaataggtcacatgacagggaccatgtggtagcccggtgcgcgtcttggtggagccttgaggacactgacaggagcatctctaggtgccgtttkrwtacagacacatscgggtctktwtmtacacccatctgactaggccgaaaggagcaggtagacscgagatakagacacacacatgctgggcggggccggtgcccacctcctcatgccatttgaagggcggttacaggttgctggttctgcagccacttaagttacactttagggaaaggcttctctaattgtggtcggtttgtcttgtgt

SEQ ID NO: 1106 - DNA, 502 bp, Rattus norvegicus
tttttttttttttttttaagttttcaaagtttatttttgtggggtacctagacaaggggccttttcaagtccgtcagctcctccctcccccctcttctgcttcggggacaggggaatggaagtggagcctgcaatcaagttgtttcttcttgctgtgaagcctgagggcccttgcctcctttccgtcccagttcagaatatttgtccctgacacaggcagactcggsattggagatggagccgatgccacccttgacgaggtgaccagggtgatttgggccctttgaatctgaagactccagtctccaagcctaccacaggccacaggaaggcctgcttcggcctggtcctaagaagagggacatagctctgtcctgtagacattctacctttctcattgactcacattatctctccaatgtctagttgcttgaattgaaggcagtcagctccacagacgcctggctgatgtctccgagagcctggggtcctcctcgtgccg

SEQ ID NO: 1107 - DNA, 791 bp, Rattus norvegicus
  misc_feature (170)..(170): n is a, c, g, or t
tttttttwkkwwywkkkdkbhdkkktkaaaagtaggraactattatttattcaagrmccagtattttgtataccgtgctaagtgtyttacattcaytytcccatttcaatcctcacaacaamcctatgaggtaggtattatcaccatttacagacaagaacacggstcangraaaaatargtcattttcccaagttccatggstattcacagtggakytkwkwtytktytyttgctgaaagcctgcatcttttattgtacccatckaaataagccttgagcaaaagataatttcattgctcaactcagcacagatcacctgagagtggaggctgccgtccacactcaccgctggtarggatgcattgaagctgacttgatgttggtttttattccacttggcattttccctggctggcctgcttgagccatctggactccactgagcatcggctgctgctggtttggagcacctgccatctgaacctgctgcaatcctgaggctcctgcaaggatcgtcccagctcctggctggccaggttggccaggaccactgctacctgaaggtcgccaattagaaagccccttcccaaaggcaacagctgccactaaggcattggtgtctgcagggttgaaagtctgcttgtttggccggagacctccgctctctgactctcgttcttctttgctgattttctctaagaggtttgagcacattttattcaagctctggatctgcttctgagctgcatcagcaccaatcctggcagcatctgttgtcagctgcttctc

SEQ ID NO: 1108 - DNA, 440 bp, Rattus norvegicus
ttttttttttttttttyaagggagagagcgcattttattgagatttgctacgtaagtacatacagaaaactgaggagaggggttgatgaaggagcagcttctgtcttcctctgggaagtcactaagggacccataggaagcasgtgggagggagactgtgctcgcactaggttgaggtgaggggagagatctgtgagcagatgtcacagggagggatcgggtgaagatcagtgggtaacagtgctgagcagtcactgtgtcagagcctgtatcacatccttcaccagcatggtgccaatcaccatcttctcactgttgacagtcagctgggcagctccagttccccgggcatccagagtcagcaggaccagactcccactagtcarcgtcctccctgcaaacctcgtrcycatcagatgccccacaaggaacacgaccta

SEQ ID NO: 1109 - DNA, 456 bp, Rattus norvegicus
tttttttttttttttttcattttcawcctgtttaatccctgcgtgggaagaagtaaaggttgacgcggtgttgagtttagagtgggtataasgttgaatgaattcaccacagatgaatttggaagctgacagtgaaraggaatctcgatggcasagtgagtgtggagtgagaggaactggcctgcaggaaggaagatgarttcagtcgtcccawtcatcatcctcttcatcctcaccggtctgatcctccccttcatctgaggagtggatgactttactcctcttctgcatgacatgcatcakggcacccactaggccttctgactgctgarggagtgcytgcsgwactgarttctccatagctccaggggtcttgttcagctgaattccttgccggatttgatccaaaagtgcgccccggcccccaccaggtgcttggcccaccccagacactgg

SEQ ID NO: 1110 - DNA, 905 bp, Rattus norvegicus
  misc_feature (849)..(849): n is a, c, g, or t
agcccctgtatacaaggcacaaagcaggacataagagttccaagtctgaccacacgtgaagggctcattagcctaaagaagggtcagagtaacttcgcccacccccacccctcccaaaaaaagcataacctttccctcaagagacaggaagtgcaggccaagggaaggcaatttgacagtcaggaagcccatttaattccaataggttagaactcttgcagacaactctcctatgaawtwwktttttttttatagtcaccttctagaatgtagaagataataagtcttagtcagattcctaatatctgaggatgtacattattaaatagagccctagcctatgacttctgcagtcattaagagctccagagcggcttcagttcaatgacagttgaacaccaacttcggaatgtacagcaggggtcactgtgacagaagttttcttcccygtgtgtcttctctgatgttgaataaggtatgaaggtcgggtgaagccttttccacaggtctggcattcaaagggcttctcaccagtgtgtactttttggtgttcaataaggcttgtaatcctactgaaacttctctcacaatcattgcattgataagacacaggagtcycaatattttcccaatggctttccaccctactctgactttcccagtaaggttctggaacaaaaaatctttatccccagtgtgggtcctctgatgtctcaggagatgtgagctacgcctaaaggctttgggacacatgttgcactggtatggcttctccccagtgtgaattctgtgatgttcaaggaggctgcagctctgagtgaaggtttcccacagtcatcacactcgtanggcttttctccagtgtgggttctctggtgcttgatgagatctgagctgtgactgaa

SEQ ID NO: 1111 - DNA, 972 bp, Rattus norvegicus
atctttttctgttcttaaactttgctctycaacctycaacatgaaggvgmtgagcccsgtgcgcggctgstacsaggcggtgtgctgsctgtcggaacgtarcctarccattgsgcgaggscggggtaagagcccgtcggcggaggmgccssttagcctcttggacgacatgaaccactgstactcgcgcctgsgggaactggtgccgggagkyccgcggggcactcagcttagccaggtggaaatcctgcagcgtgtcatagactacatsctcgaccttcaagtggttctggcagagcccgcgcctggacccccggatggtccgcatctyccgatccagacagytgagctcactccggaacttgtgatctccaaggacaagaggagtttttgccactgacccggtcgtcstggcacytyccgaacgmaggtgctggcgccckttccgcttgkgaccbygrvrcdmkrggaccmtctctycarycggaarsytraggggcatggatgagcttcgwtcttsccacagccythttcattwaccstgwaskcatgcytcraggctggacctggagcccrakagygaakgwstgawcttgggtggcytgaagarctagmtagcactygctggtcagmagmtgggcaayrtyactctgtccccaccvtdactcaaktcwtaaaaagactggcttttttcmgaaaatggggtgtcgagaagggtgtgrgggkwacaygagtggytgccctgcacwcactgccamggcagcataagagctggtcttstggtttcmtyggagaaaagmtctgktgccytgattatgamctvtataatagagwmtmtrgcttttgtacmttttttktacagraakgygactttctgtaaccatgtgatgtatwttaaacttttkmtaaaagktaacattwtgcwtawtaaacaatttytgmvmmmwwwraarrramaaaaarwravmkkcc

SEQ ID NO: 1112 - DNA, 782 bp, Rattus norvegicus
tttttttwtttttttwwwwrccaatccattkktttwwtbyytwwwkybktgacattacagaactaaactgaaatttattaacattccactcttacatttttsgacmwmcagaaaataaaatccatgagccaaaaacccaaacgaaactaaaaacagggaaaagcttataaaactaaatawggwtcccagcattaacagctgaacagagaatgtgatttttctttaaattcttagcggatgataaagtgtasaaactgaacacttacaaattatttaaaacctggaatcactgaccagaaattacacagttggatcatgggaaaacakcaraagggggktacgagcgaaccyamactgktctagctgcaccscatgcccttctvagaggaaagcctkgcmtygwkymgatacwgggccaggctaatactggcagcggagccagtaatagtgacctgccttccagaagagccttscactgggttgscaattwtgatctgggccccggacatcyskcgkryctcattgatgttggcgccttggcgsccgattatscarccgattaagttatttggaatggtgagttcatgggtggtttgagtagatgcatccaaacttgcycaatagcctttcacctctggagagctggagtcaattcccgrtgatgctgcctacttcctttccgtgcatcagcagccgaatggtgagagtcacgttgagtccgctttcagtcacaccggcgtccatggcgagcggcgggcggcgttcgggagttgggctcgtta

SEQ ID NO: 1113 - DNA, 1195 bp, Rattus norvegicus
ggtggaaggatttgatatggttcagaagcaaagatactatgaacggctggagtccctgtctaccaagatctgcacccgggcctatcatcaggctctcggcaggatcaaagacgccaaacaaaagggccaggagaccatttcccagctccactccactgtccatctgattgaattcgccaggaagaatgtgcacagtgctaaccagaaaattcaggacaagctctctgtctcatgggtggagtggaagagaatcgtcggctacgacgacacggacgagtcccattgtgctgagcacatcgagtcacatactctgtctatggcccgcaacctgacccagcagctccacactacatgccagacgytcctgttcaacgtccaagggttaccacagaacattcaagaccaggccaaacacttgggggtgatggcaggtgacatctactcggcgttccgcaatgttacctccttcaaggaagtgtctgatggcgtcctcacttctagcaaggggcagctgcagaaaatgaaggagtccttagatgaagttatggattaccttgttaacaacacgcctctcaactggctggtaggtcccttttatcctcagtctaccgaggtggacaaggccagcctgaaggtccagcagtctgagctcacaactcagtaaacstkctcttgtcaccagtgtatgatgttgctgaccaggtggcacctttyrkyykywwtybktwwtttkyttgtattgaaattaacctgattagattagaaaarcakctarwdwraacaaarrwmmwmawwawggtcattcacagctcacttatggtcgtgcccccgctggccctgacacatgagttcttcttacccggctggtatgtggagtgtgttagttttgtgaggacctcaccagaaccttaaagctcaggtgcgcttacagtcttgtccatggcctttgtgttcttattggctgtaaacgtctgtctgtyccgaataaagatttgttcatgcggccwmwrmwmwraawrrrmawmygctyctgystssyscgwgcmgrmttcwtcactgtttccctcaaggcatgttcttgtgtggcytgaatttagtttttttccatgtgaagaaatatcacctttggacccaataaaattcataayagggwaravmdhdwrmmraaaaaaaaaarrattgcggcctcgtgccg

SEQ ID NO: 1114 - DNA, 786 bp, Rattus norvegicus
tttttttttttttttwwwaaggagtaaaaaataattttaaycatatcaaaaagccaaamcaaagacttgttcagggactgtcaggacacatcttggcagcgtgtgctctgctgtgtacttgggctcatgactcgggtcccaagcacagttctaaccctcagaggtactgggatctgtagcacgtttraggtttgccatttccccaragtctgcagatgtraaacaatcgcatgcctctgctgtgactcctgggatctgvrgcwsgasrgctgaccctctgaggcagctgcagggtcagtgaratggtgagctgggttggcaacccaagagcgatasgctgggctccaagctgcagcttgtccctgaggctccmttcctttggcattttcagagtccacggagatgagaggacaaagcakggctcatagctcaagaggctccagtgtgtttggggragtctgagccargctggcctcctcacccccaccgtgaatgttgtasggctcctccacagccctgggaaccggtgagctcacaagctgccgatgttggggaaactcttcagtttctcagggaagtcatctttgtagagtacagggtctsctcggtgctccaccaccttgaggggcatcgttccgaagacrgaagcaaacttattgatgcactcagacctctctaccatgtgagtctggtctagtgagagtccgtcgatggctgtgcactcaggacacttgaacttctttcttggggttaccttgatgacagctttccctgtgacattggccg

SEQ ID NO: 1115 - DNA, 658 bp, Rattus norvegicus
ttttttttttwtyttttccaaccaacatactttattgcttttgcattagcaaagaaragcttggtatattgatggatatggagatgaccatccaaggacctaaggtgaagcctggaaaggggcccgtggcaggggctgggtcaggatctatgaatggggcaggacctatgccaatgatcaccaaatccatccccagagaagggcataaaatacagaggtagaaaamcarmmarctatwskwwaktgctkgctatkagggcmaakwaggmkwggkaakkgatkgaakgcaragatgacattggtgaaraargggggagctggcmvksratggcagcagggcaactgagaaaagtatscccacaaggtggmtggcckacaatytgaccagtcatgatatttmaaaggatactgagtcagcaatgtcstagtactggcttctagcaaaggaagtgggagaggaaggttmtaggatgcgtgytcaccaggaggctgaagaataaggctgtggactmtgccgcttgtccagagaacaaggaatagcatgggtccacagaaggaagtgtccctcctatctgtcagactgctctctgattcaggccagaatacaggtcccgttggccttttcggatgggctcatagtctgggttgggaacaggtg

SEQ ID NO: 1116 - DNA, 1224 bp, Rattus norvegicus
ttttttttttttttttttawgacyccttcawattgkattttkwtkttyywwkytwtkgkagatcaaaacactttattatcaagaaatacactagkgrgcawattttcyaatacagaaaggaaataaatgacttggctytkkwdwyktgtttttcttaycycawattgataatatgatacagtcacattaataagtctgaaaactactttcattctttctacacataagcaacaggcagtatgtgcaaaagtatgaattccagaagctgtggkgtgtgcatgcacactgattttctttatagtgaacagccacttctaatatctcataacakcatgtatacagacaatggycacagatctccatcaaagccgcagtaactgaagataatgcaggcttgaaggttaacaggaagctgccgctcwagagtttccactcctcatcaaaggactctgtgrgaccaacgtcttcttccctgatgcaratgggcttgtttcargtttctctggctactgaaatgctgctcggatgactctgtcactcargggctgggtaggtcggaaattatctcccaaaatcccgtcacagccttcgacragttctgcccccttaacatgtgtcctcagtcttcgaaattcttctatctgcagctgggatatagttaatgggtatcggaataatatccaggtaactccttcactgcaaggtggaatagtaagagatccttcatagacccagtaatcccgcagaagagggtctggtaataaagtgttaggattaaagcatggaattgttttggattttcccttgtattggatatcctgaagtatctcagtcacagccttcaagccaacatgctccttccctatctggacgaacagtgcaatgatgacaatgccstsgkgtttcccaaccgcctcatcgatgctgccaaacagcgtggaattccagtggatcaggtggagctccatggggaaggctttgaaattgaccgtgtgctcagaaccacgctggttttctcttccccagtgaaatctaacttcatacagttcaaactcctgtccctgaggcagcggtcctcctgacaaaactgatttcgacttcaggatgacttgaatggtgtgtccatcgttggtgacttcacagtccctgcacaccacgtaatttggagacaggcggacatccagcagcgaggggtcgtatctggcttctctggagttcaggttg

SEQ ID NO: 1117 - DNA, 1150 bp, Rattus norvegicus
tttttttttttttttttwaagttcatgcacattttattgagtagtaatataaaatgctttttcttttgtcattggtacaggtgcatgctttgatcgccgacatttcaraagtcaaattacaaaggcaaggcttgagggtgtastgaatgacttgggcacttatacaattgttaaaaaatatgaatggactttttygctgtytgtcgtygktgttttcaraatgaaccagttgkaacctcractaatatacaaagggcaaaaarammaaaaaawmcarahawaammaraamavcaaawamccaaaaaracaaaaaaaaggtgaaaaaaagtacgtattttgtggcacatgacagarcagaacgaaataactawwctgttatgacatcaacggttaccatgcatttagagtttcamatgtaactacaaacttawttaaatttcacaaagtttgctaaacatgccgaccatctatgtgtgcactkacaagcttatgttaaaaacttttaagaatacyctcccyyttagattttttcaaagcttttgttttgattacaaaatttcaaaggcattaagcaattaagagaatataaagaatgccagtctaatacatttccagtatatgtcagrccgcgaagcgcmttgcagtcccatacaggccgagacagccattttattttwktttttttttyttaaaaaacatgcataggcagatttttttttttkyttttgttttttacagaatatcgagggcttcatcwccgcamtatggttcgcgttcactatacttaaaaatgcaccactcataaatattgaattcagcaagccacaaccaagacttgatttatcaacaaaacccctaaatataaacatcaaaaaaaggtgggtataattattccagtttcttttcttttcttttttaaacttaaagaaaatgtattcactgccaaattaagaatgttctatggaaagaagggcattcaagcaaactaaagaatcctgaggtaagcatgagctatacaaaattaaactgtcctttttttttttctgttttctttttttccttttttttstcryktaaagmaaatgtatkcacwkccwmrtkaagaatgttctatggaaagaagggcattcacgcaaactaaagaatcct

SEQ ID NO: 1118 - DNA, 1416 bp, Rattus norvegicus
ttttttttttktttttttkycyccwaaatggcakggtttatttgaatactcacatacaactgaacaaggcaaactatttacacaaaacattaagtacaaaaaatataatacaatttatctgtacatagtaagattcttttagtttccacaaaatgttggcararaggtgatgctcrgggtggggarggaggtctcavaagggagtagtgctgtgctcttggcaaaaggcakgaccattttataacttcaatgttagaagcaatgaaraaggtggagatgctgatattggaatgtgcctagggcaratmcaaggtgacatttaccataataatgattcatcttattaatgtttggttaratgggtgtgagtttggtttggttgattggttgkgaagtgtccctgctctcccctttttggaagctcmataattggttccatraaagacaraawtwtccctgcctgggttgacataattagggtcttaaaatgatttctgaraacaagctatctgcmaggtgtcattaagcacaatttgaggcaaggscctgaccarctcccarraagaatatcaatgcagtgggttaatgagtgaaacagaaaaatgamagctgtagaaaagaccagtgcacatggctagtaagatttcagccaaacataagggcctaatagtgtgggttgcccattgtaccaggaagagaacacycwsswgccagcagcaactccacacagagccaagtgtctcttytctaaggaaactgatggggaaaggcagagctcctttctcttgaaatggctctgtgtgactaataaatagcgcctttgaagttttaatyttaacatcaggaacagtccgcaagtttaccaagggctgaagttggcctagawkwwwttyywwtkwwtkwgcaatcccaaacaattttattttgtatcacaaaacaggcaaggaggcatagcaggtgtaaagtcaagtggtcacaggttctgcagaatcttacactggaagaagctggtgcatcttattggcagatgaggtgaatatcatggwgattcagtggttggaagctcccactgtgcatgctttggaagcagatctataagctgattcgagtccacagtcacagtgtaagagatcagtggtcagcttcagcatagaagacactgctaatgttttaaacccaagcgaaaaatagtaattttgtgaacttttgagcagttctgatattggatttgcagaatatgataaaacaatccaaatgatgttccagttggttctcatttcacaacctgtgtggctgtaagtagcctgtatctgtttttggtatatctatgtatgtgcatgaagagcaacagawacacccactgacttctacagaaacasagctgactctcctaccccaggaaaggctctactccat

SEQ ID NO: 1119 - DNA, 867 bp, Rattus norvegicus
tttttttttttttttttaggaaaattagatactttatttatagcttaatcacagaacaatttccttgttctttgagatgtcaatacatactaraataaactctgtagaatatacaaaaaaatacatacttttcccatgaaatttttcttcaaaataaatagaaggaaacacgtgtgtggctgatcctggtaatgccccgtgtctgcttaggttttcagactgttgatttatttttaatctcttgaaaggatgggggagttccttctcccccaaaaggtcgagataaataatgcatgaagcgatcctccctcctgatttttccctttcccttcacattttttcttttgatagagaattcagcctaaatttccacgcttgcattcaatccttacaaaagcctacaaattatacaatgacttctaacctggccctctaacaaaacaagtttttccccttataaatcataagagacagatggcaaaatggagagaaaaggaaagagaagggcgggacaataggcattgtgacgaatctgggaaaaaaaacaaagtgcacatcagagagggaaagtttggtttgacaggtgaaattcccacagcctgcgaacagcaatsskmrtrgagcagatgccagccattgcaaatgtgtggataatattattacgggtaaattcattcaaatgctaagatacatttctttcgattgacattaacatctctatataaaaatgaaggtgaaaagatcacagggaccagttgcattccctctgagagattcacacgaactgctggccggagctctccagcagcagcttccagagaggggaagatcgtcagtctgctctgcacactcgttagttatggtacc

SEQ ID NO: 1120 - DNA, 1718 bp, Rattus norvegicus
ttttttttttttttttttggaggagccagtttactttgcagacaggaagtttctagtcagaacaggaagcatccagttaccttggtcggaactccctcaaaagaggcttgcaaatttaagttcttggcagccgcagcagcctgagcgtaacgggatcagaaaaacctcgtattgacctgttttcctggttagctgccttacggctaatctgttctggactaatccttgtaaagtagcctcattgaattgcctgctctggaaaatgaccttaataacaagtccctagttcacagaagtgctgaccaaactgtgcccccaaaccccttcattccaacagcttttggttctctccagtcctggaaaagcctccctcagagttgagtgccagtgagccggcacggaccttgaccatggtctcygacragawwkkwtkwtwyykwkkkwktkwwywtttgagaccactgctttatttcactctggttcamyaacagagtctttcctctcaggcaggtctggaaccgtccatccattctcctccttcttaataaaaaaggtaatgaagaaaaagcctgtaattttggagacctagaatcttactgatgcgaatctaagcttttgactgcgatttcgggttacggttatttcctgctggcatctcggtggtcacacagagagctccccactccarcggaggtggccgcccacagctaccaccgwtgaaaacaaaagtgttgaaaaatgcaccttttwywwtwwwwwwktagaaaccaattcawwttyyytttttttttttacgaakawwaagtttcttgtaaawatgtacagtckgagctagctctatgtascaggaagcacttcasagatkwgacacgcaatatamactgtcagggctcaaggkgcccatttcycgtggaggtcswaaatgaratgccawgackggagaccagctatcagtgaccattccmmatacktgtggmccaagagacaaaaacttcagcaaamagccagtcaratctgccctgggagggggaccaggatagggaacatgaccccamagactccaagcarsacawaamacwywrcrrcmgggcacgggatgtggagggtcacaggcgttcagaggagaaagcacttakgttasagacgakcasgaaggagtcggcatttagaccaggttataatctgggaagtgacgtggactgtggacgcgtgggcttaaaacacagacacggtcacctgctgcggtggggacaggtctacctttcagcctacctagggtgtgccttggttgtggaggcacgcctaagagtcgaggagaagccaaagcaagagaggccttccttgtgggagattaaaggcaaagataaggccgcgagtcagcttgccaactgcaaagcctctatgttggttctatccagttgccaggaattctgcgctctaaagagggcgaagagaccgggtgagccgcactgcacctagggggaactcaccagcccaggaggagctgggagcgttgagctgcggcttctctccaatgtcctggccttaggtccagccctagggagaggctcatctaggaagtcacagtttcgtggggtagaaccgygctgkgttttgtgtgagcacacagtcatccttgaagtcagcagggagaaggaaggcgggagggaaaccgagggaggagtgtggtttgctgaaatccttctctggtcgtaagc

SEQ ID NO: 1121 - DNA, 909 bp, Rattus norvegicus
ggctgcgctcagttactatgctggacttagctaggggttccttcatggggccactgacaggcgtagggacgagcttgccttccagctctgtgctgggacagcggaagagcaccaggcttgaccagccgwgkagtgagttgaatttgggttcttttactttgtaactgctccatttgccctaccccagccccctcaccaacagctggtagcttactgtttcttcaagaagaaagtagactttaatgctgtaaatttgagctgtagagctaagactcgcttactggtgagctgtgaaatcttgttgcttttttcccagagtctgatggcagtgactggtccargtagttttcctcccacagccagtgcaggcagcaggtgtggtccaggccctaccccaccccactatgstcctttgaagccaacgtgcctccctcacckscacabkggagggatgacgcaggggagaacawagaattgcttggccctcaactgggttaggaccattgcaggtgacgcartgttgaagacactttaaagcactaccagccacattcaggaactctgttcacaggtatcctaccagcacaatgaggctaactgtgactcgtggggcccagagtcagaagaaagaaaaggcagcagctttcctktgggcagtacactggattraagrcaaagmggsayrargsgwcagatgattgtgaytctcatsaggggggtgagcggagagtrttgattctctgatggtaactgacagrtgtgaacaatgytcarccctccctccctcccagggaagaaaagcaaagattcaaagtaagcatgataatagttggtttaccagtgttccttccaaggagacatatattttttmatwaaykatmrttgyawtrraaaaaaaaaaaaaaaaaa

SEQ ID NO: 1122 - DNA, 1063 bp, Rattus norvegicus
tttttttttttttttttywkkwyycytaaatcagctttattttcctctaawagacactttwkywttkywwwwttttgcattctacagtcttacaaattttattattagcagcagaacagaaacatcgcaagacctcaaaacacaaataaataccaaatgaaaccacatgtaacacacagtaaacagaatcgaaacatcataatgctgtcaggagatgaggcgtgctgctgactcctggtgacattattgctgggcaatgactcacactgtctcagtttcttagaagagcagrrgaacacgggacgctartcactggtcacgatcacttggactgtcaagatggggsctcacagcgagcggttactacagacggsatgtgtcaaaacaggcagattaaaaacacggtcaaatgagagattggccttctttggycyttgtttttttgggtaataactgaacacaagagatgtgccatcagagaaaagaacggaactctagaacagtctgcagctgtctgcatttactccgacttcctcagtcggagcagagsgcccacagattyttaggggactccttgaaggaaggccggcyytygtgttttttaattaggtcatttatttgcctttgaaggttacttactaaggggactgactatggagtggcacagtgaccctgggcttgtaacctcctttccacagtgagctcacgagaaaaattccagacatggggtgcaagggaaatgatcatatactctgcttgggtgctggggcctgccatggctggctctggtgtgggtcattgccatgcagcctgcctgcctgcttagtattggtgcccaggcagacaccaggctaggacatgtccaggttttggggatgggctcctggccctttcttactgtccccgctaacccagctcccagatcccacagtgctcatggcagcagcagttggggtgggagagttgacaagggctgggtcacttgccagcggtcacctcacctgatcagacccccatgggctcattcaagcttggagaaatcagctgctgtggattggcaaac

SEQ ID NO: 1123 - DNA, 803 bp, Rattus norvegicus
cacgagggttctcaggcctctattcctgctgtcctctggtgcacaagcaggagaggtggccatgctaggctgggtgcccacttccmgtgaagcagcatttcattctgcagaaccatccttcctttcccttgcccatttcccacgtttcyktcgtgctgcctcagggcaggactgaagagctggaaggaagcagtcagtgtaccctcccaacgttccytgaaggtctccactagactctgggcttccctttgcctagtgcaggggtcaccgctggagaagaaccmacactgtccttggtgtgctccaagcctggagccaatttaccctgttgsccmacccagccccagcgggggattatttcctgggtttctgtccctccaaggcttaccaggtgtagttgsmtttgttcttmtggggctgttagtccttmtactttmtttctcasttcashbtggaysmcckwctgwgyctswgcagkckkcwgtsyytsmsascmrtgtgcayragcaaatatgcaacttacmttgggatctgcagtcagttgaagccaagyttcccacatmctctytgtttrccatgaggtgatgtggggttkccattgtgtctgtcattaccaccgtgtctttcctaacccagtytcacagtttatgtatagtagtaaragttgtcytkccaccaaaggcatgtgacagatktaccaatykcatgtattctcaacamaggcgaraaakacaaattcctaccvcammarraaaaaaaaaaaaaaaaactcgagggggggcccggtacccaattcgccgaat

SEQ ID NO: 1124 - DNA, 682 bp, Rattus norvegicus
agacaccttgcttatgtttttacccttctcagatgacattggaacggagtttgactcaggtttgctaacataagttcccagagctgcagtaccaaataattgcactcgcctgacggaaagttgaattgttttaagaatcgaaaacataaagaggagttaaattgtttatcttttccaaagttgaaagagtaaaatattttattatgagtcattattttaaaaagttggctcactgtataggaagagagtgttatttctttcagattatcattgtaaagtaattgaggtggcatttgagatgtgggggggggaagagaaccatattattatggtttttagttgttctatgaacactaaggagtgcagctactaaaatgatggtaaagctgactactgtaaaatttccataattatgtgtgtatatagatgccgtatgtatctacatgtgtatgtcttaagcttattatacacatgtgcatacataaggcacaccaagaaggggatgtttgtaytatagagattatatagcgcagagattctccacttataataaaaatggtttgccatgtaytttgttatgaatagtttatcttccagaagatattttgttctattttgaagtgtagaagaatacactgytaataaataaaagttttatgcgrwwwwaaaaaaaaaaaaaaaa

SEQ ID NO: 1125 - DNA, 761 bp, Rattus norvegicus
cggccgccacacattctttttkttttttytyttttttggaaaggaacagttttawtarcctggwkttkaaagtctttgggaggcmatatggtgggtaccgccacggytgtacaggaagtaagatgaaaccctgtccarggcttatttggattgtaragccctggagaaggcaaactgcccavggaagaagtadatgcgggagtcctcgccggcmtgtgctatcttactgcamtgggaytcytgaggctcmtgmtgaggcccttgcttcartattgggcaskggaccatccggcctagawctttacccttggggtccastttgatgcavgccakgcatttccgcttcctcccatttggtttgattgtacactcyggctttttccagtccttcttcasgcagctggtctgctggagcttaaattccmbcstcmsaawkstgccagctgakaagaacargwcatcagsamygycsrcasyratytcctsgwagscccactgcacargcgggtgtctgtggaactcctycagagccacctgcaggcctctgcgctgtgtctcgctgagctcaagctctgtcccgtgtatgtccgctgtgcccagccatagggccagggagatcagcaggcacttcatggctttgctttagtcctatggtcctksaaaratrwcrkgtkcgttgctttagagaggcccttttctgtgtggttcctcgaacagttcccygacaactgttccctctcaccctctcatctcccttttcc

SEQ ID NO: 1126 - DNA, 620 bp, Rattus norvegicus
gcttttactattttaaacatgtattgaactactgctcctctgaccacgtttatttgggcactccaaaacagggcttattttagaaataaattcctccaagcaaagcctcctgcaaatgcagtacaacttactggtswcaragaactcaggtctccctttctgcctccatctgccatttcataccattgcagaaagagcctctgcatgtaatcgttcaacrgarssagstccagccctgatcagtgacttgctgaacggcactgacgtggaggtggcccttccttcggaagctgtaaattcagcccccgaattccttagtgttaagatcctagagtgaatcatgggtagttgcctggggcacagtgaagtccaggaaaggctttgtgtctgttttgaaaacaaacatcaaacatgtgacctcggagagtccttttctgtgagaatgttcactttctagtatattactgtacatgattgctctgtgaaaagacttcgcctatgcagccttgtttgattttatttcctttggtttgtactgttgttaagagcatattgtattatagagctatttggatattttaaatataaagatgtattgtttccataaaaaaaaaaaaaaa

SEQ ID NO: 1127 - DNA, 1001 bp, Rattus norvegicus
cacgaggcaraaatggctgaggattggaatactttcctgcwccggtttaatgatttggacttgtgtgtatcaraaaatgagacactgaagcatctctccaamgayaccaccacacctgagagcacsatgaccatcgggcaaaccaratcktccacccagccgccccagtccctggaggagtcakgccccatcaatatttcagtggccattaccttgaccttggaccctctcaagccctttggakggtamtctcgaaatgtcamacacctgtactccaccatccttggccatcagattggrttgtcaggcakggaakcccatgaggagatcaacatcaccttcaccctgcctgctgcctggaatgccgatgactgtgctctccatggccactgtgagcaggtggtgttcacagcatgcatgaccctcacagctgcccctggagtcttccctgtcaccgttcagccacctcactgtgtccccgacacatacagcaacgccacactmtggtacaagatcttcacaactgccakagatgccaacacgaaayacgctcaagactacaaccctttytggtgtwacaagggcgccattgggaaagtctaccacgctttaaatcccaagctcaccgtcattgtcccagatgacgaccgctccttaatmaacmtgcatctcatgcacaccagttacttccttttcgtgatggtgataacgatgttctgmtatgcagttatcaaaggcakacccagcaaactgcgkcagagcaatcctgaattttgccctragaakgtggctttggmtgatgcctaatcccacagctccccattttctgagagaccaagwaccatgatcattgcctgctgaatcggccagggcctggccactctgtgaawacacgatcttgcaatgttgggttattccagccaaagacatttcaagtgcctgtaactgatctgtacatatttataaacgttgatctggaaamwraaaaaaaaaaaaaaaaa

SEQ ID NO: 1128 - DNA, 547 bp, Rattus norvegicus
tttttttttkkgkttttgckycgtcttttatttggggacaraaacggtacaaggtcagatatctcccagagggcactctgtggatatttattccagcgggagtcctgatcccaggkagggtttgttgagtaagcgtctggaatgagtggatccgggcatcasgttgttggtgsgcatmgkgysggttcatctgtaatactgcctctgtgtgttgaggtcactgtatacttctggcctctgaccctgaagctcctgataaggtgactcagtctcagccatgtgctgtttccgggtcccgtctgcagtccctcggcctcgagagaccaggcggcccagagagtacaccgccagggcgatgagcagagtcagcaccaagtcgcccagcacaatcccagccagtacacccgggctcacagaggaacattcgcatcctgggtaattgtcactctgggcctgtacgggacttaatcctcccacagtcaggaggacaggaaggaacagaaagcaccaggagggctctggggcccccatggtggccagacgtgcc

SEQ ID NO: 1129 - DNA, 782 bp, Rattus norvegicus
cctcgaggccaagaattcggcagaakkttttttttttttttttggaakgatcaaagatgtcwttataaagtttttcacgacttyattckaaayatacagaataamaaatggcgtactcawttgtgagacaccaaccagattttcctkakackgtctcaaaatttarmgatsaatttcsccagasggtgygcaatgcatcawamaatggcctttttgarggtgggaaaggaargcatattacattgytccatgayakgcatgcaagactgctayccaasatatatwactkayatacatttggkgacttagaraaaccaatcakttgtgayaagcctgaaaagcctggcatwtttaacatacgtcagaaggttctgtgtggmcgargttctscarttggaccatgtggccctgtgaaagtgtcavaakgccaattttgttaagtttgcagcadaacatcaymtcswscctaargaatacaatgtggattgaatcrarggtggrgaccttaccttaacaaagaaagcaaaagtwtgtcwgygtaaaatgtggactaaactgctttcagggagaaatgttttaaaaatcagtacaggttggamatggggatcttccttsctggtgagagccctyccgatgtaaggcaggctccaccacgctaacttctgcagataaaaactctctgcttatttmstcktstcctctgagttcaagcgctgctggattcgtttggcatagctttgtgccatggagttaataatagacaggataaagtaacacaccac

SEQ ID NO: 1130 - DNA, 1003 bp, Rattus norvegicus
tccccagcacggaagatgtcatccgcaagactgaacagatcaccaaaaacatccaggagctcctcagagcagcccaggagaacaagcatgacagctacattccctgctcagagaggawacacgccgctgtgaccgagatggcagccctgttccccaaaaaacytaagtctgamacgrtgaggacttccctccgcctactaacggccagtgcctaccggctccagtcagagtgcagaaaggctctcccaggagactcgagcttgcccacggatgtgcagctggtcacacagcaggtcatccagtgtgcmtatgacattgccaaggccgccaaacagytggtcacaatcaccmccaaagagaacagcagytgagctgcgggtkccgccctcctgttgtctggaaagtccggctgcaatgtagacatgaactttgcagagttttacaaaaatgtttaatgatgacttaaaactttttaagrgaaaamwmarwawwahykkyrcakgttttctaacagatttttgactgtwatttaacccstgccttatttgtgcctgtttgcagcttarttctgtcctgttggattgtcaccaagtgcttacttasgtcatgaccccatgtgtttaaragtaattgttcagagtttgttacamctttcccatcctttaaaatctctaccaatgcctaaaactmtaattgatatttttagtaaaacattttygtaagagrtaagaaaattggattttaaaacmgcmgtwgcagcagctyttccttccaagcattggcagtgagagagctttccgtcctgggggcctcagctcgggwgtcttcaggtgtgtatggagagcaggkcctcgccgctccccagggacagcgcatctcttwggagygaccaggaactgatccttttctaacttttgtatcatgttaagtgttgtcttawwwaawawwwwwawmwtgattttctatctataaagattttaccmtcaaaaaaaaaaaaaaaaaa

SEQ ID NO: 1131 - DNA, 727 bp, Rattus norvegicus
  misc_feature (709)..(709): n is a, c, g, or t
tttttttttttttttttgcttcattcatctttggtaagacaggactgacacagcatacctggaagcttagtggggcagcccaaacctctacctcctgttgctgggggacgctgggctttacctcaggcttgtgtgggctcatgcagcccagagattctctggtggtctccaaacattgggagagaaacwwwktwwywytytkkwtgaagtaacactattcatacccttgagtaggtcctgtgcctagtccctcttgacttcagtgctgtctgcagtgttaggacacatctgagggcaggcaggacccatggcagtcttacatactggtcccagcccttcctgccacactgagcttaggatgtcaaagctcttgggtcttacaggctggagctcccagtcttgatgccagatcctggctttgagtcccagcggcagatggggcacmswcwgmcratggctgggacactccactggtccatagccttgcctgggagaagcagcaacttcactgcgccggacagcagcccctcgcctgctcagcaggtggcagctggcagcagcatagccttgagagctcagtacactagctgtgcaaagtggtgtgtgagcagctcctcagccgagggtctctgacgagcttccacaaatatgcgcctcaggaagtccctgccgtgttctgagatgtgagagggcagctgaggattggtangctgggtggcaatcttga

SEQ ID NO: 1132 - DNA, 777 bp, Rattus norvegicus
ttttttttttttttttttwwkykwkwdwwdaaagkgtctgcaagttttatttgtagactctgttaagcttgaaccataaaagytgcaaaacagtggtttagagagcatgtcaataccatgggggttggtgggtggaaactgttccttctgccagttcytaaggctggaagtggctagggcaggcartggcsaggaaatagctggatgagctgaagcttgggtggcagtgcttactyaagcctgactcctgsctgtctcargccctggggtcatatacacggsycrtgmmkmstgssaacttgtgtcgctggtcccagagcaggaagaggaaaggctgctgcacctcaaagatgagtaagtttcgggmmasrgmkatrrtkgwvrmtscgkcygyktccrsrcckgyctctgycrgttccaacaccgtctcgtgtttcatggaagacacctgaagatctgggtcctsagtcagcccacacargyykmgwkcstaagtgaagtcaaagaattccagtttctccatgattgacagcatgtcttggmtgctctwtactttaatgcgaggcatcatcacgtaagtgggctgaaacttgsmymgykcyagcttcttcaggatggccttaaagacagtggggttgagtgccttttccatgtcttcaagttggtgtgtcgggctctggggtaccatgatcacaaagctcaggttgtgagagagaagcagctgtcccaccttggccttcaaagtctggtcattgaaaagggccagagggtactttc

SEQ ID NO: 1133 - DNA, 1053 bp, Rattus norvegicus
tatgagactgcagttgcccttgattgtgaaattcccaatgagttgccatataatgattacttcgagtattttggaccagacttcaaactgcatattagtccctcaaacatgacaaaccagaacactccagaatatakggaaaagataaaacagcgtttatttgaaaatctgcgaatgttrccacatgcgcctggtgttcaaatgcaagctattccagaagatgctgttcwtgaagacagtggtgatgaggatggagaagaccctgacaagagaatttctattcgagcatcagacaagcggatagcttgtgatgaagagttctcagattctgakgatgaaggtgaaggaggtcgtaggaatgtcgctgatcataagaagggagccaaaaaagccaggattgaggaagacaagamggaggcggaggmcawsargmcagatgttwargwagamgmcwaatccaaggrcmatmgtggtgagaaarcagacvccaaaggagccaawtcagaacaactcmacaacccttgaatttgactccccaaccttaggaacctcgaaamrygagrcgattytgggataaraaaccttcgctgtttraggaagtttggcttcatttwawactgttttggcatggactgtattwattttcaaaatggcktgtttttggttttccytggcaagttwtattgtgagtttttstaattatgaagcaaatttttttccmccatgctttatgtgattgtatttaaawtgatgtgttattatgtcaaaaaaaaaaaamcggatbtattaaagaamcaattggcctttywrarmwrawwwwwmmawcttttgtaattatctttattaaaaaattgtwcttgrawrrwmwwmwrwmwrwwwattatgaargcttgtttccaagcccgactgtgagactggagcatacccatggtgatttcagtggcagagaccctctcactgagtctgtacgtgcttactggctctaacaggtatttcctatttcaataaaaatgacaccatgtcaccttgtatagttaaaaaaaaaaaaaaaaa

SEQ ID NO: 1134 - DNA, 730 bp, Rattus norvegicus
tttttttttttttttttktkkttttaaagaagtattatacaattttattgtttctgtaaagtcatgagaccagactgtttaaacatttatcttaaaatcaaagctcagactatagcttttcacttttcyattctaakaaaccaaacagaggacctgggttccgatgccagcactgagtggctagttyacaagcatctataatctccatttcagggtttccaaaacctctcctggcctcctcaggaaaatargcatgcaagtggttgggtgcatgtgcatgtacgcaggcaaacactcgtacacataaaatctgttgttaaaagacagaaaacggaggcttttataagtaattttccttgtggcaattaaatgtaaaatggtgcttgcctyktkcckmattcactggaactgggtaggaacacagaagtaatcaggttactcaaagacctgggctatggggggggaaaagaaggaggaagtggaggaggagaaggaaggagagrrggaagaggaggaggaaraggaggagctttcccctgcttccagttaagctctcgatggtctcaggaacaccaagtgacatttccagaacctccgagaagcttgcctgcatagactgtcgtatttaggggaacaccacatggcctttccgtcctgcactattactagctgagacagatttattccctttgtaccaggaaactttagccatggatgtgagtcacggagc

SEQ ID NO: 1135 - DNA, 1363 bp, Rattus norvegicus
cacgaggctctkcasrgtgcgaaagaactgaggcttttcctcatggctgaaaacaaccaccctgataaaccacttaaggtgttggaagaactgggcaaagagttccttacagagtacctagaaaaattggtacaaagcaatgtattgaaattaaaggaagaagagaaacaaaaatttaacaatgctgaacgcagtgacaagcgctgggtttttgtagatgycctgaaaaggaaacacaaccaagtgggcaaaatgcttctccagacatttcttaatgtggactcaggcagccaccatggtgaagctaatttggaaatggaggaaccagaagaatcagtggacactctcaagctttgttcctccgaggagttcacaaggctgtgcagagaaaagaagcaagaaatttacccaataaaggagaccaatggccgtactcgaaaggctcttatcatatgcaatacagagttcaaacatctctccctgrgatatggggctaacattgacattagtggcatgaaaggccttcttgaagagttgggctatgatgtggtggtgaaagaggagcttacggctgagggcatggaatcagaaatgaaagactttgctgcactctcagagcaccaaacatcagacagcacattcctggtgktaatgtctcatggcacattgcagggcctttgtggaacaatgcacagtgaagcaactccagatgtgctattatatgatactatctatcagatatttaacaattgtcactgtccaggtctacgagacaaacccaaagtcatcattgtgcaggcctgcagaggtgraaacyctggrraagtgtggatcagagagtcttcaggagcccactcctacagagctgtagatctacctaggaatatggaagctgatgctgtccgcatgagccatgtggagaargamttcrkyrcmskstactstacaacaccacaccacttgtcytacagagacaaaacaagaggctcttacttcatctccaaactcatttcctgcttccggatacatgcctgctmttgtcatctatytgatatatttctgaasgtgcaacaatcatttgaaaaggcaagtattaattcccagatgcccaccattgatcgggcaaccttgacaagatatttstacctctttsctggcaaytgagaacaaagcagyttgaagaagtgatcttgkccaaggatcatgatatatacctgcaattccaggattagggaaactgaggaaagaataattatgaattcaagaccarcctcagcaatactgtgggattctgtcacataaacaagcaaacaagcaaaaataaaacaaacaamcaaaaaactttraaaaaaaaaaaaaaaaa

SEQ ID NO: 1136 - DNA, 1070 bp, Rattus norvegicus
ttttttttttttttttttyytyttatgaaaaaatgtgttttaattaggcaaaagatgcatcaggacaaataatttttaaaacawagtctccaagtcagacattgagaatggcaaagggtaagcaaggaaagaaaaaaaaaaatcaragataaaatatccagaagaaaggcacagatagcyatatgcaattacatgttagaaatcaraattttgacagtgaaaaagatgtttamatatttcayaaacttgtagyaagatttccacttaggcagttttgaaggatttgactasctgcytaaaatatgaaaacaaagcaraacgaaaccctatattttaataagtgayartaaaacaggacagscagccaactaagggacaaagagaaggcgswsgrkggaaaagaccaccacactcactgcaggctcgtggctcccycaaccccattcgcctycatcaggctgatgacctcatttcttccataraacctggccaagtcgaaggcggtgtcccccttatggttccgatgcccaacattgcaggctgtgtgcttcattargaactccaccacagggaggtggccttctttggcagccaagtgcaagggcaggttcccttcattatcttcgatgttaacatcagcttggaactccarcaaagcctgtacagtgtccakgaaacctgctctggcagcatcgtgaatgacagcaaaaccagttcggtctttcaaattgggattagcacctctgaggagaagtctcctggcaatctccggattcccaagtttcataacctgcagcgcagttctcccaaatccattttgagcgttgacgtttacattattttgcaacaaactagtaagttgctctaggtcccccctggcagctgcggacgccaactcgttcccccaaggctcggccattctttagggtcctgacgatcgggaaaagacgattagttgcttctctttttccccttttctttgctcctaatcaggctgcatgatggcatcggaggctgacagaaggactgggatggttaatctggagtagagcttggtagtaaatactagc

SEQ ID NO: 1137 - DNA, 793 bp, Rattus norvegicus
gacctctggcagcttttctttcatgtgactgtgggagcatttgtcacactgcagatctggctgaggcaagcccaaggcaaggctcctgaccatgacgtctgacttctccctgcagatgatttgcctttgccttcaggggagaaaggagaggacataattaactgccactgtgatgaagaaaccagtcacaacacatgagaagctctgctttccttctctgcccatcttccccttttgttttacaaatcagcctggcatgcctgcgagtgtgagacctggtaagaaaactcccacaaggatcctgcagtggaacgcaggcgcatcacagtagaagttcagcatcacctgaagactgactggcaggcagcactgaatcctcactagagagctaagcaaagcttggttgtgggaccgtgctctgaggaccaagccgaaatgctaccacctgagtttgcctttgtgaggcattagtgtagaccaatgaagaagatgctgcaggaatwgggaagctaccctctaaaacagccactgtgctaagtttcagattatttgcacaattatagtaccaagagtttatgaagtctagaaatggcawgaaatttgtttttttactctttgtttctgccaccttctaactctggaggccacctggtgtggagagggctgtgatgcgcatctccataacatcacaagtcctgacaacagtgatggcgtgtttcctttctagaccatgtttatcatttcttttgaaatcactaaaaatacatgattcattgacaaaaaaaaaaaaaaa

SEQ ID NO: 1138 - DNA, 508 bp, Rattus norvegicus
tttttttttttttttttccatgtggttaatttttttttagttctcatttttttctaakwwwwwwkywwywwkwwaakaattcagagtttatacaaaacatctttacattatttcttccaaaaaagacwagtatttacacaaatggcaacagaatcaaaaacaaaaatcccttccgactgccacctggaaggggctggctgttttgctccctctcccacctggcactggggtgggcagctggccaggaggcagtgtggaggtgggtggtgggggggaactcccagctctgcagggcaaatagccacctgggcacctcacctccctccaccccccatgaggtcatctgcctgcagcagctctcctgttccccaggcaacagccaattaagacattaattaccgtgagagtgaaggaggcaggagatgcccaagaatcccacaaggaagggatttttttttggtagaagggtggtagacactaccccactgctaggaacagcattgtatcc

SEQ ID NO: 1139 - DNA, 920 bp, Rattus norvegicus
tcctcgctggtgaggtgttccaattcccgtttccatgtgcggtccttccttccttcgcgcccattggaagggatcggggcctttcctttactctttgcgaaggggactttctccgcgatttattggctacctccgggttcccctgccggcttttgacacgcggcccctgaattgtaatcgcactcccttttcggccacttgggtaccggccccccctcgaggcttgacttgcttttatcggccgtatcttcctcggagctggagcctgaaccctgggccctgcccttcctaggcaaggaactagtctcgcatttcgcttctggctcttgcagctttatctgttgtctattttcktkkttttyktkykttttdwtwhwywttcctgamattttaatctytawttarctcttggatgttcatatcctatcagtctgagtcttcmgaagtaaagattccaratcyctggctcamacgtcaacgaaagmaagckaacktttccttaarccaggtctcggtgagstcgtctgtggtgcggatttcawacacctttgtmagctccgcgatctgcaccagcctgtttttacttcccgcgtacatcatctgttgttcaggcttgcascccacggggctggrgaagatgaracacaaagggtaggacaccctgccgtcgtcatgcacgtacttatagctrtagaccacgaacctgggctgtctctctggcaactccracttaagttcctctggggmaacattctggaattcrtcttcyagcaccaccatctgccggkctttgtccactttcaywdtkwtkkmkgbmywghwsrycwsktywcrgammcksmmywtccymagkgwtwcctttagctccgggtccacgtcacacaccaccagggagtcggacatgttttttcystcstsag

SEQ ID NO: 1140 - DNA, 1281 bp, Rattus norvegicus
gcagcagcagcagcagcagcaacagcagcagcagcagcaacagcagcaacaacatgtgacgagctggccagggaagcaggtagagacactgagactatgggaagaagctgtcaaagcgagaaagaaagaagctgccaacctgtgccaaacctccacggctgctacgacacctgtgactctcactactccattcaatataacatcctctgtgtcgtctgggactatgtcaaacccagtcacagtggcagctgcaatgagcatgagaagcccagtaaatgtttcaagtgcagttaatataaccagcccaatgaacatagggcatcctgtaaccataaccagcccgttgtccatgacctctcctttaacactcactaccccagtcaacctcccgacccctgtaacggccccagtgaacatagcacacccggtcaccatcacctcgccaatgaacctgcccacgcctatgacattagctgcccctctcaatatagcaatgaggcctgtagaaagtatgcctttcctgccccaagctttgcctacgtcaccgccttggtaaacagtawwawaaarwmaaaawrwgggtaaaagtaaatatttaccagcaacttacctttagttgataaaagcaaaagcagactwtgaaattgggaggttttattatattagttaacaagagtgtagtagctscagtywygmkggggttgttcaaagtagggtgtgtgtaacgtctcactggaccactttagtctaaccaggaaccctttagctgacagcattgcttacgcaggaaagtagctggcaasgtgagtgccagaattcaaaccaatcataaaatccattcaaaataaagaakywttwtttgtttttaawamawmaraawmawwwtattgtaaacactagcagagtttctccctcggtacaaggtgggtggttttaacctggagtctaacccacagactgagagccgtgtagcagtgtctgtggttttgtttgtatgagtgaatagaggcaccgtcataataaaatgcatctcagagaatatgcattttacctttgggaatatgttaatttcaggcagcattccctatgggaaaggtgataccagctctgatatgcaaagcatatgataatttatcattctaacttcaacatataatagggattgtgacctgatatttggagatgkwaatattgctcagcatattaatcctgatggaatatagcattgtagttgactttttttaaaaaaaaacaaaaamwwwaaaaaaaaammwmrwrmcg

SEQ ID NO: 1141 - DNA, 1011 bp, Rattus norvegicus
tttttttttttttttttcagtctgaatatttgctttatttaagagttgtgtgccttggycccacagtttcagggtcaagtttgggaagtttgtgccacggtactgccacagagaggaagtggttcaggctgctaaggtccagggtcacctgagttttgaggtccttcaggagcttcttttggggtggcctatcttacagtggctgttacttcttcatacacgtcatcgcttytaacttgctgaaaggaagttgctttcttccccttctcagaaaccaaagggacttcyaaattgwattttttctctctctgcagcctgtgtattttcacatagagaactgtgttcaccaaaaacattattcccactgacagataaaataggatgtgaaaccmswcrkgmystgatgactggggaccaaatagctccaacttggtgctgcgcttaaggacacggccgtcctccgtggytacctcgcaccagtatgatccatcatcttccctttcagcccttggtatgtggtactcggaggatgtgctcctgtcctccaggatcttactgcccacatagaaggagaagtaaagccgtaagccaggactctgcaggaacaatcttgtctcacagttcaggatgaccagactcccctccgggaagggagatgacaaggacactctcagcactggtgtggcaaatagctctttcacggtgacagacactcctgcagacttgaagagtttttttcccatggctgagcagtgatagatgccgctgtgactcaggttggttttcagaatggtgacctctgaaccttgagaaaagtcaagggattctccatttcgatagaaagccacattgtacactttcttattctgccacgggtgacacctcaaggccagaggctctccttctgtgaggactctgtgggaggtctggagtagcagccaatctctgtagatttctaactgcacagggtcacttggcattgagagacctgtctgacacttgtattcaccc

SEQ ID NO: 1142 - DNA, 571 bp, Rattus norvegicus
tttttttttttttttttaabtgaacagacttttattgagckcctggtgtgtggtaycaycaaggcacagyacacagagacattakattggatggcagcccacaaggagggccttcctggaggcccccadaaaggcagtggtagacakacacatgcagcaatcacaagccttctcctctctgtggtttcagaaaatggaatggaaagagacaccttaggtggtctctaagacttaractcacatgttccatgggtataaggcacatgtgtagaacccacataactacggatgtgtgtatgagacaaaaacggctatgtatggcacacgcacaggcttcacgtgccgagtcggagtccacgtgtgcacargccgcatggatagggcacaagaactccagagggataggggaggatcttgggaccgcaaggcctcaaggctggggctggtactggccctctgtggctgtgaagaagtcatccagaacgctccgaaggtagtcaaacgtgggcctgtcctctgggcgctccytccagcacagcatcatgaggtggtacagctcttccgcctcgtg

SEQ ID NO: 1143 - DNA, 789 bp, Rattus norvegicus
tttttttttttttttttthaacgkggatctgggcttttattgctagaccagggacagagcacagtaagaggacaggctakaccaggagcatagtgacccatgtgactaggctagatgggtcagaarggtcagtccatggtccaggggagggaaagaccagagtcacccatcttggactggtagacagcgttgaacttttcattcagctcaggagtaaagtattccctccagttccccacaacacctttccggaggaacttgccctgactctggtctatgatctccttggataaaaggctgtagttgaccatgttactctgactcatgaaggagaagctgctgtgttccagtatgatctcctcttcctttggccccarggtgcgccccaggaattcacttaacttccgaatggttgagcgaggttcctgatgcagctcctcgtaggtgacgaaaagcaaagttaggtccttctggaggcccagccaccccttcacatggtcaaaccaggagccaaagaaaccttgscctyggamwtcatcwgagycgsksamagsmsytkggcgttcaggtgggaggtgagtagacgaggccaggaggtgttaagcttggaaaggaggctgctaaaggaggcttgctccatccagggcatgcgggcccagttggggaggtggtgaatgggccacaagtggccctcacagaagataagactcagaacctgctgcatccaggtggtacaggttcagaggttcagtccattatcaaggcggggagcatggcagcatcctcgtg

SEQ ID NO: 1144 - DNA, 810 bp, Rattus norvegicus
  misc_feature (474)..(474): n is a, c, g, or t
  misc_feature (520)..(520): n is a, c, g, or t
  misc_feature (728)..(728): n is a, c, g, or t
gcatggcccggctgctgcgcgagtaccaggagctcatgaacaccaagctggccctggatgtggagatcgccacctacaggaagctgctggagggagaggagtgcaggctgagtggagaaggagttggaccagtcaacatctctgtcgtcactaacagcctctcttctggctatggaggaagaagcaacattggctatggctctggcttgggcagtggcattggcggttttgcctcaratatcggcccactcttgaacasgmgsggtttgggtagtgggctcagtgtggggggctccggyttcagtgcaagcagtggtcaaggtgggggtttcascartggtgstgscagcagctccagtgtcaaatttgtsyccaccacctcctcctcccggaggagsttcaagaghtaagaagaacctgbtccaagaccctgsccttyacgggcagccccaggcccacagrgaytgcatbttntaggcagtcccccagrccaaktyttytttttttytggagagtagtntwgrccatgcctgbtgcaaaaccacatgstttggttcctggaagggawtaaatcccaayttbtggcctccccatgcvtcagtthttcatsttgtyccaagtcagtachtacgtgtgttctttgrtaacccmgacatccaaattgttgtwgaacgtaawcchscaaagcrgaccccacccccmccbtggcacccacyttaaytytgtcntggktytgacgtccymcagactgtgtccaataaagsttttdtwwthtdaaaaaaaaaaaaaaaaawgttccgccctcgtgcc

SEQ ID NO: 1145 - DNA, 630 bp, Rattus norvegicus
tttttttttttttttttgakcaaaacaagttcagcttttattggttttgattgtttcccctttgwgcmtgaacmccggtcaccacaaratgtctgtgcagtgtgttggcgctccagggctgtgcagggccatagaaagtgtctcaggtaaatttgtcttcgttgttactgttttatttcctctcttatttttctcttactttcctgtttgtactccaratgttctagaagtgcccgggcgctacatttacccatcgatttgcattgctggctcaaattctgaagtgaacaattccttgtataacggargaaaatggagtcgcacaatgtctgggtatattgctttaaatgccattagcttttctgtatgtcgtccgcatagggctcttaacgtagacaccttgcatattagctttgttagaattccatsttctcggtggttcttctgaaggacatgttgaagggctagctgaattttctgttgcagtttttctatttttaccttttcctgaagccaggagcgatctgctgacatcagtacaaatgcagaaaacaatgcgatttcgtcttcagtcagatgcatasaamamaaactctwcccaaattcaracacaaagctaatgaagtcttc

SEQ ID NO: 1146 - DNA, 1540 bp, Rattus norvegicus
cggcgcggcggcgcggccccgctggctggcgcggagcgtcagtcggcagcgcggggcccggcgggcgcgggcgaggcgctcctcctccccgtgcgagcgaggaggcggtggccgagggtgggaacccagccccggcgggagcgcgccgagagccacccggcagccctgcgctttgttccgttccggggctggaggtgtggccggcgttgtggcccgttccgcgctggtcctgctgcgctacgtgcacccggctgcacccgggcgcggcggcgggctccggctgtgcgtggcctctgtccctacccacccgcctcctggcgtaaccggtgtgcagcggagaagtccgctcgtcactccgacccaagtaggagggcctggccggcgctcagacagactcctttgattgtagtcatcctggggtctgactaccagaagcrtggcgaccagcgctgttcccagtgacaaccttcccacayrwrrmctsgtagysgtgggagatggcggtgtgggcaasagtgctctcactattcagttwttccagaagatcttcgtgcctgactacgaccccaccattgaagactcctacctgaagcatacagagatcgacaatyaatgggccatcttggacgttctggacacagctgggcaggaggagttcastgccatgcgggagcaatacatgcgcacaggggatggcttcctcattgtctactctgtcaccgacaaggccagcttcgagcwygtggaccgcttscaccagctcattctgcgtgtcaaggacagggagtcattcccaatgatcctcgtggccaacaaagtggacctgatgcacctaaggaaartcaccagggaccaaggaaaagaaatggcgaccaaatacaatatcccatatatagaaaccagtgccaaggrmccgcctctcaacgtggacaaaaccttccatgacctagttagagtaattaggcaacaggttycagagaaaaammaraarawraaaaagaagacaaaatggcgaggggacagggscmccggcactcacaaactacagtgtgtcatcttgtgacagcctgaagccctgggcatagcaaccgtgaactgccagccctgggaccagcccactgcytaactgcactgagaaccatttctaaccacagcccttggctctggactgggcacaggaagagaacgagggaggaggggcaggagcaggcaggggctggctttgctgcttctcccatggagacatggagacagcttccaaacccttgttgttgattgagcccagttcccagtctyttggtgggcttgttgtttcttttaactccatagggmtggtttgctgtggaagtgyttttatccacattyaacgcaccagacaagccatgagcaagcttcctccctgaccccgtccccagtgtytragctcttgtgtyttttgtagatttttwaattatttgagtaawgattattttattaaaraggtctgtgcccmttgcctgcaaarmmmmaarwmwwwrgcagacctccgataaatgctgga

SEQ ID NO: 1147 - DNA, 901 bp, Rattus norvegicus
  misc_feature (163)..(163): n is a, c, g, or t
ttttttttttttttttttyytttaaaaattactctattattatcaaatagaaccacagtatccaaaaggtaattagaaagttctattcccgactaaatggycctgcatcgcgcctgcgagtggctkkywkyywwwtywytdybyyyktkywkwttgdttdcanccaytttattgtcaaggaaattaacagcctgaaggggttccccaggcccaakcgctccccccaggggccctggggaagcaggcaacaagcgacctggtttcactaccccgtcctggggaraagggacgggagakgaraagggttcacagcadaagggcttggggcgccccgctcmcgcccactgagctcartctgggggcagccgasgtacctgtcccargggccttaracccttgcacctggctgcgcatctggccggggcargggcggggcgcatgctcactckcccgtgtgggtccgcaggtggwacttgagggactgtttgtagcggaagcacttagcacagtgcgtgcargggtaggsccgctcgcccgtgtgcgctcgctggtgctccagcaggtggtgcttctgtgtgaagcgcttgccacactcagcgcagtggtagggccgctcacccgtatggatgcgccggtgctccagcaggtggtgcttgcggatgaagctcttgccgcactcagggcaggcgtgcggccgttcgcgcgagtgcacgcggcagtggttagygagcttagatttctcactgaagctcttctcacactccgggcacttgaagggccgttcaccggtatgagtccgctggtggcgcagcagatgcgacgggcggctgaagctcttgccgcacaggctgcaaatgaaggagacttcgtgcttgccagcatgcacgcgctggtcctcgtg

SEQ ID NO: 1148 - DNA, 831 bp, Rattus norvegicus
  misc_feature (420)..(420): n is a, c, g, or t
tttttttttttttttttgctttacgtataatttttttattttcatgcaaaataaaggcacacttawtaacaccctttcaattttgacttacatgatttaaattcaaccttttataacaatagcttaatatctgatgttacatttatattcagaatgaaccaagtgcagcaacaaaatgcagcagacctaaaccaaggtgctacaaagctgcttctacatcaaaagacagacaagcgtctgatagagtgatttaatagaacatatatttacagacatacagctatcctaaagaaagacagacagatttaggaaagcagctctatctgcagaggaasgaawcagcatgttacagacagtcaattatacatagaacatttgacaaacaccacagaaaacaaactctwttcatttaccmksgtncmraayttggcataaatcttttggcaawtgagtgcataaaggaagttttggggcstaagcagaattttaactcamaamataaatacttgaaaatataagcaaaatctaatrcaattmtgtaaaatttaaaagaaagaargartggaaywacagctccacgttagtaatatgtmtatccmtgattcacagtcttgacygwggyktttaaaagcaagggtgcattaaaccaatgagtaaatatctctcaattatgacatgagctgctcccacatcactttatcaacagctaggaaatgaccattattttcacttaaaagacaactcgttctattgatattatgccctggcgaggtactaatcagatgcctatcatacagtaccctgcttatgtcagctgctaagacaggaact

SEQ ID NO: 1149 - DNA, 1305 bp, Rattus norvegicus
tttttttttttttttttattttgaaataaattctttatttaagcttttckkcccrrwyytatttttttttagtctggctccagggactgatgaaaatcattttccgccagattttattcccgtgtccctcagatgttccctggactgagaatcctttctagactggagccacgctccttccgatgccgcctgcttcaattgccagtaaccaagccggtccaacattgcccacggattcagcagaggccaagaggagcctggggcctgtcaggacgatccttccttccttggtgccctgaggctgagtgtagttcacctctgggactggacctcacctccagagcaaagcagttgaatttgaagacaggattcccttctccccatggcctaaagggctggggactctaacaggaaaggctagggtggagatggccgcctttcactgtctttgtccagacgtttggctttgasmkcrtkmckmayttaaagggctttatgagacataaaggaccccctagttttccagactctaaccttctgccccaaggctaagcagagagcgtgcaccctcaggcagacagtggccgacagacagacaggcctcagccaagtgcactgctccaagcctgtaacccagcactcagactgcttaagctgcacgaaragttcaaggctggcttcaaccatgttacaagctcaggccagcctgggtaacttgaggagaccctggatcagatgtgttgctactagtctgctggctggttcagggccttcctcagatgcacacaaacatctgtcctttttaggtatttttctaagaggtgcctttctagaactagagccacttggtgccgcacacctatttcctcatctgacggatgtgtgcagagccgccwcrtrgacacggtgacagcaggttcagcagagggacgaactccagtctccaggaacagaaagggcctttcagatttcctaaccatcaaaagaacctttcactcagcctctcaaatcgcgtccacaccttctgttccacacagctgtctccatgcctctgtatcagcagggtcagaaatccagaccagaggctcgaagaagtgcagacagcacagtctcaaggatcatgtgaggggctgcctcccttcaaaggacggacttcagttagctcttcagcggggcacaggctcatgaactgggagggtttgaacaggaagcccaatctagactcctgtgcactccctttctctagcctgccctcgccatggtctgaatgggctgtaacggatgaggtaactgatgcttctcttg

SEQ ID NO: 1150 - DNA, 542 bp, Rattus norvegicus
ttttttttttttttttttacattgtaatctatttattttatacacgtgacgtcataagcaaaggctttgcttgtgttctagctaaactccaataaatawatatgtacagatatgctgagcctacaaaacagtaaagaaaaccttttcttcacaaaagatacacatatgatacatttgttccttacactgacatatgaactcattcctagcttacttaaarcaaaacccttctggactctgtatgccaatatctagaggcatgtacctggtccttttattttatccagaaagcaaagctatgcagagaaaattcctcagwttctttattaaaaaatggcctgcatatggcctgctmcttattattaagtgacatttaawtgttctcaagaagttggaaactctttakaccagttgtcctgaaatgactggacaatgccctgtggatgttgtcaaaatgcagcttcttatgaactggctcactggggtgggagtggggkastggtgrsrstctgggatcttcactgtatttgtcacctccgccc

SEQ ID NO: 1151 - DNA, 1705 bp, Rattus norvegicus
acaagwytywwwkwwwkywtytyywwkwycaaatayatacatttttaataactgaaatatttacataatgaagccatgtcarggttcaacattaagaacagtgttttggatgtcctctcgaatgtttarraaaaaadtacaaaacawraawcawdwcaacctrgtaactcaagctcacagttacattattctaacaatccagtctttatcttaytaataascaaacatggsaacagscacacctactctgttgkvagagctgtttavaacttagtaattttcaaataaattttgcccckggtgatcttcykmrtkmckaataaagccgatttgtcatcaatacagctaaagcttgatgaccagtaataaaacgttgtgagcadaaacctgtctttaatggwgtatctttggaagaaagatgtaaacatttaactaccacggtgaattactactgtgttcgstcrwrycyctyktgtaaacttaccttarttactcgtttattgttgctgggaacagaccccaggcccttacatgctaagcataagctygcccactgaggtaatccctggtcatttgctttaaaaagaargtgagctcctyccctyccttatacttttggaattgttttattaaaatgwwtwywyywwwwttwwwtwwwkwtttagagttagktgaaaatgtawtgagtaaaatgctccagacttttagcctttgcttcaattgtgagccatcaarttaagggagggttaagattatgatgtatcawcctattcacagawgaacacamagctggttgctcactgsagaataccagsctctgggaaacacaccataattatcctasttatttgggttggcacaataattacttttcttttatgagtatattgatgaattacgaaatgtttwwkkkwkyyywbywwwaaaattttaaaaaagacttttawacatacattcacataaacacatyaatacagagatacattaggaatgaactgkctgctaggttttgcaatctaattttaaactccatgcckttacaagagcttgcttgtcatttctgatgagggacgtggggatgagactgtaatgggtgtgactagwaytcamcttatycawgttggsgcctatacaatacagttttawtattaagtagamttctgcaaaagmattggggagccattttaatattwacagggaacgaatcagcagaacaagattctatcaaataggctgtgtacagtagctgcagctwacaaaacacaccagtaatctgtgcctggtgtataaagagaaccaaggacacagatggctttacaaccaagtgagtacacagcatcaacaaattagaggacaaaagaattcacattttctacattaaaaaaattacagatctcacaaatgtctttgaagacacagaaaattccaagtcctttgaagggtgtgaaagaagaaatctgaaatgtaactctgagtgtaaaaagtttacttcacaagaccaattttcttggcttctgtttcatatattaataatcgccacattttgactataaaaacttctgcttcttcatctagtaccatggcaacatcatctaaaatgctctgtggtgaactatgtgccataaccttagaacaaacaaaatcaactaaagtagcttcttcttcacctatgtattctatgattttcttattgatccacctcgtg

SEQ ID NO: 1152 - DNA, 1428 bp, Rattus norvegicus
ttttttttttttttttwwwtattytcawgtattttatttttaaaacacttaaaattttgcaagctagcagtwaaatattgcccttaatattttactaattagcaccgtatagcttttaaagctacctggaacattgtttcactgtaaatgactgtwaaataagatgtcaaattastctcaacataagatcataaattaaatcattattttttttggctctaggcacatatgtgtactttaaagatgaatttaactacattaatgtatttggccaatctaaaactcaaagtataatagtttaaagcagcacttaatctttgaaattawtctaaaaaagcwtataargaawttgrgaawtcasctataaaaaaaaarggtcactcctttactttttaaaaatctcttaatatttggaagaataacraaataacttggwgaaaaagtcctttggtgcaaagatcagtttaaacatatggtttagcatacaccattctcatgctttgsttattagcagccttaccaaaaagscacagaaaggtctggaacaactcacagcgacagctgaaaggctgaaataaaattgcttagtgctaaaaagatccacgttcagttgtgtagttttaaatggaagcctagacatttaaccactatgttaatgttctcatctgaagaaaaaaaactttcaaaaagttagaaaaaaattaattacacccaaattacttccacatatttttaaaaaggacatttcatttcctawwttytgataaaagcactccacrggctacggcaatggagtccagagccacaaacgaactgctcacwagcactcytgccttgcataccggtagaatcaagtccagttttgccatctgtgratgactatgacaagrtacaaaagcatgtgtttgccataaatagctctggmtaatagcaaagagcgcacactgagcagatcaagttctctataaggaaggagaacgctcgggaccacagccaaatcccattamtaatgtttaagactgctatactattttctcctccaattcaatttggaaaagatattaaggaaytstggctgaaacagactttcmtaaatatcacmatcrtsmykaawyckttgmaygasattttacaaattattttcattrtgaccaagtaataaaacatccymttcrtmcgactcaattatttataacttaactctgaattaatctcctaatttatctagagaacaaattaagtggagtatgccaaagtgcagaaaaattttgatctccatattgtaacataaacatttgtaaaagtaccactcttttaatgattgtatataagtgattttaagatattttaaaccaaagattaaaggaaaaaaattccaaataccagtgcagagcttagtcaccatttaccctaaactttcacataatc

SEQ ID NO: 1153 - DNA, 1027 bp, Rattus norvegicus
gccgagaccgccgtcgtgcagtgctactggatctgggcttctcaggggtctggtccttcctgtggttcgtaggcttctgtttcctcaccaatcagtggcaacgtacagcaccagggccaggcaccgcgcaggctggggatgcggcacgtgccgccatcgctttcagcttcttctccatcctcagctgggtggcgctcaccgtgaaggccctgcagcggttccgtctaggcaccgatatgtctctctttgccacagatcagctaggtactggggctgcccaggcctacccaggctacccagtgggcagtggtgtggagggcacagaaacataccagagcccgcccttcactgagaccctggacaccagccccaaagggtaccaggtgcctgcctattagtaggtgttaggctctggccagggctggaaggccacctcaccatcttaggcctcaaggcctcctgagacctttcctgggtcctaccgtgccarggacagagaaggtggccactgtgggcctctgggaccaaggggagtaccctccctggggtgcctggactgtccgcacaaagttccccctagccagagatctyagtcttaargccctgagaagaaaacagtacctyctggagtggactggcctgggaggcatttctttcatgggccagccaaccaggggctcacctgtccactctagggtcagtagtccagctgccttccagggcaggatgcaagggcttctggggaccagggagaggaagactaattgtacccttaggtgggggttatkaccctcgttcccagtcccatgtccctgtgggtggcagtgactgccgtggctcctgtcatggtggtccaccctgtccagaggctccctccactcctcttgcaggatccctagagcagctcagccctgtcggtgttgtgattgtgattaagtcttaaggtctcacctcatagtgcccccataagctgcccctctctgtgtggctcctgcccaggcgtgggtgcttctggccaggaaggtat

SEQ ID NO: 1154 - DNA, 645 bp, Rattus norvegicus
ttttttttttttttttttcaggttccaaagaggccccgctttattacagagagcacgaaaagctctttccctactgggctaagtcctgttccccttctcggggtgataaatgtgtctctccagttctgtmctatctgtactttccatgtcggttaaagtgtttgtagagatagctgatccgtttgttaaggttgtgcaggtcctcaktgaacattctgtttcccaccatttyctwytttcggatwcaacgctgcaattcatttcctctccarcctmgaagccatactgggcccttgatcagttcttttgratgcttttcgaaatcccccaggattccaatgttgycgtwtacaccaaacagagctctcttctcattccagcgatcaatcactctgggaggtggaagagtaagccttacgcgggccaatagtggaacgcccagagagaagcttctgcatgccgagagcatcgagccccatagtctccgacttgccgcccaagggacactccctgccattactctaggctgtccacctcagtagggacagcaaaccaggcggaaaaatggggagcaggtgtgaatttcaaagacaagacacaggttacagtcccaggcgrgattctwsrcmkcgagtgacagtgagc

SEQ ID NO: 1155 - DNA, 588 bp, Rattus norvegicus
tttttttttttttttttaaaactaattcacagccaytggtttattattgatcacgggggcatttcacatcaacactaaaattctttattgcaagttttacaataatcaagtaaattcagtccaaaaacacaataaccacgatgggggtaggggagcatctacctatagactgcctctctgaactgaaagttcatttttatttatttatttattttttggctcctcaaactgaacagctcccagaggctctccagawgcattwagctttgtttgctgtcctcccccctcctaccacccccccacaagaatacaaaagaacttcatagctttgttctccttaaaatgactcccccccctcactaacctcccctggtgcattttcaatgcaaaaggcctaaggaaagggagggggggtgaggaggagagaggatgagaatccacttacaaatctccctttcctttttctgttcctcatttcccctgaaattcacccaaaccagaccatcacaccttgcaatatataatttttgcagctttttttccttaaaaaataaataccccccaatggccttaaaagcaaagcaaagc

SEQ ID NO: 1156 - DNA, 2902 bp, Rattus norvegicus
ccacgcgtccggtcttgctgaagggaaacctccacttcctgcttgtgagagtattaatccctgctgcagctgtccatccccactgacatcagactccagtttctccaggatccagtgtgttctgaagatcagcagctctcccggagtcttcaaggcgccagatttggaagtctgaggcatctggctttgtaacctgagcagctgccaggttccagccattatctgactgggctgtgcggacccacccagcacattcagaggataacaggagatggcgaagtcagagggaagaaagtctgcttcccaggacacatcggagaatggcatggagaacccaggcctggagctcatggaagtcggaaaccttgagcaaggcaaaacactggaggaagtgacacagggacatagcctgaaggatggcttggggcattcctctctctggaggaggattcttcagcccttcaccaaggcgagaagtttctatcaaagacatgctggtttattcaaaaagatcctgcttggtctcttgtgtttagcgtatgctgcctacctcctggcagcttgcatcctgaacttccggagggcactggccttgtttgtcatcacctgccttgtcatcttcatcctggcttgccactttctgaaaaaattctttgctaaaaagtcaataagatgcttgaagcccttgaaaaacacccgcctgagactttggcttaagagggtgttcatgggagccgctgttgtcggccttattctctggctggctctggacacagctcaaaggccagagcagctgatctcctttgcgggaatctgcatgttcatcctcatcctctttgcctgctccaaacaccacagtgcggtgagctggaggacagtgttttggggcctgggccttcagttcgtctttgggattttggtcatcagaactgaacctggatttaatgcatttcaatggctgggagatcagatccagattttcctggcatatactgtagaaggatccagttttgtttttggtgacacactggtccaaagtgtttttgcttttcagtctctcccaatcattattttcttcggatgtgtgatgtctattctctactacctgggccttgtgcagtgggtgatccagaagattgcctggttcctgcaaatcaccatgggtaccacagctgcagagaccctggccgtggcaggaaacatctttgtgggaatgacagaggcacctctgctcatccgtccctaccttgcagacatgaccctctctgaaatccatgcagtgatgactggaggctttgctactatagcaggcacagtgttgggagccttcatatcctttgggattgatgcatcatccttgatttctgcctcagtgatggctgccccttgtgcacttgccttgtccaaactggtatatccagaagtagaagagtccaagttcaagagcaaggagggagtgaagctgcctcgaggggaagagaggaatattctggaagccgcgagcaacggagccacagatgccatagsscttgttgctaatgttgcagccaacctgattgcctttctggctgtattggccttcatcaattctaccctttcctggctgggggaaatggtggatatccatggactcactttccaggtcatctgctcctatgtcctaaggccaatggttttcatgatgggtgtacagtgggcagactgcccattggtggctgagatagtgggagtcaaattcttcataaatgaatttgtggcctatcaacaactgtctcagtacaagaacaaacgtctctctggagtcgaagagtggatcaatggcgagaaacagtggrtttctgtgaaggctgaaatcattgcaacattttctctctgtggatttgccaatcttacttccatagggatcacactgggaggcttgacatccatggttccccaacggaagagtgacttgtgcaagcttgtggtcagggccctcttcacaggtgcctgtgtttccttcatcagtgcctgtatggcasgarkccwckakgttcccakakgygctgaaactgactgtgtctcattcttaaacacaaatttcaccaryagaacctatgagacatatgtgtgctgcagagagctcttccagagtactttgctgaatggcaccaacatgscttctttctyaggcccytggcaagacaaggagtccagcctcaggaatcttgctaamtgctgtkacctctataccagcactgtgtgtgcctgaggctggtggggccattccrtgacagttcttatagaacagattyrtattmccaaatayatsttcatgtacttaggcttattctctgagaacygcactaaactccacaaaatgaaagtcctgatctcactgtggctctgtataaaaacsagcayccacctttccactggcrtgccacatagyagatgtgaaattcattatagaccctcttgagccaaagtatggtgggaatgtagctaagggggaaatatgtgtgtggtaagtgctaagatggagattcaaccmctggccagggccagagtggggagagtggsgaaatccaagtagatgcttagatttaacttggtggtacaccctgtggtcacttacctgtaagctcagagctaaggggattgcctcagatccaaggcaagcctggcccgaaccctgaagtctttcacagaagtgatagagtagaggcyatgtccttgggcarggatggaggtgagggaatatatttctaaagttatatgggaaacacttgtgaatacttaatgataacatattttttattgccaaargttgtatacttaaaaactcttttcattttcatacattaytaaaargctttctgtaataaagtgtttttatgtaaaaaaaammaaaaaaaaaaaa

SEQ ID NO: 1157 - DNA, 785 bp, Rattus norvegicus
  misc_feature (6)..(6): n is a, c, g, or t
  misc_feature (12)..(12): n is a, c, g, or t
ccatgnctatgngaagaagtcaagtaaatttctagtaccagacatgatggatgatatctgccaggagcagtttctagaattgtcctacttgaatggagttcctgaaccctctcgtggtcgtggggtgtctgtgagaggacgaggagctgcccctcctcctccaccgagagctcggacagctggtattcagagaatacctttgcctccaacacctgcaccagaaacatacgaagattatggatatgatgattcatacgcagaacagagctacgaaggctatgaaggctattacagccagagtcaaggggagtcagagtattatgactatggacatggggagcttcaagattcttatgaagcctatggacaagatgactggaatgggaccaggccatcactgaaggctcctccagctaggccagtgaagggagcwtacagagagcaccywtatrgacgttattaaaaacaaacaggaggggaaaatatcagttatgagcwaacwtgytactgatttsttgtatcmcaggattcctgttgckttacccacaacagacaagtaattgtstaagtgtttttatttgtggtccgtttcttttccccaccttcctccattctgaattatgcattctggcttctgtatgtagtattttaaaatgagttaaaatagatttaggaatatcgaattaatttttgaagtgtgtagatgctttttttatttgttgtttaaatattaacagtgtacctttgatgttaaaaaagtgttgagttaaaaaaaaaaaaaaaaa

SEQ ID NO: 1158 - DNA, 1046 bp, Rattus norvegicus
tttttttttttttttttcagaaaacaagtgttgcttttaatatcaattattggagcatgcaacattgctaaatacaaaagtcatagaagctcacagatgacttcccaggctgtcgctagtcaatgaaggaacagttccgggcctctaagacatcattatggatcctttcttggtttaatttwwykwytwtwytttccccatttagcactacttctatatttgaagacaagcatggcaccacatgcattagtaatagtatatcacacagggatggactcagcactggttcaacactttacaaaatgcacgtaaaaccaatttggaattctacaactttaagaatgaacttcctattcacgagaaaggtaccaggatagttcaacaaggacattgaaactgttggatattgttaatagattatcagaggttgtctcaaataagccacaggttcacagctttgattctaccaataggtagatttgtttcaattttagctagcctccaatgagttagatcaaagcaaggcctctcmtmktgmmtgwatttwctgttttatatccagaaagacatacattgcttgtttttctggaaaacttccagttggggactaatgagattcatgtattcccagtcagtaatgaatgcactataggaagatatgggcagacttcctgtctactttgtctgtgactgcagactcaggttgagttcctaccacacccatagtctgcctgctgaatcactgctccctacttaacctggaactgcagctatgcctgcactctaggacacttaggggctcttctgttgcgaaggccttctttcatctgttatttgcccataagatgccccagattaaccctgggcatctaactggatccttatttattaccaaagatagktggcttcataatactgaccagagggggttacataggccacagacattccccatacaagaatcgtgatgtcaaaacacagcatagtccatcaacagcggtcaggtaaaaggtggtggttgggtgataattattatatctcaaagc

SEQ ID NO: 1159 - DNA, 752 bp, Rattus norvegicus
cacgaggcggcacacacacagaaacggkgagcrgagcagagctggcgtaacgtgaggttcttctcttccagcggttgtgtacgacgaggcagaggcaacatggaagtgaaggatgcgaacgctgccctgctcagtaactacgaggtgttccagttactgacagaccksmamgagcagcggaaggagagcgggaagaacaagcatagcgccgggcagcagaacttgaacgccatcacctacgagacattaaaatacatatcgaaaactccatgtaagaaccagagtcmsgmgrywgkscawgarkkyytyacagcartgwwgwgcywywmkytgaccaragccgagaagcttcagctgctgaatcacaggccaatgaccgctgttgwgatccagctgatggtggaagagagtgaagagcggctcacggaggagcagattgaagctctyctgcacactgtcaccagcatcctgcctgcaggtccagaggatgagcagagcaraagcactagcaatgacgcggcaatggragaggaggagcctgcatagacatctgtggccattatgacacagctggccaggttgttygtgatgctcaaagccacaacagccatttcctggacgttcagagaactgtttattcggcctgacccctctctcaaatattcctgatctcaggattggttgagaaaaaaaatcacaaaaataagwtkaaaaraaawmwwwrwrmmttgggttcaagaaacatggggtca

SEQ ID NO: 1160 - DNA, 734 bp, Rattus norvegicus
ttttttttttttttttttaggcttcattaatatttaywttaaagktcactttttattgtaacaaatataaagtcattgatgtcytataaattttcaamaatgctttaagtacaaaaaaaatacattagtaaatgagagagctaggtgatagtatttggtatggatgtaatatagttgacatgcacaatgatgtcaggaaagctcawgcacgattggargtgaaaggggggggrsacgtgawtgctgtgctgctgattakaaactcatggsttccgtcagstttcwttcttcarggakaccatttasctgtwswctgskgwtgggggatctgagtctggtgtggcaagttcggctgtgtytgcatcaarggcatgttggtactgtcgwasktgtccgtgtgcatgggasgtawgatckcccyagtywytgggtgaaacacggggagtgttgacaggggccatgcaatctctctgtttttggacatgtctcgaagctccttggtagatttctgaatasagctgtgatggacaagttggatatctggggtttgcatgtttctcytttccacwccttcycgtcggcagcacatgatataagcgagtattaggaaaagaactagtgctactgccgagggcacarccagggtaacgaggaaatccgtgtaatagtctcggcttttcaaagaatccgaagggggcttgtactccccaccatcgggcaaaatgccctcgccc

SEQ ID NO: 1161 - DNA, 1189 bp, Rattus norvegicus
caagctaaaattaaccctcactaaagggaataagcttgcggccgckttyktkwytttttttttkwkwkwttcttaaaccaraatttartkgkksrgkkvrrrkkgaacsccacaaaatgaaatgkgtgtaaccgcaattggrtgaccacagtgacgaggcactcaaatggsttcgccgctaaraaraccgacggsagcttttatgtgtaragctytcggcggmctgcctggcttcccgttcacaagtcatytgactytggcatagkgacatyttytgcaggctcagttgtgatcackacaggaatwttctcagatatccacccctttggkgtccwattaaagcatcgtykgcccgaaagaggaktggcwmakkccaawwacmkggsmtctgwwarcagcwgtygttmswwdtctggmmbcktgmmkttaaccatttttgatgcyttctcaaaacctccamatggagtggcaacyctgtkaaagctcctgtaatctggcagttctgcctttccttcaggcttgaaaagtttcgggtacaaagcttccaggagctctggatcgtcgccaatggcctgctcccagggagactggtartacttaggaacagccgtcgtgttaaatctttcaggaggaatttccttcaggggtccagaatatcctggtgcaatgttctccggatttggggggcttcgtggatccggggtgttaggaggagttgagggagcttgctgtgaaccaccttccaggttacttccgtcaattctcccattytgcatggcaagattgtgattgatttgtgcttttgtttcgtactggaaattttcaaaggtgtatttgtcagatcttctttgacgcatcttaaacagtctggcaccgcgattaccgaaatgggacaattcttctatcatgatgtctytggggacgctaactttcttgcccagatccatgccgtcgacatcgtgtccatggatttccttcgtgatggctgatgcttgctgtttcctttgcttcaccatggcactgtgtgatagcatagtttgttttttgttcccttgctgtcagactgcacttttcagcaggggtgaatcccaattgtggaggaaggcactgaaggtggaagatgatggcagttgggcctgatgggttttatccttgaacctggaacggcatggtccctagmtccctcgtg

SEQ ID NO: 1162 - DNA, 681 bp, Rattus norvegicus
cgtttgatgcagatgacccggccactgacaacgctctcctgcggtacaacatccgtcagcagacgcctgacaagccgtctcctaacatgttctacatcgatcccgagaaaggagacattgtcaccgtggtgtcacctgcgctgctggaccgggagrctctggaaaaccccaagtatgaactgatcatcgaagctcaagatatggcaggactggacgttggattgacaggcacggccacagccaccattgtgatcgatgacaaaaatgatcactcaccaaaattcaccaagaaagagtttcaagccacagtggaggagggagccgtgggagtcattgtcaacttgacagtggaagacaaagatgaccccgcgacaggagcatggagggcggcatacaccatcatcaatggaaatcctgggcagagctttgagatccacaccaacccacagaccaacgagggcatgctctctgtggtcaagcccctggactatgagatctctgcctttcacaccctgctgatcaaagtggagaatgaggacccattggtacccgacgtctcctatggccccagctccacggccactgtccacatcacggtcttggatgtcaacgagggaccagtcttttacccagaccccatgatggtgaccaaacaggaaaatatctctgtgggcagtgtgc

SEQ ID NO: 1163 - DNA, 827 bp, Rattus norvegicus
gatttgtgaaggaaacttacaaactattggatgatacaaaacttccctaaggaatccatgttatctttctaagataagagttcctaactggcttactgcactgaagctcaagagaggctcacgtatttgtagaagctctgaacaatgtgtcaggcacatcgtgggtcaagatatttgccaaagggacaaaactcgtagtaattccctcagctgccaacatcattactcccacaaaatctgctttgaagactgagagcgctttcacaactattaatgtcaatcccagagagagtgttttcagacatgaaaatgttaacaaagctactgttctggaagcttgcttgaaaggaaggaaggatatgctgcagcttcaagtcaccaccacctctgccttctacgtctacctcatcctgttcttcaagagtgtggtccacttggccttcgttgtgttctgtctgttcagaagagtacstatgcyttgtgatggccaacattcctagtggatgatgaaacaggaaggtcatgctatcttcatccctcctacatctcaatatctgctgagggtctagcttggcttgcttgctgactttgatgtccacaaggacacatatgtgtggttttgtatcattactataattctcagagcagagaaatcaacttcactctataacaaatagtagcttccaagcacccaatcgtcctgacccatcctctctcagtccctctagtagccctagcaacacaggcccaatgtatataaactccagttcctagtcaccccacttcatgccctagaaccagatagtgcccccaaagcctttacttca

SEQ ID NO: 1164 - DNA, 592 bp, Rattus norvegicus
tttttttttttttttggaaaacgtaracttttaataackgcttttaycaccaggttaagccatgcagttacaaagtagktagaaatttctgaagggtgttagagttaaaaaaaaaaaaaaagctgacycttacacatatattayctascacttcakggggacactactgttcaaaaggccctggccaaataacycccaaatgaaacactcaacccaaggatgttttcagcccactgttagtgaasckgggtgcaraatgcaaagccycwaaaaggagaggatacaaagtcaggtgaktaggggccattggcaatgcycaragccagccagacyccaaacagggagcccaagtggtttttttckgggacacyctacttgaattatkgttwaattagtcaaccatagatcttcaaaagagaacaattagttwacatgataaaaagtgactgcattctttggactgtatcataattatagtaagcaaattctgacagttttaatgaaaatagcctccaccattttgcaggtatgaagataacttaattatccacagggcttttaatgtaagctggacaatacatgaatgataagc

SEQ ID NO: 1165 - DNA, 557 bp, Rattus norvegicus
ggtgggcagttgataccttgttggataaaacctgtgcatgaggagaggtctgctgattgccttggtcatgcccagggaactgtcgggaatgatttcagtggcagggaagatgggggaagtgttggtatgtcattctttcctatcccacatactattgcgaagctgtagatcgtagatggaacctagcacagatttcttccccaggaaaaatcactgatgccttcagctctctggccaagaggagcaattttcgtgccatcagcaaaaagctgaatttggtatgtttaacatacaaggctggatgggaaacatttttgcgtttcggttttggttttggttttagttttatgagacaggagctaatcaagaccgagcatgcactgttggagggcttcaacattagagagagcactagctacattgaagaacacatataccggcaggtgtcgcccatagaaagcctacgcctcatgtgccttttgtccatcactgagaatggtttgattcccaaggattatcggtccctgaaaacacaatatctgcagagctacggcccc

SEQ ID NO: 1166 - DNA, 868 bp, Rattus norvegicus
gagcggggctctctgaggccgaagctggggaggccacgggctggtcatcgtgggaatcgcggggctctcggctgcggctgctaaggrcckrgtctggkcggscgscckgmggtctctggccagtatcgcttccacctgtccacaaacatggggaatatctttgcaaacctcttcaagggcctttttggcaaaaaagaaatgcgcattctcatggtgggcctggatgctgcagggaagacaacaattctatacaaactgaagctgggcgaaattgtgaccaccattcccaccattggtttcaacgtggagactgttgaatacaagaatatcagcttsaccgtgtgggatgtgggtggccaggacaagattcggymgytrtrgmkmcmctryttccwgwrsrsmcaaggmtwgakstwcgwaswrrmcascahysmcakmkmsmtgtgtgaaskagsyycckysmwsagcytryaagggtccgatttgccatcgaaagacgacctctacttttttcttttgtattttgataaacactgaaraagctkkwkytkttwwwtttatcttggggaaatctcaraactggtttatttggtgtcgtggaacctcttactgctttcaatacacaattagtaatcaactgttttgtawacttgttttcagttttcatttcgacaagcactgtaattatagctattagaataaagtctcttarctatttgatgggcttgtgtgtcagtgccaccactgccaggctgcccctcctgagatgcgataggagacagatgtccttcaagccctagtggaagttggtgagatctggatgacttgggtcccctcatgtcttaaggtacttttttttgtgatcacc

SEQ ID NO: 1167 - DNA, 876 bp, Rattus norvegicus
tttttttttttttkwtctggaaaagtgtcatttttattgctcataggtgtgtgtatatagaaggcatgactaaatttgtgtcatttctctccttagctccatattgaaaatcacattgaccttaaactccctgcaaaccctggagatctcttggtgaatcaracacattgcactcasctgaagggagcccttgaggtttaatctaaaggaggaggtgygcacagytggggcatkttagagtcctycagccaaccgttcgtttgggaggagacagatgtctgccattgagtactataaattgtttgcgggtagcagttcattgtgagagatctggagcagggctagaaagaggaatacagtgaatgcattcctgccatttctttggatcrttctaaaaccaggtasacttcggcccaacagtcccgtgggcacgctcccctgcgcgcytctmmgwrttytggcagtgagtccagctccaatccagctgtgggacacagctgtggtctctccgggacaccgtaggtkctctgcagaagagggagtggtcagagacagatgtggctgtgttcctcgcaagtggtggcctcgccagccatagacaggtacagcttcccatcaggacatgcacagatctcatagactccatttgagctgccagggggaccctgtgtcccctgcttcaacttggccaaacccacagtttcagcatcgagcaccagcactccatcactactctgcaagacgatgtccatctgagaaagggcctccatttttccagcacgagcttcaatgtgaacgccccttggggcatccatgctgagactccgagttggggattccaacctaaggtcttgaaatgggtgctcagctctgacc

SEQ ID NO: 1168 - DNA, 792 bp, Rattus norvegicus
ttttttttttttttttwwwtkkwgaycctcaagttggatttatgtccaagatttgkgcaaacagctgcctartaacagcagctaccttaatacaracctctggcaccataracataactgtgggggctgaggtcatcttcagtctggggccctttakcakacctggctggtgtggccttcattccaratcatggtggctctcargaggccgacacaggtgcagtggaragcatgacagcatcaggccatcccgttgttctcytctgctctagagacaaagcyctyttccytaactcctcacagaggggtaakgagcarggggtgcagggyaggtcmtgctactgagcttgaagcaaaaacagcacatgcacacsaactgggtgtggtctctggagagcctggaaccaartctttgasgttctsmdmggmmkgggtcktgttgcwccccactcttaggatggaagccagtggsctcggcaacagatggcaggtcraagccaggtgaggsctcctggtcttggcaagaggcagggtgttgagtttctcctggctgcatccagaagaacstggtggaggcctcacgggtagattcttcytagtcttgtaaacagmtagagcttggctggggmtgtgtccatctgcccctcccagcgtgtgttatgccaaggcttgggtcacactgaacatgcacatggcctttacactcttggcaatctgaggtcagctggctctggctctgcaggcctgtctgggggcgggtccatcacttgagagtcctgattccgcctcgtg

SEQ ID NO: 1169 - DNA, 1280 bp, Rattus norvegicus
tttttttttttttttttaaattcctgactgtaaagtacacagtaaatttattaattgcgttatgtaaacatgaactgtggagaactgtggctttgttttccacagatacaaaaaaggcatcaagctaaagggaaaaaagcttcaaacagggtattttcgatactcaaccacctctactactcaatcaaatgttacaagacacgtttaagctgagaaaaagttttaataacacatacacatacattcagaagacttttaaacaagacagtataaaattttaaaggaaagaaaaaaccattgcatttactgcctaagagctagtagattaactggctgacaagaatgccccggggaaactgaggcacagatgaggtgcacytgcaccatagagtaggcgtmctcatcagatcgaatyttgctgactctcgcacccaactataccttacccctgcctcytgagagacaagccawgtaagtcctccaactmarctgcttgtcaatgagtcargttttaaatttaaaaatcctmctggtttcaagactccacacattattactgacccyacyaactctatctattctgattgvagggagagggggagaaaaaaatwcaaaacaaaaaacaamcaaaaaacccccaaatgcttcaacagcgcctgggtggtaactatcttatctatcattaccagggagatatgtatatatttctttgttcctttytttytttytttctttcyttctttytttytttywttctttctttcwttctttckkymykwbktttttttgtgaagtcaaaagcaagctactacttgcattaaaaaaaaaaaagccaaccttstgaaaggtgacaaaggcammgwwrccmtcmggacwcagacaaaacawtgcacaaacactgacttcagtgctacacaggtgattttgtgcacaaaaarcctytkcatttaacacgarttacagaactgtattttcaggtaacargaaaagcaggtcagaaaaggyagttacacacaaaarmawaaamamaagaactttaattttcagcttgcagtaagggtaaaaagtttgmcatacacatccagaraagtagacaaggattatttttggcacagtaatattgccaaacacaccaccactcagtgcaagctttgtttgccaagtcccacacatggcctgacagtctctgtgcaacaagcatctcctccctcctcaccgtcccattttctgggcaacaacaggcagagggagacaacgcatggggactcagaaggagatgg

SEQ ID NO: 1170 - DNA, 686 bp, Rattus norvegicus
tagttggttcacaaagaaatttywkkkwkwywyywkywtwaaaaaagagagatgtgtttattccatgatcagtacagaccaamtgmatattcaccacatgaaagtcaaaccagtcagtgactccagagtttggccaacaccgaggcaccagcactgtggtgtavactggsttctcrtggcacatgtaacctcaccaggggctccaatttaaaaacaaaacaaaacamaacaamaatgctaatgggaaggaasgaargcccagygcactggtctgaccadgtgcgcatgggacctctgcctcagtttgcagcccaccagggcctggagccctccccaggctctccctttcttggtaaaaamaaacmkmkttgmcrttaaaaaacaaagaagccaacaaacaaggggtagagggaaaagaaattgcagctttctggttttataattaaaaataagactaataaagtttgaaactgaatacaagcaggactttctgtgtgtgtgttgggtggkttgtgggggttwtttgdctgttwttgktttttacaccagtttggtggagtcaccaacaaacttcaaacaaagatatgccaactatgttcactatacagtacagccacagtcatacactacccacagcgggggggggagggagctgccgctcatgaggagacggtcacaccatttgc

SEQ ID NO: 1171 - DNA, 643 bp, Rattus norvegicus
tttttttttttttttttgktggbtataaaatttattgatctctcacttaggaattaagagtaaaaccttgaaaaaacctggaacaaaataaccccttccccaccacccgaacgaaatgcgtacacgaaatagcaaatagatcactgcagaaatcacaaactcaacagcctaaacgcgcactggacagaggctgtcccgcggccaggggcggcgaggcgggaaacacacgcacacctggctataaattaacattggctttcgctgtcgcgccaattggcgcggccagcacccccccccaaaaaaaaagccagaggaaaatagaagcaatacgactgggggtggaggcattgcagttcttggggggggggtcaacttcactcagtcctcgattaatagcaaactaacaagacaacattttcaaatgcgacagaagaacctagggacctgggaagaggaggaagggsccgcgcgcggtttctccgcaaacaccacagcgattcccarccakcgggggarggaggggcggcggtcagaarcgggcagctcaagcaagtcccatttccgctgctccggacttcttgcttttgtacaaactccgacagctacggcaaaactttcggtcctccycatcktsggtacaagc

SEQ ID NO: 1172 - DNA, 1213 bp, Rattus norvegicus
cacgagggctctagtttycctgtcgcgggaatccttttggtcgttttcacaactctgtgaaggggaagctgtgagacaaggctgccagatcccattctggaaacccaacacacagaagtggcaactccggtactttagagaccctttcatttccgtttcggtgtctctctctctccctcctccacctcctctctaaacatgtccactggctccctcagcgatgtagaagaccttcaagaggtggagatgctggactgtgactccctgaaagtggattccaacaaggagtttggaacttccaatgagagcrccgaggagggttccaactgcgagaacgggtctccacagaagggtcgtggtggcctgkgcaagaggaggaaggcgcccaccaagaaaagcccgctgagcggggtcagccaggagggcaagcaggtccagcgcaacgcggccaatgcacgcgagcgggcccgcatgcgggtgctgagcaaggccttctccaggctcaagactacccttccctgggtgcccccggacaccaagctctccaagctkgacactctyaggctggcgtccagctacrtcgcgcacctgaggcagatcctggccaacgacaagtacgagaatggttacattcacccagtcaacctgayttggccctttatggtggccggcaaacctgagagtgacctaaaggaagtggtgaccgckagccgcttgtgtggaaccaccgcatcctgaccttgraggtgtgagtctgggaaccctgcgctctcgagggcagtgggccgktragsgtrwcgacccctsccctcccctchycgtctmtgctgccgccttgcatcgctcctctcchtatcccaccccgcaagaacasttaactgcgacgmggagattcgttyccaaaccgaaggagaccaaytgtacttacagattcccatctatttaacttgattaacttctgccctgaatgactgtgagcctggctggtccaagtgcaatatgtaattatatrtagtatatataaatagataataagagcctatcaatgtgtatcttttgwacaatatgttgtaaaatgtagatcatagaatagctgactttgacagtcacatttataaaataaatcactcaaagaaawawawwwwwwwcaaacaggttttgctatttccgaaaataaatctttctttatwttgctaaaaaaawwaaaaaaaaa

SEQ ID NO: 1173 - DNA, 987 bp, Rattus norvegicus
tttttttttttttttttggttttattttgctagaagtgcttaacccttagtgtatttccacaatcagaaaaatagaactatttgwagcaaataccaaaattctactttgtatgaataggcactgggttttaaatcttagaagtgagcctggaaagatggatcagtggttaagagtgcatactgctcttaaagacacargtttgattcctagccctcaaatctaattctagctccagaacatctaacacagtcttccgatctctgggcacttgtgcacacgtaacatattcacatagktataaatttttaaagcaaacaagcccaaaayawaacaawacaaacaaacaaraaaraaccaaaaaaaccaacccacactcaagagagtcggatgagtagcawaagcctgtaatcccagcactgggaggctgaaccagaagggaagycaacctgggctacagaataagccttgagaaaactatcaattctttcagctttakcatcatgtaagaaacacagtttgattaacgctgtattaactttttaaatgtasgtttggaatgggatgacatctcagaatgtgtagactggatggtgccttttgtcagtgttgtaaaaagtgtaagtccagtgaagctgaagacttttaagaagatacccatggrggacagacacaatatccagacacacacaaattacttggctttgctggtatggtttttgtttgctttatctttcactgttttttaaaatcttgctatttagttaagtcctgaaactaatggagctgaagttagcaaagtttagctaaggtctgaaactagtgtccattactacttagacagttatataggatgataaagggggaattaaaacgtaagggagataattaacgcagtcttggtgatatgggcctagggtgcacactaactagcggtagagaggatgaggcagaaggatccacactggcctaggccacatagtaagcaa

SEQ ID NO: 1174 - DNA, 582 bp, Rattus norvegicus
ttttttktytttwttttaatcattttggwatatttataggtaaatacaaaactgtaccactataagatattgaatatgaacattacaattatttactgaatctgactcagtccattgatgttaaatacaaagtgaaatgattgtaaaaaataagaatatacacattcaaagatcttattacagtataaaattattgagctctgaccagctgccaacctcatcttctggagtaagggaagatttaggggttctataaggttttgtgggaacacagtgttgggaactcttgattcgattcctggcgaatcagactggggaaaggcaggaacaagttgtatgggcaggggaccagggattacaaggaacagcctcatccagcctaaggagtatgctttataatgacacagaccatccagtttgaggtctaggatctggcaggctagcaggcarggagagctgggcatctcagtagacaaggaagagttgcataaagaaaggtatcttycaacacaagaaagagargcccgggtttgtcctcccaagaagggaatttcatggcaggttcctcttgttcactctggc

SEQ ID NO: 1175 - DNA, 1152 bp, Rattus norvegicus
ttttttttttttttttttkwtagtgaaaatatatttatttttttaatacaatagctgccagcaatatactggtgttgatgttccagagagaagaaaatgcaagcattttgtaaagagctttcattcctacccaaggaatcccatgaaatgctccaaggctgtccagcattacsgcytgggagtccaacttttatggcttgggactcaactttttttccttgataaaataatttgtttcmcccactttgatcattacaacaatgaactttcagaagtctgtgagttttgctaacaaatgctctcttgctctctctctctctatctgaaccaaatgttgattattgccagctcaagaaactggkgaatccgttacaacacagtgaggtgtggaccaaaatcttcatgaaaaaataatttctacktctcatttttttcttatttcctaaatgggttttttaaatatgcagaaataaatgsyatctacatgsaacacagaggttctggaagtayaactgcctagattctagagccggtccgcctgtgcacaaaccagtcagaacctctcaacagtataaactgctcmygagtctagagctatgaaagctmatgttaccaagaaaattgtattgtattcaaagtctgtmctatatcaaaaaggaagttatatacttaaawctgygaggcgtcccgctgcttaatagtttcttagtatccactagaaaatagggagcctccrttcagaatccctgctccaagmcwgwgggcttaaaaaggaggttasacaagagcagagggggagccactcgcatggacgtccgtcagcccgtgcacggcatcagccacatggaaacactcacwtctcccatgtcaagattgtaagccatgaccacctcgcagagtgcagggtgcttgccgcggggtctttcttttatagcttctgtccatctgccmaacgcaaatctgtttgactttcttgatataaaactgtccctctctataaagaaaaacaattctgcctttgcaaaacctagacagacttcccttggatatccagagatagtaagaacaaccgagagtcaatttaggaagccacagagaataaacactcaagcgtgggcatctcacacccactaaagcacgtcctcttctccg

SEQ ID NO: 1176 - DNA, 937 bp, Rattus norvegicus
caaggcaaattgatattcacatccaaagctggttgggacggcagcaccaagacctactgcttgggcaggttaggcccttggtgctccagtcatcctgctgcgccaacacagactcggcttcctgctccaagctgccccagtcctcatcatcccatctgtcggcagtggcgctgtcttctgcagcgtccttgtcttcttcctgtgtttcccggtggcctgaggtcgcaggggtggcagaggcaggggctggagctggagcagggtctccctctggcactggtctctggggcacagcggcctcagacggcacaggtgtggggtgtgttcggatcagcttggaggtgagagatgacaccccggtcacagcccagcctgcccagctggctgcagctcctcctgttccagggctggatgctgcatggacgtccttctctatttctgccaactgggtaggatcctccgacacagactctaatttggacaggaagcttcgaatggtcttaaaggcctggtcccgcacagatttttcagggtctacagtaaggccgcagagcacaggcaggatcttatgggcacagtcatccattgagtagagattgtgtgtagcagcgaagcccaggacacccgcaacccgggatggtgcaaatgggtccttagtggcccggctgaaggcagaggtgaggaccctgtgtctagtactagcactgaggtaggagccgattttgcccaagcagaccgtggtgttgcagcggatgggaccctggtcgtccttggcttgcagccttgcgaagtgcttcagcagctccacattgaggttggtctcactcagctttggggccaagagcagcatggacttgacagtctgctcccggatggcagggttggtgtccagaaagccatgagtgacgtgggggaagatctgggtgttgactgtcgc

SEQ ID NO: 1177 - DNA, 812 bp, Rattus norvegicus
atttgccaaacatttattgatttttaacagtcaaattatttgaacaagaatgtcttccaggtagtataaggcctcaaaggattgtgagctgataagtataatcaagagacctctagaattttggcatctgtttatacatttccccctttccttcttccatcactctgtgagttcttattggacccaaacaagacaaatgtttacagaatcttgagtaggtttcctgcaaaccaaaatatwcaaaagtwgaaaaattctcaaacccaacaaaacttggggaaatggaacagaatgctacaattacagttttaaatttgagttgtttgagaaaaattaaatgacttacttttaaaagtgcacatcatatctgcactaaagaacaatgacatcttgcaaaaaaggactacctgaggaagaatgaaagacaggaattgaaagaaatgaaatgggtatagtttaagattctgtaagaaaagacacattctaagatcagagagttttcccacaaccagaaacacgtgagttatcgctggataccccagtgtttctcattttcttttgcttgaaggtttggctggtgccaggattttcgcagcatcttttaagggcggtattgagacctctgctcttggatgtactcgtagagaggactggaacgcactgggacgttggcaaactggcgtgtgccaggctctaggattgggcggcgcctctgctcctcttgcctacgacggatctgctcttcttggaattttctcccccgctcttggcgacgtctttgttcctcttcttgacgtagttcttgttcctgc

SEQ ID NO: 1178 - DNA, 511 bp, Rattus norvegicus
tttttttttttwttkkktgkggctatcctgggctcgggaggctctgagctgggggctgcacagtgccctcccaaatccttgagctttattgatacagcggctcccaggaaggggcagggcctcattagtgatgcaccttgggtgccctcgccmtcctggtcttgcaggaaagctgagactgcgggaactctgcggaggctagaggatcctcttagagcgctaccgtggccagctgtcgggagtcaagcggcgcagggacgcgggccgcagtggctctgccaggggtctggcaaggagcaragggtaggggaaggacctggggaagtctccagaggtcccagtgactggagacagacgttcggatttgatgctgaccggaggtgtcggaggggargcctctcggctcgggggaccctcctcgcacagactgcgggcagctggcccggcggggtccaccgcgtccctcgttggtggccagggcgagggctgcagggggacatgagctgcgtcc

SEQ ID NO: 1179 - DNA, 810 bp, Rattus norvegicus
cacctggagtcttgtcagatccgactgttgtgtttacgtatggaamgmywcyksammgkgkgctaatgggmtaatgtcgcgcgtaggtgcttatgttcttttagtctggtcctttggtatttgtctgaccctagacagaactgtgctctctgcttccctcttaggagcgggatgaaaaaattgaagagctagaaactctcttgcaggaagccaaacagcagccagtggcacaacagtcaggggggtgtgaactgtccctccggcggtcacaaaggttggsagcctctgcctcctctcagcagctccaggaagttaaagctgaacaggcgtgtcagaggtgggtgtctccccttggttcctcagctgtaggatctggcggagcaaggccttaccttcttcccgggtatcattgaatgcacaacatttttgggcacaagttgaagcttcatcccacagcttgcatttaaaatagtactgggccaggtagcggaaggctgtgctctcctctaagtgctccactgtttccccacaggaatagatatcttggatgtatttgatgtaacactgggcagcctgctctgactcagtcaactgttcatgaagcttggccagcttcaccagagccattttctccacatctyccacagcgtatgctctccaataacactttttggcttccactagttgattgagtttctcataacattctcctaaggcaaccagcatacgagaatcgttgggccgaagctggtgggcccgtctataataataaaggcaataaaatggcatcttaaggatttcgtcctcgtg

SEQ ID NO: 1180 - DNA, 739 bp, Rattus norvegicus
tttttttttttttttttakactttagcattagtatttaagttatataaaatacatctttataaaagtacagaatctcttgattttaaaagtttaaattatactcactgacatagccaggctctctgctagtactaaaggtttattgcttagccctatagagccatgagaaagctatagctagcaaaaaataaagttctgtttctgaatggaaactgcyttaaaaactcagctgtcatcaagtctggctggytgaaggttttcagtagaggactcttccataggactgtgtcagctgctgtgctacccttggcttgctttgtctggatccaaagtggagtcttgctgcaaagttcctgcttgtgccagraagctgttattttgttgtccccaatcatagtagtmtggagcaaaacttccctgaagtccytgaggggcaatgttccaggcaagatcatcatcactgtcatatcttcgggggttgtcaaagaagtaagatctgggactaaatccatggctggggaccatcccaggattggtaagatccttcgtgggatttctgactcggaagaaataaaccaccaaagtggtgggtaagagctcccacacaaaaagcaccacgccaaacactatgtagccggcatcacccagctggctmttcagatctgcctggtctsatacattgtaccagtcataatcaaaggaatggacgttcttgatctgagaaaatgacaagatgac

SEQ ID NO: 1181 - DNA, 803 bp, Rattus norvegicus
aagcaggagccaggccttgagtggcccctgctttagagccatttacgatatagcccgtcacagctggattttaaaaatacacaaaaatatatataatacatgatataaaacctaggtggggtttaggggtggcatgagcagtatgcaatggtgaagaccttcagggagctcgggctggatgaggaggggcacagtacttcatttgaaactcataaatacccaggcgaccttgggcatgctagtctttcacaagcttgtagacgtgatgctgtgccccatgctcactggtggacacttcaaagacaaaagcaatgaccagcagggtctcctgcgagtcccgactcgtgaccacctgcaggatggtgaagttctccagcacgctgttcatcatgtacttctsgggcaggtgcttcarcttgtggatkaagttgatcatgtactcgcacatgggtgarcggtggatgcggtacacaaagcggccgttctccaggcgggcatactctgkctctactttctctaccacctgcttgccgaaggaacacaccttkgtggagacactgatggtcatgctgtccgccgagctgtactgtgagctgaccccgtagaaggccccagggccttcctggattgtgctgttgaggtcagcccagaacttgacaaggaagaaggcattggggggccctttctcgtagagctccttcagccccccttttcttcttcggggaacttttcgtagatctggcgaacatccactgcctccaggggtgggtctgagaaggcagggtttgtctggccgatgtgta

SEQ ID NO: 1182 - DNA, 666 bp, Rattus norvegicus
aactcagagatgaggggtactgacttgctagcccagagcagccagggttaaggaaagaagggcagacagggtttcccagtttgtgcaggggtgccaatcccatcactgtctgtcccttgtggcacaccatggaataatggctgaacatatttgcatcattggatgttagtggctaaatatcatgctagggccagaatgtattcagaccagctctccttcctctgggtgattcagagctggattcagcctcatctttccttcttctcccacacaagggcatgcttcagagtatttgagtggcttgttgagtttatttggggaaagcaaaaagagtcaaaaggaagctttgcttgtacatgcatatgagtgtgtgtgtgtgtgtgtgtgcgcgcacacacatcctamacamggttatttcactgactgacaccatcttmwtgggatctccagatttcagagtaagatggggtyctcgggacctaaggaagtccaggctagtcacctgggagtcacgtggcaccccaagtccccatgtggccctctcctgcccatgctggctctgggtcgtcagatttatccatgttttcataagagyctgcatcttcctcatgactgggaccagaccgaattgattggagctgaggagctgcatacaggcctcgtgcc

SEQ ID NO: 1183 - DNA, 636 bp, Rattus norvegicus
ttttttyttttwyttkttyatkgskcaccaatcatttattgagtttttkaatataattycatgttctacatatggbctttgttggaaaggttytyaraattgawwggmttgtctaccakgaatcttcmaacmagatkaaatmtatmytttytttatrwgbgawrgktkggwargggtctgrymaatttttctgacccatcartggaggaataggagcctakgcctcasagatactgatattagagatactctgcatgatctctagctcccctggagacttctcactgtttcatcaagtctagaccatgaagcttgkgtagctcctgatattttatccataagagccaaagtttaccaaagtccaaatccctttcttcaaatgtagtaraagttttcartacactttttttgwttctgaacttcaggaasagtgctctgccattcaatgattcaacaaggtatcacctaaactgaaaataaactwgcawtgatttaaatccacaaagtgatcaaaacgaagattgattagttcacctaatttactccacacaatcaattaactatgcaattgctattcaaagagttgaaatttcaaaatatgagtacaagtcttcaaaagcattcttatagagagac

SEQ ID NO: 1184 - DNA, 1276 bp, Rattus norvegicus
tttttttttttttttttaggbcacttaaattttgccaaaattctggaatcakycctttcatcatttccccttasgctctgaaattcaragaggcctcacatcaacaacaattaaaatatattcaataattaataatcctagcttaaacagttcakctttaggaggggagtgctagacacgtgtgaaagcargacactaacatytgacagggtcwtcccacaggccagcccaacagtgaargacatakcagcagcctgatgcatgacagtaggtcagccatgtgaccggagaggcttccattgtctccactgctcaagttctgcagctgacaagttcacagtgtcttccatttcatccccaccgttaagtctgtgatattgtcygactccataatgggacaggaaagaacacacaaagacacacagaggagactggaaggacagactgcgggtggtgcgaaaacacacacattcacagtacatacataacaagaaaggtatctcacaccacacgggcagaggtcactgcagacgtcactctgagcaaagctggtccgcagaaagtgaaagcgtcacaamcagttcatacagagagagccgactaacamcaaaactttcttttaaacagactgtttctagccagagcatattgaaatgtttcactgtgatattggacgttgcaaggatacaaaactaaagtacaagaatwtwwywkttwkwtttgtgtttttaagcatttttatatgttgtaaaaagacactgtaatgagcattaaammaawmawrraagaccaataatatggctaacttttgattatgcaaaaacagccaaccacttagacactcagccaaacgctgaacaaacgtagtaggaacactgagtccaatctcgcgtttaggaaattccatttactcaattcctcacatttttaaataaatcatggctcttagcaaaacgggtctccaaggtgctggggaggcagaccgtgaaagcggctggtgttagcgtgaactgtgacaggcgtgagagctcagcagctctgcggcgtcctgcaagagacactwcagctcytacgacagcaacactcaaaatggayctcacaaatatctactttcctcgtgaactgttggagaaaacaaagccctttgtccaaagttggtactgttcttttttctttcggggccctcaaatgttagctaccctgaaggcaatttggctccttccaagttggccacttggagatggcattactttctcctttgtatttttgcctcgtg

SEQ ID NO: 1185 - DNA, 768 bp, Rattus norvegicus
gactacgtgagtggtcccttcaccgtggtggtaaaggaatcgtgtgatggaatgggggatgtgagtgagaagcacgggagtgggcccgcagttccagaaaaggcagttcggttctctttcaccgtcatgagagttacagtcgagcatggctctcagaacgtgaagatatttgaggaacccaagcccaattctgaactgtgttgcaagccactgtgccttatgctggcagatgagtctgaccacgagacacttactgctattctcagccccctcatcgctgagagggaggccatgaagagcagtgaattgctgctggagatgggaggcatccccaggacttttaaatttatcttcaggggcactggatatgacgagaaacttgtcagggaagtagaaggcttggaagcttctggctcagtctacatttgtacactttgtgatgccacccgtctggaagcctcccaaaatcttgtcttccactccataaccagaagccacgccgagaatctgcagcgctatgaggtctggcggtccaatccctatcacgagtcagtggaagaactccgggaccgggtgaaaggagtctctgccaaacctttcatcgagacagtcccttccatagatgcgcttcactgtgacattggaaatgcagctgaattctataagattttccagctggagataggggaagtgtataaaaatcccaatgcctctaaagaggaaaggaagagatggcaggccaccttggacaaacatctgcggaaaagg

SEQ ID NO: 1186 - DNA, 1546 bp, Rattus norvegicus
tttgctaagctatcccgcaaagaattttctttcctccctaaaccctctcctttgctcaccttttctatccacttcactacaaacaaacctttaagcgactccctctcctgggcctccgacggcaggactccgcggacctcccaggccgacagccctccctctacccgcgaggttccgggcccggcgagagggcgcgagcacagcccgggacatggaggtgactacggaccagccgcgctgggtgagccaccatcacccggcggtcctcaacgggcagcacccagacacgcaccacccgggcctcggccattcgtacatggacccggcacagtaccccctgacggaagaggtggacgtactttttaacatcgatggtcaaggcaaccacgtcccgtcctactacggaaactcggtcagggctacggtgcagaggtatcctccgacccaccacgggagccaggtatgccgcccgcctctgctgcacggatctctgccctggctggatggcggcaaagccctgagcagccaccacaccgcctcgccctggaacctcagccccttctccaagacgtccatccaccacggctccccggggcctctgtccgtctaccctccggcttcatcctcttctctggctgcgggccactccagtccgcatctcttcaccttcccgcccacccctccgaaggacgtctccccagacccgtcgctgtccaccccgggatccgccgggtcggccaggcaagatgagaaagagtgcctcaagtatcaggtgcagctgcccgatagcatgaagctggagacgtctcattcccgaggcagcatgaccaccctgggaggggcctcgtcttcagcccaccaccccattaccacctatccgccctatgtgcccgagtacagctccggactcttccctcccagcagcctactgggaggatcccctaccgggttcggatgtaagtcgaggcccaaggcacgatccagcacagaaggcagggagtgtgtgaactgcggggcaacctctaccccactgtggcggcgagatggtactgggcactacctttgcaacgcctgcggactctaccataaaatgaatgggcagaaccggccccttatcaagcccaagcgaaggctgtcagcagcgaggagagcagggacttcctgtgcgaactgtcagaccaccaccaccaccctctggaggaggaacgctaacggagaccccgtctgcaatgcctgtgggctgtactacaaactccacaatattaacagacccctgactatgaagaaggagggcatccagacccgaaaccgtaagatgtctagcaaatcgaaaaagtgcaaaaaggtgcatgatgcgctggaggacttccccaagagcagctccttcaacccggctgctctctccagacacatgtcgtccctgagccacatctccccgttcagccactccagccacatgctgaccacaccgacgcccatgcacccgccctccggcctctccttcggacctcaccatccatccagcatggtcaccgccatgggttag

SEQ ID NO: 1187 - DNA, 1815 bp, Rattus norvegicus
atgatgcgcgctgtgtgggaggcgctggcggcgctggcggcggtggcgtgcctggtgggcgcggtgcgcggcgggcccgggcttagcaygwksgccggccaggcggcgcagcctgatccttgctcggatgagaacgggcacccacgccgctgcatcccggactttgtcaacgcggctttcggcaaggacgtgcgcgtgtccagcacctgcggccggcccccggcgcgctactgcgtggtgagcgagcgtggcgaggagcggctgcgctcctgtcacctctgcaactcttccgatcccaagaaagcgcatccgcccgccttcctcaccgacctcaacaatccgcacaacctgacgtgctggcagtctgagaactacctgcagttcccgcacaacgttacgctcactctgtcgctcggcaagaagtttgaggtgacctatgtgagcctgcaattctgctcgccccggccagagyccatggccatctacaagtccatggaywacgggcgcacgtgggtgccctwccaattctattccactcagtgccgcaaaatgtacaamcggscgcaccgcgcgcccatcactaagcagaacgagcaggaggcgktgtgcaccgactcgcacaccgacatgcgcccgctctccggcgggctgatckctttcagcacgctggacgggcggccytsggcgcacgacttcgacaactcgccggtgctgcaggactgggtcaccgccacagacatccgcgtggctttcagccgcmtgcacacgtttggcgacgagaacgawgatgactcggagctggctcgcgactcctattactatgcagtatctgacctgcaggttgkcggccgctgcaagtgcaatggccacgcggcgcgttgcgtgcgcgaccgagacgacagtctggtgtgtgactgtaggcacaacacggccggccctgaatgcgaccgttgcaagcccttycactacgatcggccctggcagcgcgccacggctcgcgaggccaacgagtgcgtggcctgcaactgcaaccttcatgctcggcgctgcagattcaacatggagctttacaagctatcagggcgcaagagcgggggtgtctgtctcamctgccgccacaacactgccggscgscaytgycactactgcaaggagggcttmtaccgagacatgggcaagcytatcacccaccggaaggcttgcaaagsctgtgattgccaccctgwgggtgctgctggtaaracytgcaatcaaaccaccggccagtgtccytgcaaggasggcgtgacaggcatcacytgcaaccgctgtgccaaaggctaccagcagagccgctcysccrtcgccccttgcattaagattcctgtagcgccacccaccactgcagccagcagcatggaagaacctgaagactgtgactcctactgcaaggcttccaaaggaaaactgaagatgaacatgaagaaatactgcaggaaggactatgctgtccagatccacattctgaaggcggacaaagcaggggactggtggaagttcacagtgaacatcatctccgtgtacaagcagggcacaagtcgtatacgccgtggtgaccagagtttgtggatccgttcgcgagacatcgcttkcaagtgtcccaaaatcaagcccctcaaraagtacctgctgctgggcaatgctgaggactcgcctgaccagagtggcatcgtggcagacaagagcascctggtgatccagtggcgggacacatgggcacgacgcstgcgcaagttccagcagcgggagaagaagggcaagtgcaagaaggcctag

SEQ ID NO: 1188 - DNA, 999 bp, Rattus norvegicus
atgcccacctggccctgggggctgctgctgaccgcgggcacgctctccgctgcactgagcccagggctgccggcctctgccgacccctgctatgatgaggcgagggagcctcgctgttgtactcctggcctagtgaacgctgctctgggcctagaggtgctggcgtccagcacgtgcgggaggccgtccaatcacgtctgcgatccctcggacccgcagcgggcacattctgcagacctcctgacctcagctccgggcactgcaagtcctctctgttggcgctccgatgtgctgcaacgggcacctttcaacgtaaccctcacggtgcccctggggaaggcttttgagctagtcttcgtgagcctgcgcttttgctcagctcccccaacctccgtggccctgcttaagtctcaggaccatggccgcagctgggtccccctgggtttcttctcttccagctgtagcctggactatggccgtctgcctgctcctgctgatggccctgctggtccagggccagaagccctctgtttcccagccccccaggctcagcctgatggtggaggccttctggccttcagtgcgcaggatggcagcccacagggcctggacctggacaacagccccgtgctccaagactgggtgactgccacagatattcgcatagtactcacaaggcctgccattcagggagacaccagggacggtggggtcacagtcccctactcctactcagccactgagcttcaggtgggaggtcgatgcaagtgcaatgggcattcctcacggtgtctgatggacacccatggccacctggtctgcgactgccagcatggtacagagggccctgattgcagccgctgcaagcccttctactgcgacaggccatggcagcgggctacagggcaggaagcccacgcttgccttgcttgctcctgcaatggccacgcccgaagatgccgcttcaacatggagctgtaccgactgtctggccgccgc

SEQ ID NO: 1189 - DNA, 6973 bp, Rattus norvegicus
cttcaggatggctcgcttcggggaggcggtggtcgttggcagaccaggctcaggcgatggagactcggaccagagcaggaaccgacaaggaacccccgtaccggcctcggggccggcggccgcctacaagcagtcaaaagcgcagagggcgmskatggctttgtacaaccccataccagtccggcagaactgtttcacggtcaacagatccctgttcatcttcggagaagataacattgtcaggaaatatgccaagaaactcatcgattggccgccatttgagtacatgatcctggccaccatcattgccaactgcatcgtcttggccctggagcagcatcttcctgaggatgacaagaccccaatgtcccgaagactggagaagacagaaccatattttattggaatcttctgctttgaagctgggatcaaaatcgtggctctaggattcatcttccataagggttcgtacctccgtaacggctggaatgtcatggacttcattgtggtcctcagtggcatcctggccactgcaggaacccatttcaacacccacgtggacctgcggaccctccgggctgtgcgtgtcctgaggcccttaaagctcgtgtcaggaatacctagcctgcagatcgtgctgaagtccatcatgaaggccatggtgcctcttctgcagattggccttctgctcttctttgccattctcatgtttgccatcattggcttggagttctacagtggcaagttgcatcgagcatgcttcatgaacaattcaggtattctagagggatttgatcctcctcacccgtgtggtgtacagggctgcccggctggttatgaatgtaaggactggatcggccccaatgacgggatcacccagtttgacaacatcctttttgctgtgctgactgtcttccaatgcatcactatggaagggtggaccactgtgctgtacaataccaatgatgccttaggagccacctggaactggctgtacttcatccccctcatcatcatcggatccttctttgttctcaaccttgtcctgggcgtgctttccggggaatttgccaaagaaagagagagagtggagaaccgaagagcattcatgaagctccggcgtcagcaacagattgagcgcgagttgaatggctaccgcgcctggatagacaaagcagaggaagtcatgcttgctgaagaaaataaaaactcgggaacatcagccttggaagtgcttcgaagggcaaccatcaaaaggagccggacggaggccatgacccgagactccagcgatgagcactgcgttgatatctcttcagtgggcacacctcttgccagagccagtatcaagagcacaaaagtagacggagcctcctatttccggcacaaggaacggcttctgcgtatctctatccgacacatggtcaagtcgcaagtgttctactggatcgtcctgagtgttgtggctctcaatactgcctgtgtggccatcgttcatcacaaccagccacagtggctcactcacctcctctactatgcagaatttttgtttctgggactcttcctgttggagatgtccctgaagatgtatggcatggggccacgcctttattttcactcatccttcaactgctttgattttggggtcacagtgggcagcatctttgaggtcgtttgggcaatcttccgacctggcacatcttttggaatcagtgtcttacgagctctccggctcctaaggatatttaaaataaccaagtattgggcatccctccggaatctggttgtttccttgatgagctccatgaagtctatcatcagcttactcttcctcctcttcctcttcattgttgtctttgctctcctgggaatgcagctctttggaggcaggtttaactttaatgatgggactccttcggctaattttgataccttccctgcagctatcatgacagtgttccagatcctgacgggggaagactggaatgaagtgctgtataacggcatccgctcccagggtggggtgagctcaggcatgtggtctgccatctacttcattgtgctcaccttgtttggaaactacacactgctgaatgtattcttggctatcgctgtggacaatctcgccaatgcccaggaactgaccaaggatgagcaggaggaagaagaagccttcaaccagaaacatgcactgcagaaggccaaggaggtcagcccgatgtctgctcccaacatgccttccattgagagggagaggagacgccgacaccacatgtctgtgtgggaacagcgcaccagccagctgaggaggcacatgcaaatgtctagccaagaagccctcaacaaagaggaggccccaccaatgaaccccctcaatccactcaacccactgagtcctctcaacccactcaatgctcatcctagcctctatcggaggcccaggcccattgagggcctacccctgggcttgggtcttgaaaaatgtgaagaggagcgtatcagccgtggaggttctctcaagggggacataggtggcctgactagcgtcctggacaaccagaggagccctttgtccctgggcaaacgggagccaccgtggctgcccagatcctgtcatggaaactgtgacccaacccagcaggagactgggggaggagagactgtggtgacttttgaggaccgggccaggcacaggcagagtcagaggcgaagccggcatcgccgagtcaggactgagggcaaggagtctgcctctgcctccagaagcaggtctgccagccaggagcggagtctggatgaaggggtgtccatcgatggggagaaggaacacgagcctcagagcagccacaggagcaaggagccaaccatccatgaagaagagagaactcaggacttaaggaggaccaacagtctgatggtccccaggggctcaggactggtaggagctcttgatgaggcagaaacacctctagtccagccccaacctgagctggaagtggggaaggatgcagctctgacagagcaggaggctgaaggcagcagcgagcaagccctgcttgcggatgtacagctggatgtgggccggggcattagccagagtgaacctgacctctcctgcatgacaaccaacatggacaaggctaccactgagagcaccagtgtcacagtcgccatccctgacgtggaccccttggtggactcaacagtggtgaacattagcaacaagacggatggagaagccagtcccttgaaggaagcagagaccaaagaggaagaggaagaggtggaaaagaagaagcagaagaaggagaagcgggagactggaaaagccatggtgccccatagctctatgttcatcttcagcaccactaacccgatccgcaaggcttgccactacattgtgaatctacgctactttgagatgtgcattctcttggtgattgcggccagcagcattgccctggcagctgaggaccctgtactaactaactcagagcgtaacaaagtcctgagatatttcgactatgttttcacaggagtgtttacctttgagatggtgataaagatgatagaccaaggcttgatcctgcaggatggatcgtacttccgagacctctggaatatcctggactttgtggtagtggttggtgcattggtagcatttgctctggcgaacgctttgggaaccaacaaggggcgggatatcaagacgatcaagtctctgagggtacttcgagttctgcgaccactgaaaaccatcaagcgcttgcccaaactgaaggctgtgtttgactgcgtggtgacctccttgaagaatgtcttcaacatactcattgtctacaagctctttatgttcatctttgccgtcattgctgttcagttattcaagggaaagttcttttattgcaccgacagttccaaggacacagagaaggaatgcataggcaactatgtagaccacgagaaaaacaagatggaggtgaagggccgggagtggaagcgtcatgaattccactatgacaacatcatctgggccctgctgaccctcttcaccgtctccacgggggaaggatggcctcaggttctgcagcactcggtagatgtgacagaggaggacagaggcccaagccgcagcaaccgcatggagatgtccatcttctatgtggtctactttgtggtcttccctttcttctttgtcaatatcttcgtggccctcattatcatcaccttccaggagcaaggggacaagatgatggaggagtgtagcctagaaaagaatgagcgggcatgcatcgacttcgccattagtgccaaacctctcacccgctacatgccacagaacaggcacaccttccagtaccgcgtgtggcacttcgtagtctcgccatcctttgagtataccatcatggccatgattgccttgaacaccgttgtgctgatgatgaagtactattctgctccttggacctatgagctcgccctaaagtacctgaacatcgccttcactatggtgttttccctagaatgtgtcctaaaggtcatcgctttcggcttcttgaactatttccgagatacctggaacatctttgacttcattaccgtgatcggcagtatcacagaaattatcctgacagacagcaagctggtgaacaccagtggcttcaatatgagctttctggagctcttccgagctgcacggctcataaagcttctgcgacagggctacaccatccgcatcttactgtggaccttcgtgcagtcctttaaggctctcccctatgtctgccttctgattgccatgcttttcttcatctacgctatcattgggatgcaggtgtttggaaacataaagttagatgaggagagtcatatcaaccggcacaacaactttcggagtttcttcgggtctctcatgctgcttttcaggagcgccacaggggaggcttggcaggagattatgttgtcatgtctgggcgagaagggctgtgagcctgacaccactgcaccctcagggcagaacgagagtgagcgctgtggcactgacctggcctacgtttattttgtctccttcatcttcttctgctccttcctgatgctcaacctgtttgtggctgttatcatggacaactttgagtacctgactcgagattcgtccatcctggggcctcaccacttggatgaatttgtccgtgtctgggcagagtatgacagagcagcatgtggccgcatccattayactgagatgtaygaratgctgactctcatgtcaccaccgctaggcctcggcaagagatgtccctccaaagtggcctataagaggttggtcctgatgaatatgccagtggctgaggacatgacagtccatttcacctccacacttatggctctgatccggacagctctggacattaaaatcgccaaaggtggtgcagacagacagcagctagactcagagctacaaaaagagaccctggccatttggcctcacctgtcccaaaagatgttggatctgctagtgcccatgcccaaagcctctgacctgactgtgggcaagatctatgcagcaatgatgatyatggactactataaacagagtaaggtaaagaaacagagacagcagctggaagaacagaaaaatgcacccatgttccagcgcatggagccctcctcactgcctcaggagatcatttctaatgccaaagccctgccttatctccagcaggaccctgtttctggcctgagtggtcggagtggatacccttcaatgagtccactctcccctcaagaaatattccagttggcttgtatggacccagcggatgatggacaattccaggaacagcaatcgctggagccagaggttagtgaattaaaaagygtgcagtcctctaaccatggcatctaccttcctccggacacccaggagcatgcgggatctgggagggcatcctctatgccacgtctgactatggatccccaggtggtaacagaccctagctctatgcgacgttcattttctacaattcgggataagcgttcaaattcctcctggttggaggagttctccatggaacgtagcagtgaaaacacctacaagtcacgacgcagaagttaccattcctccctgaggctgtcagcccaccgcctgaattctgactctggtcacaagtctgacactcaccgctcaggaggcagggagagaggccgatccaaagaacgaaagcatctcctctctccggatgtctcccgctgcaattctgaggagcgaggaacccaggctgactgggagtccccagaacgtcgccagtccaggtcacccagtgagggaaggtcacaaacccccaacagacagggtacaggttcactgagtgagagctccattccctctatctccgacaccagcaccccaagacgaagtcgtcgccagctcccacctgtgccaccaaagcctcggcccctcctctcctacagctccctgatgagacacactggcggcatctctccacctcctgatggaagtgagggtggatccccactggcctctcaagctctggaaagcaacagcgcttgcctaaccgagtcttccaactccttgcacccccagcagggccagcacccttccccacagcactacatctctgagccctatctggccctccatgaagactcccacgcctcagactgtggcgaggaggagacactcacctttgaggcagctgtagctactagcttgggccggtccaataccattggctctgccccacccctacggcacagctggcagatgcctaatgggcactatcggcggcggaggctggggggcctgggcctggccatgatgtgtggagctgtcagtgacctcctgagtgacacggaagaagacgataagtgctagaggctgccatcccctccgatgcatgctcttctctcacagggagaaaaccaagaccaaattgggaagccagtgcggccc

SEQ ID NO: 1190 - DNA, 2182 bp, Rattus norvegicus
ggcacgagctcgagtgtgatcctcgaactgctggcgctgcgggacgtgctggcatcgccagctttgccagcatcgtgtctctgcggtcccctctccctccaggccccctccttctgcgcggccgcgcatccactccctcctctccagctctcccaggctcactcgcaccggagactggagacttgcacgcccagtcgtttaagtgggaacagctccagccccgccagctgcagcccaggcgagaacttcacaagcagcgcaggttgggtcgctgaggcaggagttgcaccaccagcgagaaggtcctgagcagcatggcccggagaagagccttccctgctttcgtgctccggctctggagcatcctaccttgcctgctcctgctacgagcggatgcagggcagccgccagaggagagcttgtacctgtggatcgacgcccatcaggccagagtactcataggatttgaagaagatattctgattgtctcggaggggaaaatggccccctttacacatgatttcaggaaagcccaacaaagaatgccagccattcccgtcaatatccactccatgaattttacctggcaagcttcagggcaggcagagtacttctatgagttcctgtcgctgcgctcgctggataaaggcatcatggcagacccaactgtcaatgtccctcggctgggaacagtgcctcacaaggcatcagttgttcaagttggtttcccgtgtctcggcaaacaggatggggtggcagcatttgaagtgaatgtgattgtcatgaattctgaaggcaaccccatccttcggacccctcaaaatgctatcttctttaaaacatgtcaacaagctgagtgcccaggagggtgtcgaaatggaggcttttgtaacgaaaggcgggtctgcgagtgtcccgatgggttctakskwsytsactgtkwkaaagmmswywgcatacctcgatgtatgaacggtggtctgtgtgtcactcctggcttctgcatctgcccgcctggattctacggtgtcaactgtgacaaagcaaactgctcggccacctgctttaatggagggacctgtttttacccaggaaaatgtatttgccctccaggacttgagggagagcagtgtgaactcagcaagtgcccccaaccctgccgaaacggaggtaaatgcattggtaaaagcaagtctgtctgcgagcctggctgcggtgcccatggaacctgccacgaacccaacaaatgccagtgtcgagagggctggcatgggagacactgcaataaaaggtacggagccagcctcatgcatgccccgaggccagcaggcgccgggctggagcggcacacgccttcacttaaaaaggctgaggggcggagggatccacctgaatccaattacatctggtgaactccaccatctgaaacggttcgagttacgccgagttcacagcctttgttaacctttcgtgtgttggatgttcaaatgatgttcattacactttagagtactggcctgaattttattagcttcattatgaatcactgggctgatatttactctcccttttaggtttcctaagcatgtctagcatgatggtatagattttcttccttcagtcctttgggacagatctttcatgtcagttgatcaggttaaaaaataaaaaatctgtctcttcagtatgtagttgacagatacttgcaaaatcacgacacatttgtggtattgggatggggagccctagagaggcgaaactgggcaaagatacataaatcacaaggttttggataaagcagataacagtgtttaagctacagtatttcacattctgttgtcaaatatttggacacttgtctaattaatatttcaattgccccccccccatcttgaatacgtacaatctatttcgcccttactgttactctagacagttcagttttgaggggggaacagagttaaagggaaaacatcacacttgtgttagtggcatttaaacaatataatatattgtaaacacgacaaagtaaggaatataatgtatggagtctttgccttggatggaagcaatataatatattgtaaacaaaacacagctcttacatagtaaacattttatactgtttgtatgtatcaaataaaggtgctgctttctctctctgaaaaaaaaaaaaaaaaaa

SEQ ID NO: 1191 - DNA, 3428 bp, Rattus norvegicus
agagaggtcccaatctcgagactcgtgctgtccagccgatcctaccagccccttgcacagccagccctgataggaggacagagggtttggggagtcagtaggacttgggctgaccgtggtccgtagcaggggaggtgggtctccgcccgagagtgaaaaatctgtggtaccagcagagagatacccagaaggagtcggcagctggcgccagggcggccggaggatgcagaggggccggagccgggcgggccggaggccgagacgcgcgctgtcccccacctctatcccgtgaatccgccagccttgggacgcgctgtcgctgggcccgccgtacccgggctctcctggtgtcccttactctctactgctgagccctccccttcccgcgccgctgcgagtggtcgccccaccttcgcctggatcccaagccgcagtagtggaccatggaggtggcgcctgagcagcctcgctggatggcgcaccccgccgtattgaatgcgcagcaccccgactcgcaccatccgggcctggcacacaactacatggagccggcacagctgctgcctccggacgaggtggatgtcttcttcaaccacctcgactcgcagggcaacccctactacgccaacccagcccacgcgcgcgcgcgcgtttcctacagtccagcgcatgcccgtctcacaggaggccagatgtgccgaccacacttgttgcacagcccaggcttgccatggctggacgggggcaaagcagctctctctgccgctgctgcccatcaccacagcccctggaccgtcagcccgttctccaagaccccgctgcacccctcagctgctggagcacctggagggcctctgtctgtgtacccaggggctgcgggtgggagcggtggaggcagcgggagctccgtagcctccctcacccccactgcagcccactcaggctcccatctcttcggcttcccacccacgccacccaaagaagtgtctccagaccccagcaccacaggagctgcttccccagcctcaccttcagcagggggtagtgtagcccggggtgaggacaaggatggcgtcaagtatcaagtgtcactgtctgagagcatgaagatggaaggtggcagtcccctgcgcccgggcctagctcccatgggcacccagcctgcaacacaccacccaatacccacctatccctcctatgtgcctgcctcagctcatgaatatggcagcgggctcttccatcccggaggcttcctgggtggcccagcctccagcttcacccctaagcagcgaagcaaggctcgctcctgctcagaaggccgggagtgtgtcaactgcggggccacagccacccctctctggcgacgggatggcacgggccactacctgtgcaatgcctgtgggctctaccacaagatgaatggacagaatcggccgctcatcaagcccaagaggagactgtctgctgccaggagagcgggcacctgttgtgcaaattgtcagacgacaaccaccaccttatggcgccggaacgccaacggggaccctgtgtgcaacgcctgtggcctctactacaagctgcacaatgttaacaggccactgaccatgaagaaggaagggatccagacccggaatcggaagatgtccagcaaatccaagaagagcaagaaaggagccgaatgctttgaggagctatccaagtgcatgcaggagaagtcatcccccttcagtgcggctgccctggctggacacatggcacctgtgggacacctcccaccttttagtcactctggacacatcctacctacgccaacgcctatccacccctcctccagtctctcctttggtcacccccacccgtccagcatggtgactgccatgggctaggcacagcctccggctggacagacatggacatcaagggtggttggcagaaccagagcgaggctgggcactccccggatgggtggaacgtactcttggctcctgcccatcccaagagacccacttcctcctgccagcctagtctggctgaagccacctctccttggaggactcccagccttgtgccgccattactgtgaatatttctaagtgggctgcagcttgtgtgtgccctgggtgctgcccagaagtgttttcacggacagtgtttgtttggagagcaaaatggacaggtttacagatttatagcaagaggaggagactagggatagaaaaatgaaacttttttttyttttttttttttttgaaggagaaaggagtaggcaaaaaaatatttattttgctcttatttcttacaagaacgtgaagacacagaggcatgggctgtttgtgttctctgggtccttccttgggacctactgccaccagtsrgggctcttgggggcagcttacaggtcctcaggctgagcctgctcctccccagcctgccgggagggtagcccttgccctgacgcagccccagagggcagagacaattscaggcggtcctgtgcggattcccagsccagggctgggtcacaggaaggaagcattctctggaaaggggaaatgtctcccagatcattcccctggcttccagaggccaaaactggtgtgacccaaatgggccaagctgtagcctgtgctytaggccagttggacccctgtwaatacatycttttttttctgctaaacccytcaacccsctyccactctaagataaataagaaaatactcaaatcaaaaaccaaactgcataagcttaacccgctgatgagtggttttactttgaaactcgttttgggtccagtccgttgtacgtcgccacagaagccacmccatgaaaaagaataaaaccttaaaaaacaaaacaamwvwmmhbvrhrscmgsgccaagcttcacagttctttaaatggttcttgggttccacggccctagcaggagactggggacaaggggcaatcttctgctcttggtttctggggggacagggcgtgggcaggcagtggccctgtggtcccaggcttctgttctgcggtagccggctggatccttcaaggtacagctgtacataaaaatgtrtcccaagcttcgattctgtgtrcggtggtggcagtggtgcagcagccggcacggggccccgagcccagggagacgattgtgcggactagtcaaccaagtgcaatatcggtgcccactgctgcagagcgccccaacagaaagtaacttattttgtgctagtacccgcctaagaaaagaatcggcagtattttctgtttttatgttttgggcttgttttattttggattagtgacctaagttattgttaacwgtgtacaacatttaaatattgtctgtaaaaattgtatgctaccctcttattcctttaaagtgaatactgttaaaagtaataaaatactttttgtgaaaaaaaaaaaaaaaaa

SEQ ID NO: 1192 - DNA, 1506 bp, Rattus norvegicus
  misc_feature (1476)..(1476): n is a, c, g, or t
gaggcagagcgggtccacaggccgcagccatgggtagccgcgtgtcccgagaggagttcgaatgggtctacacggaccagccccacgccgcccggcgcaaggagatcttagcaaagtatccagagatcaagtccttgatgaaacctgaccacaatctgatctggattgtagccatgatgcttctcgtccagctggcttcattttacttagtcaaagatttggactggaaatgggtcatattttggtcctatgtctttggcagctgccttaaccactccatgactctggctatccatgagatttcccacaatttcccctttggccaccacaaggccctgtggaaccgctggtttggaatgtttgctaacctctctctcggagtgccatactcgatttcctttaagagataccacatggatcatcacmggtacmtcggggcggacggcatcgatgtggatatccctactgatttcgagggctggttcttctgcaccactctcaggaagcttgtctgggttatccttcagcctctcttctatgcgtttagacccctgtymatswrsscyawsccwmktrcccatctggaagtcatcaacgctgtgatccaggtcacttttgacgtcctcgtctactatgtttttggagtgaagtctctagtgtacatgttggcagcctccctgctcggcctgggcttgcacccaatttcggggcatttcatagccgaacattacatgttcctaaagggacacgaaacatactcctactatggscctctgaactwactcaccttcaatgtgggctatcacaacgaacaccacgacttccccaatgttcctgggaaaaacmtgsccckrgtgagaaaaatcgcargtraktwctatgataacctyccacactacaactcctggwtccgagtgctgtatgactttktgatggacgacacaataagtccstactcacggatgaagaggcccccgaaagkgaatgagattcaggagtaaatgccatcacagccaaaggaattcctgtccacacttcagaataggagataaagtggagctttcctctmgttaaggtcagtgatgctcagaagccgcgctgacgtaatttccggstcgctgasgtaatttccggctcgctgacrtaatttccggcyasgakctcsgtgtcatcagaagctcytsggccttcagacagccagaactcacacttgctcgcagycgcacgcctgctcaccgwactcacgcaacgtatgactgttactgaggcgwcctcactcatgtctgtcctgctgcaagcaaatcataaaagcttmtgttatttttcactgtaaggktttactytattaaaagcccytaataaactgaactgttwtcdwawawawwaaahaaaaaaaaaaamaattgcggccgcaagcttattcactttagtgagggttaattttagcttggcactggccgtcgttttacaacgtcntgactgggaaaaacctggcgttacccaact

SEQ ID NO: 1193 - DNA, 451 bp, Rattus norvegicus
  misc_feature (339)..(339): n is a, c, g, or t
tttttttttttttttttcctttayaaaaactttattaagggaatgggtagaaaacggggacgacgcccctgggagttgaataaatakagagtgaacaatacatacgtccaccccttgtgctttcgaggscccttgggggagctggatacaggctcaggaagatgtcagctggatggsgaraacctcgccatctgcaggtgactcggsagtgccgggggkctctgctccgccttctgcacccggtgtcccgcccgcgccattgagacaaccgcctcgcctgagctctcagcctcctggacgttgtactctcccttcttgcaagcggtggactgcacgtanaaggccaggccggcccctgcggccagcagcgccgcgccccctgccgcaccgcccacagcgacccacagccatggacctgtaggcgcagaccctcgccagcttgggcaaacct

SEQ ID NO: 1194 - DNA, 462 bp, Rattus norvegicus
tgatgatcatggacacatccgaatttcagatcttggtctagctctggaaatcccagaaggggagatggttcgaggaagagttggtactgttggctacatggttacttaccaaggatccaagtaaaaggctgggctgccagagtgatggagcctctgctgtaaagcagcacccaatattcaaggatattaacttcagcagactggaagcaaatatgttagacccacctttctgtcctgatcctgaggccatttattgtaaggatatcttggatattggacagttctctgtggtgaaaggagtcaacctggacaccaatgatgagatcttctacactcaatttgcgacagggtgtgtcaccattccctggcagaatgagatgattgaatctggatgtttcaaggacctcaatgaatatgaagataaacggaaagtcacacttgtaataaaaaaaaaaaaaaaaa

SEQ ID NO: 1195 - DNA, 469 bp, Rattus norvegicus
  misc_feature (401)..(401): n is a, c, g, or t
cggccgcgcggcttccgaaggaaatgccaggcgctcaagcctgtgtacagcatggtgaacgggctgggcttcaaccaccttcccgacacctacggcttccagggctccggaggcctctcgtgcgcgcctaacagcctggcgctggagggcggcttgggcatgatgaatggccacttgacgggcaacgtggacggcatggctttgcccagccactcggtgccacacctgccttccaacggcggccactcgtacatgggtggctgcggtggctctgcggccggggagtacccgcaccacgacagctcggtgcccgcttctccgctgctgccggccggcgctggcggggttatggagccgcatgccgtttactccagctccgcagcagcctggcctcccgcggnctccgccgctctcaacagcggggcttcttacatcaaacaacagcctctggtcccttgcaacccagcag

SEQ ID NO: 1196 - DNA, 464 bp, Rattus norvegicus
cggccgctggaaggaggctgagctcaggtcaggccggaaggcatcaatggcgtgctcacggttgttctggtcaagtagcataaaggtgaccttgttccggaaaggccagggcagcagagcgtcatattctcccctcatgatgacaatgaacarggacaggtgggtcttcttgcctgagccatccccattcaggtacaggcgcaggcacaacttgtaaccgtacttggcagtgtagaaagctggagagaagaggctgacagtcctgccacacactgattcgtggcaccgcttggtgacattggtgatcttccacaggaaagtaccatcaaaggacgcctcctccatgagtcgcagactgtgctcaagtttgcccagaacctggtctttttgagccagggtctgctgtaactccaccaccctctgctccaagttcaggacgtgctctcggtccaactgactctggt

SEQ ID NO: 1197 - DNA, 458 bp, Rattus norvegicus
cggccgccgggtacttgtagggatggtggtgcagcggttcggatgcgcccggagcctccaggcgcagatcagcgtgcgggggactgtggcggcctccggatccgccaggtagcgggacgaggccaccaggcccaggcagtgcggggctcagcacgcgcgccagcagctgcggcgggtgcgtggcgtcgccgagcgctgcgggtccagagtcacggtcgaactcgcgccgggcttctgccacatctttgtccgctccgttgggctgcgtgggggaagccacgggattccgagagcgagcaaaggcacttacaagcggcagcgctccgggccggtggtttcggggccagtcctccgggtcgcagtcccggaagcctttggcgaaggggttgctggcaatcttaagctgcgsmtcgwkccggtgattctggtaggcggtgactgcagtgaagcgtgtctcc

SEQ ID NO: 1198 - DNA, 511 bp, Rattus norvegicus
tttttttttttttttttaaagtcacacagtgaaaaacttttatccaggggatctccaggtgaattctcaatgtctcgagtacattgcatctctgtgatactctggattcacattttcatagatcggaaacagggggttttcttgttcgtwccgcagtttccttgctctgaggacgtctctcacacactgatgcagatagacgtactgacactcggtctggaccatgtgaaccctgtggagtcttaggtcatgcactgccccataaatgtccacggagtcctttgagtccaactgctggaggatccggtccagggcaacaaatgtccctgttctgcccacaccagcgctgcagtgcaccacggtgggcccggcccctgggcttcggttgatatagtccctgaccgttctcacaaactggatcagggactgggtggtctctgggaccccatggtctggccacaccgtgtagtggaagtgamggaggagtctgtgtgcatccaactgcctcgtg

SEQ ID NO: 1199 - DNA, 595 bp, Rattus norvegicus
tttttttttttttttttcackgcattgtctttattgcatccggagcaagttggccagaccattccacatttggagaaggtttaaaaaaaaagcccaacaatcttckcatcttaccttccccccccccamcccttccccacaactgcacagcaatgtctgaacacatttggtgacaagaacaatttgcaaaagtggtctagaaattacattatgaattgttccaacacaagacacagttggcttccttctgagtcagttatttttacataaactacatggattttttttattacatcaaagacaacagaatagattcttcacaagaaacaacaggagtaccaaggttacatgcgaggatttgtaaggaaacaagggtggttgtcacaaatggctagagctaagtcaagagtgagcagttggcagcaaaggaccaagaatggacccctggtctatgatgccatggaaacctcacaaagatctacctggcagtagagatcatcctagaaatcagagcctgctcagatacatttctttttaagttgaagagaatgggtggagctggtaccttgcagagaaggcacacaagggcctcgtg

SEQ ID NO: 1200 - DNA, 722 bp, Rattus norvegicus
ttttttttttttttttttacaaagatagggtcatttattcatgttatattactgcatttcaaaggcaaaaatacagatgtctgttctgaatatcaaggtcagagacagccacccactcccagccccagtggtaaatacatctatacacatgggatatcaaaatacacacagrgcatcayaggtctgtaacagcccagtgggcagccgagaccctgccmggcwmragggcarcacgtttcctttgccyytctgtgcctmtgagctttcccaagggccctgccacacaggccaccacaaatatagacagagaaagacacagcatgggacaacagggtgagaattcccaagtgaaggaaatggtccctgccccctcaatcctccagcccccaacggsatctcctgggtcaggcaaatgcccakgcctaacaacagtgccttgggtgtgccttgggcctgaggtgccccaaagcatgctgggaggaaacggaawgaacaggcaagacaatttcccttggktctgagaatgaaccwcryrtttgacgtgaacaaaacccaacaggaacagcacagagaaaaggtggmgvwwwrmwwwarrarrrraggaagtgacacactccatgtgtctgtgatctcccttcttttaaggcactttggaaaagtcaggatctggggacagaaaacaaaacaaaccaaaacaaacaaaaaaaatcgctggcggccgc

SEQ ID NO: 1201 - DNA, 450 bp, Rattus norvegicus
ttttttttttttttttttgaaatggtcggtctttattacaccatcagawwwywwwtwtkytkkttaagttattcatcattatcttcttagtaacaaaataaagcactatctatgtttacagtcataaaaagaaacagtctggagagaaatrgggtcaacagaggtggggagggaggcgcccggccatgtggggtttgggatcatttccctgacccagrgmagctccaratctttgaasctgggtgmtgatsgtcwttgattttcttggyacacaaycakaaagcttatttatmackartggagcccmttccccaggacraggtgggggagggaakaacccaccctaagctcatgaacaagggatggagaccagctgccatggagtcccctctgcagggctgtcaatgacaaaagagccccatgcctggggacacaaattgggaattgggg

SEQ ID NO: 1202 - DNA, 522 bp, Rattus norvegicus
  misc_feature (456)..(456): n is a, c, g, or t
tttttttttttttttttggaaaactgagacaagaaatggtttatttggccgcccagtgtggcagtcagggcccctgctggtgtgaagcwartcaggaaatcacaccacctcattcatgactagcacccagggctgtgagcacactgtagtcagtctactgggacttctgagattagaagggtccttaatataatggaaattcttggtgacactggttatctccaggtaaaggcacttgctttcgtgtgtttttgtttaaaggaatcatttgtagctcaggctgctataaagcacagcagttctcaactctcaagtgctaggattgcagagtgagccactatagccagcccaaggcactttgcttacagaccaccgtggaggcagggtgctccctccacagcacagtccttcacagagcagcgattttagtggcgaactttacaatcagtcctcatnaggctcttgcacttgtttggaggtcaggagctgctctctgatgggctccaaggatatgagacagat

SEQ ID NO: 1203 - DNA, 729 bp, Rattus norvegicus
gaaaaggggatttcctccaggcgtttagtggggtaccgcaaggttttcccagtccgacggttgtaaacgacggccagtgaattgtaatccgactcatatagggcgatttgggaccgggcccacyyytywwkttttttyttysaaaaasamtakakaakwwwwwtywkwywywtttkrgcamawattaaaagtgttcttaatctgaaacacacagaggtagmcccaagcgtytctgacagcatgggtaaggttctgggaggttacatacatgcgatwaamcaagggaaagagcccgtgacctatatcagatagtwkacagggaaactcattcaatcactaaggtaaggaaagggygatctatttacataacawacgtttaagacaatcaagacaggcagggtgaggtcaagttttcamagtgcacatctgttaaccctawaaatcttcacagtatggtcctcgccacagcttgcaaaatccaaccactcggtcccctmttcamtctgctcagtgctgccgctgcagctcttccagcataaccttctgatacccagcgtgtgacytyggcyksraswdgbwkhkrcamagstmrwcacagtcwtkggyytcttgattggtcwtgctccagsagtatatacaaatcttcccactctccaatccaactgccacaatgtatctttgggctgggttaagcacagggcagacactgacagctgtcacacaactgcc

SEQ ID NO: 1204 - DNA, 604 bp, Rattus norvegicus
tttttttttttttttttawagtttatacaattcaaaatttatgtaaagtccatgatacttaagttattcttaaattgcacaatgctaaagacagcctataaaagtcaaacaywyywytkywwkktwwtccaatgaaggttttttttaaatgcgtacaggaaaaaaaaatcaaatccccaatgacagtctcccatacagcttcctgtctgcacagaagctcagggcccctggctggagcagcaggggagttagtcccactccatgggatgggtggacttgtggaagagttttaagttccctttgttctccagtgtgtcttgtacaaaatattacatttttaaacatatttacagagtttgcacaaatagaaaatggttacaaattacaaccaggcttggcaagataatagcttcccctctccccactcactggggtcaggtgtgacaatcgctccttatttacacctatgtttaaaaaagtcttgagttcccagagacccggaggaagtatawwaaaactgctaaacaccstcaactcatccaagtgagccacacagggaatccataccgattagtccgtgtctcactccctgaataaagactct

SEQ ID NO: 1205 - DNA, 534 bp, Rattus norvegicus
tttttttttttttttttcttattgagcttccaggctcctgtccaaagatttttattggactttgtggtcgtacatcacactttgttcagtttttgagttggtcccagactttaccacagtggagggcaggagttggtgttgggggcactctgtccatccagctccctttttgggaggattttcagttgtgacagccccaccccctgcaccatctctctccttagtgtggtcaggcaagcacaggctcagtggcagtcaggtaccttgaagcatgtccatggtgaccagactatgctatcaatggtatccaagtgccctaggtccaggaaacacctcccctcyscygtgtcccttccaaggcagggaggggaattgtctgaggctgggacttaagatcacttgcaggtgccatagtacagcacacgcccgttgatgtaactgcggatctgctccacgcgcttctccagccccgacaggtctgctgaacgaagcatgatggcctgactccctcgaagcagctctgactccatgtct

SEQ ID NO: 1206 - DNA, 427 bp, Rattus norvegicus
cggccgcgtgggcgccgctggaaccccacctcgggccccgctcgcccagccgcgctgcggggcggcccgggcggcgtccgcgctttcgcacctgcactgcacagcgactctgcaggggccactgacttgcgaatgctaactcggggctttgggatgggtttcgagggcttgttctcaaagctctccggaagcgtggaggaatgggccccttttcttgcttgtagagctagctggtaagcgacctcaaatgcctgccccagcgttaggatgatttcataggctaaattcacatcaaaggcagtaaacacgtgacagtagtggtggttggacttcagatcttttgtgatataagcaaaggttgagaggtcttctgggtcctgggcagcacaagagatattacgaatttcatgctcggcaattatgttct

SEQ ID NO: 1207 - DNA, 526 bp, Rattus norvegicus
ttttttttttttttttttycagcttggcaacagatttattagttcagagtagaaagagcaagagtccaagtgctttgattgttcagtaaaaactatgcctcctgactggagagctgccagcctgctctcccccactcttaacaacttaccctactattaaggcacttgagaagagggagagcaaggaagtcccaraccaaaccccttctggatcctggagagagccagtgctgttgcactggtttccttcagccatggttgagcaaggaaagagccggcagagacctctgtagggcaggaaggccagcccctcaaacgctggtgttaggcacagggacaatgccagtgccatacaggggctggtatctggggcgttattttgattaagctgtaatgaatccatgatggaagacacttgataaggctttgtgggctcaaaggccttacctccagcctgcttctgtctctaggagagtaccataagctggaggatggggatgggggaccccagagttccctacagaga

SEQ ID NO: 1208 - DNA, 570 bp, Rattus norvegicus
cgggaagcctttgacctcttcgattctgatgggagtgggaccatcgatgtgaaggagctgaaggtgsccatgagagcactcggctttgaacccaggaaggaagagatgaagaaaatgatttcagaagtggacaaagaggccacaggaaagatcagtttcaatgacttcttggctgtgatgactcagaagatggccgagaaagataccaaagaggaaatcctgaaggctttcaggttgtttgatgatgatgaaacagggaaaatttcattcaaaaatctcaagcgcgtggccaacgagttgggggaaagcctcacagacgaggagctgcaggaaatgatcgatgaagctgatcgtgatggtgatggagaagtgaacgaagaagagtttcttaagatcatgaaaaagaccaacctttattaagtgactggctggggtccctgcttctgcttttgtgaaagtataacagagcagctgtggtctgttccttcttcctgcctcctgtgcttgattagcttctaagcctccagatcaattataaattttgaagatacttaaaaaaaaaaaaaaaaa

SEQ ID NO: 1209 - DNA, 557 bp, Rattus norvegicus
  misc_feature (523)..(523): n is a, c, g, or t
tttttttttttttttttacaaaaataaatttttattaaaagcagtaaagtctgagcaggaagacagtacaaagaatgtaaacaatgtaaacaccactacattcagctcagcctgatcggatgctgaaagacaagtctaaatgctctagtccctttgctagcaagatacattaattctattttacacagacaacatattctaatttttactagggaaaaatagtttatcgaagtcgatcccaacgccaaatgctggcatcatcgcagacagctatgaggatgctgctatccctgctaaaactggtttgtcgaatagcagcgccacatttatgatgggtcagtgttgtgcatttggctttatgaggatcttctacttctaaatcccaaacatacagtttgccaacctgattgcccaatgcaagcatcttttgccagaaatccatagaaaacctcatgtaccaaatgtcacactggctgtaatcaaatcgcccaagaatagtcacattagactcactaggtttaantttatctatatcatcctccattttgccaggtttc

SEQ ID NO: 1210 - DNA, 496 bp, Rattus norvegicus
tttttttttttttttttyaacataataccatcttttatcataacaatataaacaatttccatywtywtyytwwwtwttactttataaagatatatatttaaaggctttcaaacagtttcaacccagcatctgaaaataaagcattaagagttctgtatatagtaacatattcatgtgataagtgtatgaatttacaaccatacattatatatataatatgtatatatatatttatataaaaaaaaaacaaagttggctaaaagttaaggctaccacctacaaggttgtccagaaaaattatgcttgtcaaaataattataaaattaaaattacacatgcattttttaaccatcyaaaccagataaagctcagcatccaaagtttcaaatgaactgcaagaaagtactacagacatctacagtttcttacgtggactgctgttcccacattacactgagacttctacttttcaccgaccttgaaatataaacactgg

SEQ ID NO: 1211 - DNA, 911 bp, Rattus norvegicus
tttttttttttttttttaatttcacagatttttaaaagattcttaatattttatataattagaaatacacatttcaaaaacaaaacttctacaaagagaaaacagttatgttggttagcaaagcatggagttcctcatggcttagggtagtgcgttctatacaaaaagtccttggtggggtttacaggactgtttaaaatagtagcgaagctattgaggggaaaaacacattttggcttaagtaaactacaaatagccacaaatgctttgcaaactctttcttaccttttatatgaaaataagcaaaatgtaatgtacatatttttwtwtttttwtttaataagagatgcagacccagatttatttatttaattaaatacgttagctctcaracaccacacttttttttyyttttyttttamagtgggtatggkcctctttgaatggtttctgatccttttgcatgagtgccatacgccaatgatatatgcctgcaggtttgtgagcgtgctcagatgttaggtgacyggcatgttcctaacattaaccagtggccaccccttgccgggtctgtccgaacgtctatacatttttctatatgttgcataacagctgctctctctttcagtaaagmtctgccgcttttggcaaatgtttccttttgtctatttacatgtaaataacgttgaacctgcaacatgacactatctattgtaacatacattttgcaaagggtcacaacagtgaaaagaagttagccttaaaatctattttgtacaagtgttctgttgtacaactcaagtgctaagcgtatctcagcatttctgtttatctttagactgtatcactgaggcaatttaaaagtacttttacaaaacagagtacctgacttttttttccctcgtgccgaa

SEQ ID NO: 1212 - DNA, 893 bp, Rattus norvegicus
cggccgcrggctatcctggccagcagcagaacttccactcggtgcgggaaatgttcgagtctcagcggatcggcttaaacaactctccggtgaatgggaatastarctgtcagatggcttttcctgccarccagtctctgtaccgcacgtcgggggctttcgtctatgactgtakcaaattctgaycctattccyggcacccttasagccaaackgaatggaaccccakagcaggaacagtaaaagaacccagcaatgcaaaatcgawactaaaaacttacaaaatttaaaacttgagaagattcatcacmmcagcgaacagaatctctcctgaaattcaactcaccarcatcaattaaaagaaaacctatttttctaaaagattaatgcagaacckcctccatttktgccttakctaagtwagcaaaaccgtwaactattttgtacagacagcaaaatcatggkttattaaaasgacagtttactccagataccacgtwagtttcttgcgttcagagactcgctttcctgcycaytttgtcttgcccctctgcctctgccttgcckmwywcytgkhagataatattttatcctatgtcgaaagaagggggaaagtccctgtttatgaaaatcgctttctttttattcatggacttgtttttaaatgtaaattgcaacatagtaatttatttttaatttgtagttggatgttacggaccaaacaccagaaagtgttccaaaaacttttcaagttaaattgcctgaaacttttaaaatgtgccttttctctcattataaaaagggaaactgtattaatctcattctatcatccttttctttttgttgatcatatccattgtttgtttattaataaattgccgttcagtttgaat

SEQ ID NO: 1213 - DNA, 494 bp, Rattus norvegicus
  misc_feature (410)..(410): n is a, c, g, or t
tttttttttttttttttacacgttacctcatttattctcacaacatgcctgtgaggtagggaggggcarggactgtccccattttacagaggaggaagttgaggcacacagaggtcaaatgacttgcccaaggtcacagagggggcggccaagctggaacaggcccccagagcaggcccttgcttcatccaggggacccctgcagcatgcgccagacaagaggatgtccccactgcccttgaatcatatgcacagtatagaacagcccctggcacgccaaactgtctactgggccccctccaggcggcgctggtgggctttgggtgagcagatgggcgtttattaaatatacactctaaggtctatgtgcatatgtacacatacgtacagacaccgccacctgcccctgngggaactggacgaaggtgcggccaagggcagacaaccccctggaagccacttgggagtcctacattttcttttgctgaagaaga

SEQ ID NO: 1214 - DNA, 581 bp, Rattus norvegicus
ttttttttttttttttttyyahayaaatactgtttttattatcagaaagaagtggccaccctatagtaaggtacaatcaaattacattgtcactatggcctaaatacccactttgatctcagccaagactttgtggctcacaggcctaaggcacttgaattcttccttcgacagaagtatakgggcagtgtctgagaactgagcctttgagactggccarggcctgcctctgctcatgtgtttccagctgaaatacggatattatgaattactaaatatatacaatgtctccaggtaatttcccctgagtccacatttrgctaragtccccaaagtctgtcccctttgtggctgbstmrctgcmkatcctgaccatcgtymwsgtgygtasksrwrccagcccaaagacacacagttgtttttttgcaggtcatgcacaaggacgagggtgaagtgsagttatatggkgacacgcggtgttactgtgagctctccyykcryrsmgaakgcagatgacaggggcgtcagcttatctgtccacctggtccaaccatctagttcatggttatcaaggggactga

SEQ ID NO: 1215 - DNA, 1388 bp, Rattus norvegicus
cacgaggtgtcattagggctgtattcaaacatcgtgtggaactgtacaaatatttataccaaaaatatagataagaacaggcggggcgacgtcagccacacgaggagcgctgcgcctgcacctgcggtgacttccaagaagctgaatccttggttctcagtggagggcttagatcacccgagtcgtgccagtccgcctgtcctcatcttcactgyksmckyttgagtttctgttctgttttgttttcctttccgtcgtccgtccgttggtttgtccgtccgtccgtttgaatctctacagcacacttaatgcaacttttgaaatctgcaggtttttaatgtcttgtgaaaatwtgcacaggggtgggtgtgtgtggcaaaygggtaatgcacgggaagtaatgagaaacaacatacgtaacttmmawkmattkkcwygmsscccaaccaccacctcccaggaacytgcaaggatagtgaccaccccatcccttctcatggtcagcactttagtttgtctgccccactmtcttgcagtgaggattacttaagacttggtaacgcatktwkyyttttttttagtaaccttggraacagtaktaattccaaggggtcataaaccttgcctggacattcgccacytaaacgaccagtgtggtgctgcattytgsccagtaaattccatgttttggctyttatctcayccaagtggagtggtttmtgtgtacrtacaaaaaggtagaaatgaaaaaaaaaraaarmrakagaatatttgaaaggggwtatattaattgctaaatattttattcacagaggtcaataacatggcaagatgaaattatttgtatagttttctcmgaatgasckmgwrcaatgtggatgtattgtttgtatatattgtatatattaaaacaaagatgtgcatgaaatccaraaaaaraaaaaaaaaagcaaagcattagtggctatggtctgtacaatgaaacaaaaaaaaaactttatttcactataagagtactttattttaaatgttctgtasaagaacattttgcaaaagcatgacctgcaaaaaaaaaaaaawaaaataaaaaagagctactgtatttagacttaggaaaagaggcagagtagcattactttaaaaaaaaaaggatatgtttacatttaattttggctatcaggagtttattttattttatttaaaaaataatttttttgccaaaggtgccaagtaatgtgaatgctgatattgcttacgaaaattaagttacttttgcaaaatagataatcataagatgaatccttagagaccttaacaccatccactcacaccaacaaagaacattaggacgatcaacgtttatcaaaaaaaaaaaaaaaaacctcgtg

SEQ ID NO: 1216 - DNA, 633 bp, Rattus norvegicus
tttttttttttttttttywywwkaataatcaaatttttgtttgytatccatgtacagcaactaaccgctttacaaaaaagcaaaataatacaatatatcatcacatgtatttacaatgtagtaaatagacttttctgtcaaattttacacaaactatttacaggtgaatacaccacactaaaaaacggtgcggctgacactaagtggatttccgtatgcgtccattgcataacattkwwtkwkwywtkyttcaatatgcttgggggtaaatgtagaaaaaawtaaaagaaaaacacaaaccccccactcctgggaatcagaagccaratctcccacaggaaactcacaaccccgagcccccgakgagtgggctgctggtgcataccctgcactgggacagtggcagtccgcactgtctgggctctatgctccccacagtggagggcacaggagcccagaggggtgtggtggtggggtamcarccaagcagacataagcacagcagtactgtttctcttcttctaagtcaaggaaacacagattgaaaatgaatcacmswmstsmcrccagattgtgtaaaaggggcctcaactggaccttcagctgctcctgtaattagtctcctttggggga

SEQ ID NO: 1217 - DNA, 725 bp, Rattus norvegicus
aacaagtgttttatcagacaggcagtcttagatttatatacaaaagtaaaactgaaaatatagttttgttctctgtacatttcttttaattttttttccctaaaaaaaaggaaaaaaaaaacacgctgtatacttttctaaacaggataaggtaaawywkwkywtwkwkttctcttctgccaagtcatttaatctgggatggggtgggagcagcagggtgagggcgtcagtccaacgagataatgtctggtatgatgccaaagatggatgccgtgtctgcgctgctcctgctggccacaccatggccatggctytccctcagactgttggaagacacaaggctgctgwtgctgccastactgcttccattggtggctggcararaagtgctccctcctgcacttagctgatcgagaaacatctgcgaggaggtatacgggaaaaatcgggaggagtgcaggaggtcctggtcatctgagmccgcagctsccgctgcggcaagcagggaggtgttgtaatgctgattgtctcctgataagaaaggaaagaaatctaatccttgtaagtcataaggcatgggcgtcatgtggaaagggtgtctgtmgkcmwgswtragggaggtgttgatgtagcttgtatmtacagcaggaaggcttggggtgcgsgacacaggcgatgcttgatgaggaagattaagatgcctttattacttagtggtgacgtag

SEQ ID NO: 1218 - DNA, 420 bp, Rattus norvegicus
ttttttttttttttttwyktwyktdhaaawggaaatgttttacamaagatayayascatgaagtcacattacactgacgarcacttarcartattaaatgtamatgtrtgacgtccarmaatctaccaccttgctttcactgaasaccatgttaggactgcagtgtccttcaaataarattcaakastttcctgtamgtccctactttaagtttttgthaaacaacatatgctttttcaaaggtggtarggtaaagagattaccagagcamcgtcgtctactccttcccasaatacatgctctctaaaggataysactccattcygtgaggcactaccgtgtaaragttaacaagytacacactgttkggacaggaagcactctccagtttaagatcattgctgaacttttcaatagggg

SEQ ID NO: 1219 - DNA, 815 bp, Rattus norvegicus
cgatttgtaggtgtccgggtgcacatgctcctagatcagtgaattgcgtgcccggataaggcagagggttcacgacagtccagttagagggtccctggttgtccaagcgaacgcatggacgggtccaaacatgatcaatagacccaaggtccgtaccataaagcgaggataattggtcggagtaagttcaaagggacgggcmkktaygrcmkkgttwkratgkcakgmwsgcwggttggaggmcattcagccgttaaaagagctgggtaccgtgatraggatgctagggcagmcrcccrccaaagaggawctggacgccatcatcgaggaggtgrwcgaggatgscagcggtaccatcgactttgaagagttcttggtcatgatggtgcgccagatgaaagaggatgcgaaagggaagagcgaagaggrrcwrgmkgagtgtttccgcatctttgacaggawcgcagwcggtwacattgatgccgaggagcyggcygagrttttccgggcttytrkksrgcaykwgrcmgacgaggagatcgaatccctgatgaaggatggtgataagawcawcgatgsccscattgacttcgacgagtttytgaagatgatggagggcgttcagtaaggagctggtyttcgtgttcatccagactgcaggtcccctgggcgtgggcaactccatccttgcctccttgccctaccagggaaaggctgctcctttkggctctgtgrctkgaaggratwaaagcmgdcmatktwaarmdraaaaarrmwrrvrrmmrctctttgcggccgctccaaccctcgtgccg

SEQ ID NO: 1220 - DNA, 508 bp, Rattus norvegicus
cacgaggttttttttttttttttctgttgagtaagggtgcgtcactttttcttttaacaacattttagtagattttttagggggagtcttcaagatatgattatttatttattcttattaaagatttgtttttgactggrctaagacttagcagtcttaagtagatgctctccatgacgacagcctatgtgtcttgtaatcctttctgatgtttttcttcagcttccttcactctcttggccaatagtttaacatatcctacagtgtcctccttgttcttcagagcagtaagtcagcattgtgttacaggacagatggagtaacaagaggctggatcttggtggctttggtcacgggcttcttaccttctttgagggctttctaacaacatattgatagacatcatcttcttttagagactgaaagctttctgattccgctagttctttaktttctaaccgatgaggcccaatagtgtctgtcactcctggtatccttctctcccttt

SEQ ID NO: 1221 - DNA, 842 bp, Rattus norvegicus
  misc_feature (766)..(766): n is a, c, g, or t
tttttttttttctttttgcatttcaatgatgacagaaattaaaaaaaaaaagcaagtaacatttgaaatgtaatgtagaatcwkkktyytttmkgayswkgctagagtggccatgtttcagaacccaaatgtcctcaagtagtttggagcatctcgaggagatggaattatgcaggtggcatgtasaaagtgctgcataatcgagacacgctcagagccctactatgtgcatccctagcatgtcggctcacaggsccccaggggagagaaaatgcttgcttttcyccctggtcctctgcactgccatttttaccctgacccccagtctacatccktcctacaaaatggatagacgagccaaatgctagcaacattcttccaccttcccggctgggagcttggcttgaatccaagtatatggctgctttgccctagagggaatccctccacgctgcctgttctggaggcagtggagctttgaaaagaacatgctaaaaataaaaatttatttttatttttttaactcaatgttaagaagattatctaagtcctggggaaaaaaggaatgcgcttttagacaagtttccatctaaaagcacttccagggtcgaaggcaaccagcttgtgtgctgtcaccttgctgtagtttctaatactgtgtgtctgatagtggtaccctcatcccccaaactactccagaatgacatttggcactgttcttagaaccacatggtcactctagcaaggtcctaaaggaccctgattntacattacatttcaaatgttacttgcttttttttttaatttctgtcatcattgaaatgcaaaaagaaaaaaaaaaa

SEQ ID NO: 1222 - DNA, 792 bp, Rattus norvegicus
  misc_feature (396)..(396): n is a, c, g, or t
ttttttttttttttttttccaccagcwwkywtkyywtytttttyahcaggagatytaawtttgtgtawcaacattgaraggtttacakgttaamamamtttacaaaacctartcttttaastgggaraccctctgccctggatgtggggcagmcargcctctgtaccgtgagcctcartascaggcadgtcctcartggscaacatggccttgtcagtcttagcttaaagaaactgaacccagcaccctggscaagagcccavsttkcmagggatcttcgcttttgtcscargactgcctgccccatgtaycargcagtgggctgcaggtctgggctgtctggctttgtttctctggtaggcaatagctgtcacggtgaggcagagaggcaaccanaagcakgagctgtgsccccttgccctcttgcagggctcactgctgggtttacawcccttcctttatctgaartggggccaaargcsggaggktggcsggaacaraaggcaaaatggcggccttgawwatgtgctgctgtcctacatggaacttgccttcacatycccgattctgagggcctgagggtccgtgtttgactggtgccartgcctgttgtggaagagktgaactctgtgtacttgttcccggtgaccatgcaggcccatttccagtactcttccctcacctttttgttgagcaggcagagcgtcacatagaggaaaaggccctgcaggcagttgagcagggtaaagatgtaggacagccatgtgctatgagggttgaagaggcctcgtg

SEQ ID NO: 1223 - DNA, 567 bp, Rattus norvegicus
tttttttttttttttttywkwarcawgacyctttttaatcactggtatttacaatttatcatctgacaracttacagggaataaataaagaaaaatacaattggsaccgcgctccattccgttttctaawacaraggatttttatgtgtccgtttcaraawgactgtgaccgttttaarcaraaattaaatccatctgctatttagcccttgacaaaacacattacccaccacaggctattgaaaaacacccaraggttgtctcctcatagaagagtccaccgtattactacaggaagtagctcctcaggaacaggacatggggcaagaagaagggaatccagaaacagcaaagaaccattttgcactgaaaggaatgttttcttgatggacagctgtggttgcagatcagcctcggaacttaggtctgccctcctgtaagacctgtaaggttactggcaaggtgtctgtaggagaaactaaatagctttcttcaaagggctgagtttggagccagagtcgtcttctctctctctctctctctctctctctctctctctctctctct

SEQ ID NO: 1224 - DNA, 537 bp, Rattus norvegicus
tttttttttttttttttgcyttgttttgttttttggkttgttttggtttgttttggttgtctcatttgttgaccggctctaccaggacttggctcaatgtaaacacaaaaatgcacccagatcataaaattgttcttctttcagtcacgttttatttggaagtgtgctgggacacacctccctgttgtatgttggcgcacaraaatggttctgatggggtggggtggggtggggggggcaatagagcaaagacataaccaaggagaaagctctgcagacacaacatggacaggaggaggaccagtcggtgagacatttcaggattaacactggcagtttgtaaccactgtgtgagcctgtgcatgaaagaaaatatttacaataatgttgtgttttcagtggaaacaggcagtaagtagactgtgagatcacactatccacaaaacggtctatcagaaagctagcccagtttagtgctcagtttcaaatgcatagaatgttttgtgctgcaaacaatgacatacgaccctcgtgccg

SEQ ID NO: 1225 - DNA, 902 bp, Rattus norvegicus
ttttttttttttttttttagycaccatarctatttttattacattacaatgattaggagcagtacrgttcatgacaaaaatattacaaatttcagatcacttcacagcacgtactcctataaacatttaaaagttaattttaattaagagkggbcacttttaagtttaatgtttgatatgaccaacattccctaggtcagagcaaccaaaggatggaaaacaactggatcacactgcatatgtcccaaacaaacaaacaaacaaacaaacaaacaaaacaagaaagaaaaggaaggaaggaaggaaagcacaatgtacaaaatgtgcatgtttcagtttacactatacaaaaatagktaaratacattccaggtaaacatgttacattaagaaatagcactagtaagaaattggcactcaaataaaaatgcagacgtgttttcaacattgaagacatgagacagtggaattgggggaccaggagataawacagcacatagcccactcarctggctggagttgagtcyraaactggcatttctgcagaacttcatttttcccagattcatctaaaatgcctaccaccatcccaaacaggcacttcaaactattgaactaaaccacaaatctgaatctaattaataactmttctttgaaaactaatgtacttctttagaaataagttttcatgttttgacaatttacagctattgggtatatctgttcaatttttcaatgcagaattcatgctacgcagtattacacagaagttcttaagtataaattcacctttaaataactttggggttttaaaaaaatgactacacaattatcaagaaatcactactttcaacaaatggaaatcagttaaatttttattgcctacaaaaaaatccctcgtg

SEQ ID NO: 1226 - DNA, 1488 bp, Rattus norvegicus
  misc_feature (1073)..(1073): n is a, c, g, or t
tcggcacgarggcaagtacaagcaggcstyactgcagtacaagaagatcktgtctkggctagmatacgagtctagyttytccggtgagsaaatgcaaaaggtccatgcrctccgactggcctcacayctcaatctggccatgtgtcacctgaaactgcaggccttctcagctgccatcgaaagctgyaacaaggccttggagctggacagcaacaaygagaagggcctgtttcgccggggagaggcmcacctggccgtgaatgactttgacctggcamgagctgactyccaaaaggtcctgyagcwykakcccrgcaacaaagccrccaagacccagbtgrstgtgtbccagcagcggacccgyaggcagctygcccgggaaaagaagctytatsccaacatgtttgagaggytggytgdggrggarcayaaggysaagrcagaagtggywgcaggagaccatcccactgatgytgagatgaagggtgagcsgaacaatgtggcmgrsaaccagkctcrggtgragacagaagcrtagcytgcctstccgcmtrcccaccyctgcrgbtgcctccmtgcwsmmttysbyacwssaccctgttagttttgtaaaaactgaagaawtttgagtgaawwrrammwwwahwwhwmwawmwrwhwddahradrrctttgggggagaagggagaagagcaggctgagggtgaaatggggggtagttttagatggtrtcaactcctcttttyttccccgttatacatgagtgtatatccttccacacayacaksagaatgttratttawwwwrmwmmmwmwrwwwgctccattttmaagtggttgaagggsctgtgtgatagggatggggtctgataagccagggtggagaagactcytgggcagccatttttcccatccmttccctctgtggktgttttccaagcmtgcggtckscaygarggtgctaggggcatgggaaaaccaytgttgtgtccattacstmtcttgcsttgctctcytgagatggtattcccggtaacatcccccggtatcacagtgatcgcstvtasacagvtcnwascrgtrsttcccbtttchtcccctcmtcwcagtttcctcakmcaggtcatccctktccccatcccstcagcytytktaatgcacgytgaaggtycaggcacacctcaagtcctgtgcttgagcaataaagtggaavcwmcaaaammwrrrwrwmarrmaammmtttatgttgagctctcgggtggggcatggtggggatmtgggcggggcaggatgaataaggtcccactytgctccatcgttaagtrtgsgatrtggtgcagactgtggcaaggcaggaaacagctgctgtgctcatacaccctgagctctgatatagacyacagcagtagaatgctggggtggttcccctcaacaagaagaggaagagktwataaacagtggttktgaaactgaaaaaaaaaaaaaaaaaa

SEQ ID NO: 1227 - DNA, 661 bp, Rattus norvegicus
  misc_feature (541)..(541): n is a, c, g, or t
tttttttttttttttttaggaatagtttgtctttcttttttaaaaagcccacattttgtgaaaagatgaattaaaaawyyywwkwyyywkywttcgggattgaaagtscccttgatgggaattcaagtattgactgcattgggagtgggctagagcccccaattgaacatgggcagctggagtgtggggcaggaactcccagttccccccccaaaccctctaggtcttgtctcgggtctgggaggcttcaggaggttcagcagtggctcctgaagctgccactgttgtctcctccatctccttgtcctcagacagtgtgggccctgggcagaatgtgtccccacggcccgccctgccaagcacagycatccagcgccgctggagttcttctgtctctgggctgaagtaccagcttaggtggctctgggtgatcttgaagacatgcctcctgtctggccgctcccctgcctcaggaggccccacctcaaagccaatgaggggcaggctgcgttgggctttcacatcctgaggggctccatanatgtacagcaccaagggttcattctcgggaaccacaaaccatgccttgtgccatcctttcccacccttctccatgtagtgcaggaagctgcagatgacgctgttctcagcagccactgag

SEQ ID NO: 1228 - DNA, 806 bp, Rattus norvegicus
gcggccgccaagaaaggaaagaaaccaaagacagagaaagaagagagagttaagcacatcaagcaagaaccagttgagtcatctttggggcttagtaatggagtaagtggcttttctcctgagtatgcggtcctgacttcagctataaaaaatgaagtggatagtacggtgaacacyataggacagtcccatctggacagcaacattgaagatcaagagatcgtcactaacccgccagacatctgccaggttgtagaagtgaccaccgagagtgatgaccagccagtcagcatgagcgagctctaccctctacagatttctcctgtgtcttcctatgcagaaagcgaaactaccgacagtgtgcccagcgatgaggagaacgcagaggggagaccacactggcggaagaggaacatcgaaggcaagcagtacctcagcaacatggggacacgtaacaactgtctgctgcctagcatggcgacctttgtcacttccagcaaaccagatctgcaggtcaccatcaargasgagagctgtccaatgccttacaacagctcctggccgccgtttacagacatctcccttcytgccccagtgacccccacgcccagcagcagtcggccggaccgggaggcccgggccagtgtcatcaagaagacatctgatatcacccaggcccgtgtcaagagctgctaagcctttggctctccctggtggttgttgggatttcttagctttgtgttgttawttgtttgtattttattttttctctatrawacctatcttagagaaaaaaaaaaaaaaaa

SEQ ID NO: 1229 - DNA, 685 bp, Rattus norvegicus
  misc_feature (654)..(654): n is a, c, g, or t
tttttttttttttttyttctggcvaaacactaaatatatttataagtcatctttgtctggaacccaatgggagagaaacaggtgcasaggaagggggaaggagagggkagggaggcttgaaagtwccaatcattcacacaagataaagacatcttctgatagcagcaytgaagcagccggtgtgccgagcagaccgtmctggtcggctgctgaccggctgtgtcccaacaggagtctcaaaggcctgctcctcgmtggtccgtccaggaatccgggtgggagtttgattgttgytgktcatcctggtcttggcaggcatgttaaatactgcaacgttaacgagtcctgggcaattatgaggccagtgtcgcgttatttatctggagatgtaggtgtatgtccgmswmgkgsmgmrkkgcggttsrgcwygagtggcyrgatcatttaggaagtcccagatgagaattgtgtcatcatgtgaactactgacaatctggaattcatcaaactggagtcggaaaactcttccagaatgctccacaagcgtccgtagacaaagagtccctgcaggagcacgcgggtccagagcagccataagatcccacactttaatttttccatcataggccccacycwckwkccttttgttatcanatcgaatacagccctcgtgccgaattcttgg

SEQ ID NO: 1230 - DNA, 1269 bp, Rattus norvegicus
ttttttttttttttttttttkktttttkggaacagaacgtgtcctttattgagcatccagagggcccctcarttctgactcagcagccagaggggaaacaagcaggcargtggtgggggcargagagcadggatggggacacccaccctcacttccartccttgaagaactgcttgaagatgggactctctcggbcctggggcadaatctccacctgagtgtttggggaatatctcattcgagagatgargccatcagscacttgkagggbcgcctgscgctccttctcattggvttttctccccttccasatgtmgattttgccacatarcccgttgtccagaacaaarcartcatctggaattagcagttcagaggcaaacggsctsgwgtcagccaccttggtcagattcatctgtccagtggcatcagagaccttatacagggctgcagcctgggcgttggtmtggtccgctgtaatgtcctcctcagggttgccctccttcagagcaggcttggggcccagaacctggatcatctcggstggstcctctccgtcagtgatgatctccacykgggccttcycctgccgctcgctgtcccggatggscagggccaggtctctcgccytgttgcgctccaggatgttggactksccaccacaccaggcaaagatgttctgacccaggtccaggatgaagcagtccccagtgttgaagctgtcccagctcagagccctctcggtcgcacggatgttcttcttccccttaacctggtagagcttcctgatggctgctggcgtggtgcccgaggttgtcttgtggaacgccgactccacgccaccctcccgatacttgaggccttgtgggaagtagctcatgaagaggtcggactcgttcccttgaacctcacggtgctgcacaggccgctcccccagcagggtgttgaggtgcacagctagcacagcgcaggccccctgctcatcgcgcgatgactgctggcctatccacaggtgcagatgggaggcctcttccgggccattgtgaagcactaggtaggaatccccagaaaaaaagatgccatggttctctcgtgctatgggcaccggcttcagcttctccacacgccatatgtgtaggcctgggtcttggactgaggctgggaatggagagccactctgagggatgggcgtgtacatgctgttttcagactacttacgacgggctgagcctcctcaggtcagtgattcaactcttcagagcctcctcc

SEQ ID NO: 1231 - DNA, 783 bp, Rattus norvegicus
tttttttttttttttttywkkkwdwwwwtwywwytacagaacatttctttatttttcacwaagactttcccagaggacataactaaccttgtcccmaccccaccccccacgaagggttagtgcgctcactgctataaagcagactcggacagtttcaaggattggaaccaaccttaaatggcaaaaatgctttctatctgaattttcataaaaatgtttaagtaaaaaaacgaaagtwaaggrkcaaaggggcaacggtggcttcagagtgaaaagatcattcacggttcacgtcagacattcaatcttggstcgagtgtaacacagcggraacaggctcactatcatacaaaaggtycmctmswgcgcgctgtgggcacctgttccaagkcsacccsmagccccyaacgcttcsaactcaattactkyscagyytgttggrmmtkwcdmyggaggrgswckyadatctymkbkykgrymcagtcyhtgttatacggctggkwtgtctgtgtatcavctcggkaaacaasacagctgagatctgccagatcgtcaayraamtcamacaactsactgatatcawatgygatggaasggctstkkggattmattctcttcasatgttcttcatayatttyacaaacacctyccatgcaytcattcacagactcatagtcagcataagtcctgccttctggcctcttggtaggctgtaccaacaaaatggtgtgagacatcgcgccaaacgctttgctgcagccgccgataacaccyycgysgccg

SEQ ID NO: 1232 - DNA, 1596 bp, Rattus norvegicus
ttttttttttttttttttaagggcaatagttcactgatttattggatagacatattcatataaccaatgaaagcctgtatgatataaaataatttaggaaatgttgggtattagcagcaccatctgttattgaaatagcaagaaaaacttcacgtattttaagcaaacactagaagagagtaactatatggcctaatgccactggtctgggacagatagtggtgtgttaggcaaacacaccgccatctgtgccagagatttcagtaagcacaccagatgtactgttctagaagaatgctactgaagttacaagatactgcatagtgtaagtgggacaaggagactaaaatcagctacattagcacagctcagtatttttcctatgaaaggtttacttcygaattatgaaatgtgaaataaaatgtwattttaaaaagacactgatggtcccywsgwrmcrttaagtggagcacagagcactatgaaaatacttcacttttccagtttgcttagtaattttctttaaaaaagtcacgtgttcttcacaaggggtgtatacaagtgtgtaataagcattttaaaaactttaaagacatttttaaaatcgwaaagattcttctgacctttcttyaacattagccctgttgtcacaattactgtgtgtcagaataagaaactaaatttgtgtgaaggatacaaatgtacacacattttacagcaacttattccctacatttacaaatttcacatttataatacaggcaagtccaaggccagwwtwwwwytkttwwwttccaaaaagtcaaactgtatactctttattttgtccccttaaaaaaagttcaacttyggcaccaaatgtaaaaagccctcaagtcataggaagggagatccccacttcccaggcccacctyagcacacacacactgttttccggtgctgatgtaaaagaggattccccatcttcttctggccccggagtctgcgcctcatggtcagtgtgacagagtgcmtgcgctgggatgmtgtggggagactmgaagcttgggccccgmtatttcgacttaagccatttcgtcgatgcttcttywtwwkkkkwyywkwkwtggattctkctarygtccttttwwwattggytrgaggggttctttcaacttcttgagctttcatttgacctggagttgacatctttaaatttttttggtccatgatagtatttgttgaattggttggcatgaggccaactgacagagtawtattcaaagaatcatgaatccttaaagtcagggctttggggcaattttcttcaagtgtctctgagtcttttgaggtcatgactacagtctggatacttcctcgagctatctcagctgggacctctaaaaacttctctgagaaggcattactgcgaacaagggcmskyrtrtggtccttagagttcagccttggccatggatcttcttccagtgacttgactggtggtgtagaacttggagaaggagtcatcacacaggtttcttggctgttgtaagtagggctatcagtcaggttcagaaagagctcatcttcattggtaaagttcccttgattatctac

SEQ ID NO: 1233 - DNA, 1106 bp, Rattus norvegicus
gcttcatatgcgccaaaaggaaaatcagcaattcagcaaaaaaaaataaaataaaataaaaatgtaaatatgatagtaataaactagagcataacgamactgwgraacttcctcaagcctgccatggtcaaagtgttagtgacggacattgttctgtagcctaccagaaggaagaggctttggggcaaagggttcttgtgaagtgggttctacatgatgcagcctgacaagccgggcatgtccgtcactggggatgctgaccagaaggctggccgctgactcacataatggagtctgtgcataattgcaagtgggttttcttttcctttttggcatgggaaccgaccaggaaggtatcttttcctgtataactcaatctgaaccaaggattgttgttccctccttgcctcccttctgtgtgatccccaccccccaaaaaagtatgaaaagctttaaaaaacaaaacaaaaccaccctccctcccttcccaggttcttctccctttagctctgcccagccctgacctgtcyttggataacagaaacaccttkratgsccacgttaaataagakgagctgatawgcttttawtttmtaagawaactttaaaggamccctakaatgcataagaggtgaaagagtagaaataaagatyrtcagctcggscttthtgctcaaaactktccccgttccctgacagsccaaatgctgyccctctyccgaacagtatcggcgagctytkgctcmccacttgtgmatgtsagggkmcarkggggamtgytgtkgggsccagatrtytgvtgcaccghtgtgtggscagtgcgcccastwaygagsctmgccacstaamcmagtgkgkttttavyaagtytmarsccctccttyccaccycctttttcttctcttccttttcctttwatttttysggaatccyttwwttttgkgttaamagaaattcatatttggtgtggcttaatgtattttggaaggtcatcagattgtgagactgcttccttgaaacatttttgtgmtattgttttaaaaaatmmtaattaaaaarcagytggcgttaawaaaaawrwmaawrwsaaaaaaaaaaaaaaaaaa

SEQ ID NO: 1234 - DNA, 1630 bp, Rattus norvegicus
cgcgccccgcagctcctgactgacgccggccttcgcaccgcctccgccgcaggaagctaccgcgcaccgctagcaccatgccccgcatagacgcggacctgaaactcgacttcaaggatgttttgctgcgacctaaacggagcagcctcaagagccgatccgaggtggaccttgagcgaacctttacgtttcgaaactcaaagcagacctactcagggattcccgtcatcgtggccaacatggacaccgtggggacatttgagatggctgtggtgatgtcacagcatgccatgttcacagccattcacaagcattactccctggatgactggaaacattttgctgaaaatcaccccgaatgcctgcagcatgtagccgtgagttctggcagcgggcagaatgatcttgagaagatgagcctcatcttggaagctgtgcctcaggtgaagttcatctgcctggatgtggccaatgggtattcggaacattttgtggaattcgtgaaactggtccgatccaaatttcccgaacacaccatcatggcagggaacgtggtgacgggagagatggtggaggagctcatcctttctggagcagatatcatcaaagtgggagtcggaccaggctctgtgtgcaccacccgaaccaagacaggcgtgggctacccgcagctgagcgctgtgatagagtgtgctgactcagcacacggcctcaagggacacatcatctctgacggaagctgcacatgtccaggagatgtcgccaaagcctttggagctggcgcggattttgtcatgctgggaggcatgttttccggasrcaccgagtgtgcaggagaggtgatcgagaggaacgggcagaagctgaagcttttctacggcatgagctcagacacasccatgaagaaacacgcgggaggcgtcgctgagtacagggcctctgagggcaagactgtggaagtgccttacaaaggggacgtagagrrcacrakkytggatatccttggaggacttcggtctacctgtaccwacgtgggggccgccaagctcaaagagctcagtaggagagccrcaybmrkcygcgtgacccaacagcacaacacggwgttcggctawcctcggggatgttcggttaacctcggggaagcggaagcmtcctttcrccacgcttcaccccatcccgcctcmttatmtgccctagcaggytgcytgctatcacagacgctgagactgagtcctcatcctgatctcggggcttgccctartgcctgtgtggggcccagaaacagggtgctcgaggggcccwgggtcagcachtarmactcattgtctcyttgtttyaaccagcccttgcaccctcytttccaccccttgcccwttgttttyttthtaaaggrcawtggtktcrcttttaawawaarrmwrwrrwmtwgrmwrarwrmwrrarwwwrmawrttcaggagcacagtcctgtagagccgtaaggattgggaaagtcttcccagtcagtggccctcagtggttaatgcacaaggcccccggctggggagggggcgcaagagcctaaagcagctcacaccgcactgactgccacccccagcatttgttgctgggaagaaaaaaaaaaaaaa

SEQ ID NO: 1235 - DNA, 1524 bp, Rattus norvegicus
ttttttttttttttttttwwtttkwwywyywdywtataaaacgwktyytttwdtttttywwbwgktttaaaaaacaaatttatacttaagccagccttgargataagcataaaaattaccaatttaaaccaaaaaccaaaccaaaagaccccaaacccacaacatcggaagcactggctctgtgcacagctccacccaggcgtgcatgggggaacacagcagtagagaggggtcactgtctggaactgcgtcatctccttaccgggagagcgaaaaataaataggatcaccactgccttctacgcatctgcccagccttcttccagctcacaggaaagctgagaggcgatgagctgggagctgcttccctcaaacacgagcaaggscacagtcactcaacgagcattyyywtkywkkktktwtkywttttcacttttaccttttaatttcttttactttttcgtcaattttcctttkgctaatataccatttttccttgtataaggcaaatcaracacttttgtaatgttgattttcctaaraaatgtaccgcattttgaaratacaccattcccaaaagtagtgaccaaaawawwaaaaaamwttaaaggkgagtcacctacattattacctcaatgaagtaaaacattaaaaataaaagcmgttggcactatkwywkytwttyywwwtktyykkyywwwtaayctttaaaactgtttatttttaaagaatgcaacccctagtccaaagtaactatattttaaaaaattttkggcmaaaaaattwamaaaacccctttkggtymaaccwaktaaaaktggwaycwagaaaatactctgcattattaagttgtctttaaaggktcggtctgaaagcmttcstraggctgtgtgttctaggaracagagggcycytacaggcactgcgctgcacacraagcaactgcgacmgrcasgmrsyytmktstgagtggtavagytgggaragaagtcagacgtakgcgcccasggcagcatggaactctgtgaggcactggaccagctgctgaaacttaggccgmtcctctgggtccaaggcccagcaacaggccatyacagcaaacagttygtcagggcagttgawtggctgggctattcggtaaccatctttcaggtaagcggccatctcaaaggggtcgatgtccacgtagggcgtctggcccagagtcatgagctcccwcagtgtcactccaaaggcccacacgtcactagcactagagaactcattgttgaccaggctttccagagccatccatctcactggcctgttctcgttgtccccaracagtggtagtccatcgsaaacaggtctctggaaagggcattgtctgtgattttwacttgaagagtgtcgtcgatgacgcagttcatagcagccaggtctttatgaatcacttcccttctggccaggtagctcattccgcaggcaatctgaatagccatatgtaccagatcttgttgggaaattgcctgtggattattggcc

SEQ ID NO: 1236 - DNA, 741 bp, Rattus norvegicus
  misc_feature (619)..(620): n is a, c, g, or t
tttttttttttttttttcctattgttcatgcattttattgaaccttagcatttttaaaaaaattgacaatctatgttattctcagtgaaccgacatgtttaatacgcaagacacgtcgttcaccttctaccatgtccgatactacgacctgttgaatttgtttatttagtgctactgattaagaccgggcttgtgagtgttaaaatccaactgctagctttgagtagaaatgtctatttattgtactctcaagtccagtagatagcatcttcataagcctgagcaaaatgaaactaccagataaataaacgaagccacaaaactgagaggtaacaataggctcaacctatatacacctatacctgtgactcatggtgccctcctgctacttttactctcagagcaatcaatgccaagcaacaatctaggccctttcagtaactgagctgatttctcactgattcctaatcagttctatcctggactaatctgagagctcaaacaagtaaatacagtgtcttggggcttcatattgcaggaatgatagtattggaggaacctcggagcattagagaaggagccatagaaccatttgaactctttggtacaaagaagagcnnccaccatgtactggggttgtacttggacgagctttgagcatttaagctacacttttcatgcagctccaagacagaatagagctagcagttaggtttccatgcacttctgtgtcattacatt

SEQ ID NO: 1237 - DNA, 568 bp, Rattus norvegicus
tttttttttttttttttawwattgatatatttattgaattaaaattatatatatatgacaccaatctatacagaggcatttaatacatcataatatatataagtaaactttagaacgtacaatttacaatgactgtggatataaactttacagtgaaacagtctaccaaagcaatttatttggctgttcgtgttcgaagccgtcgtttgagaatctgatgatcagtttcttttgctttctgttccattaaaatcacttggccagatatgttgatgggagatgaaatttcatttctgtacaatttccgtttggcttttttaggctgggatacattttctttacttacttctacagttgataactttggggaactcattgtttcaattatcttttttgcttttgattgaaggattgttggaraatgttgtaagaagtctccaaatttctgtagtgttccctccttttttttagaggctacattcgcaccaaccgtagatgcttggctccgtaaggagtatgtcttcttaaatgacggacataacaaaaccttttgttcctttttgaaaga

SEQ ID NO: 1238 - DNA, 651 bp, Rattus norvegicus
  misc_feature (20)..(20): n is a, c, g, or t
tttttttttttttttttggngccaattyaccacmtrstctkyawymwkccakgtgtactyrtyywgggtysmwgkkgaaarkgccatgaccaaggacaacaacctgcttgggaagtttgagctcacaggcatacctccagcaccccgkggggttcctcagattgaggytacttttgacattgatgccaatggcatcctcaatgtttctgctgtagataagagcacaggaaaggagaacaagatcaccatcaccaatgacaagggccgcttgagtaaggaggatattgagcgcatggtccaagaagctgagaagtacaaagctgaggatgagaagcagagagataargtttcctctaagaactcgctggagtcttatgctttcaacatgaaagcmactgttgargatgagaaacttcaaggcaagatcaatgatraagacaaacagaagattcttgacargtgcaacgaaatcatcagctggctggataaggaaccagactgcsgagaaggaagaattgagcatcagcagaaagaactkgagraaggtctgcaccctatcataacaaagctgaccagagtgcttgtggcatgccctgaggaaatgcttgtggcttccttgtagaagaagctcctcatcttgtgagcctctta

SEQ ID NO: 1239 - DNA, 624 bp, Rattus norvegicus
ttttttttttttttttttgcaaaaggcaattcatcttttattggatcaggagcgccatttggagtgtgccattatgggaggctcgtagctgtctgtccttctccttcagcaaacagaggccaamgaagcggggtgtgttagttacgcaaatccctgtaaggcactttacggttttcatagtggacagtgaggtacataggatataattctagggttcgttgctgttaacaatwcaamaggaggggagaggaggacaaggagggagtagcaccatgttgtgacggcggcagaggggggcatcactatgttcttctcatgcacacttggcagcggctgacatgcgtgcgcagctcccctgccttcaaggtggacggcgtgggcttcttgaacatctcgcttctctctatggtggcgagccaaaagctgtaagcattcgcgtagtaattgcacgttcctctgccatggcactcgatgaatggggcacttctaaactcttccagacaggacccgggagatgcaagggcttggscagaaccttcagcaccagcgctggtgtgcatcacaaaggaatagccaatccacagtgaggaccaaccgttggggcactgcgggcctcgtgccgaa

SEQ ID NO: 1240 - DNA, 563 bp, Rattus norvegicus
tttttttttttttttttwyttyytktttttacctgacatatgtttattgcctcagtgatgagaaaaagtggaaaggcctaattgtygaagtctcctaaccctgggcagtgcccagcacttagctcacagggcaggatatgattcatttcatgcacacaaggcagctgggaggtaggttctgcagaaaatactattggrcacatgataaaatggagacttagatagcaattcaacccataggaaggcagcaccaggcatggggtgctacagtggtgatcctcctatacacagggcccccactgggctggaggtcataagcctggccagtgcagacagggtaatcaaggctcccactggcagggtttggctcccaggaagacaagcagacaggtgtgtggatagatgatcagatcttctccacatagtttcctggaaagagaccttcctggccatgcaaccgacctttccaccagccagaagaatcttccatcaggatctcaattacttcattcacgttaaagctcagctcatccacatcttgggctatgtactggtacagtgcc

SEQ ID NO: 1241 - DNA, 419 bp, Rattus norvegicus
actcacacagactcaggtcaagatatggttccagaacaaacgctccaagttcaagaagctgatgaagcaaggcggggcagctctggagggcagcgcgctggcgaatggcagggccttgtctgccggctccccaccggtaccacccggctggaatcgaattcctcctctgggaagggctcmggmrgmarcgctggctcctacgtccccagctacacgtcgtggtatccctcagcgcaccaagaagctatgcagcagcctcaactgatgtgaggttatcagttcgcactcacccgcttcctgcccatctcccttggcccggcccctcccgcctccaggttcatccactcattcgcacgccctgggccggaaggagaagggcccaagggcgagggcgggggacgtaaaaaaaaaaaaaaaaa

SEQ ID NO: 1242 - DNA, 581 bp, Rattus norvegicus
acttgcggccgcatgtgttttttttttttttttttttttttttttttacaaagcacagtgtttactaaaggcacaaagtgggaggtctgggggtgggagtgctcaccaccctgaacccagactcctcttctggccaccccaccctcataccaccaggggagagctgttagcaccaaatgggggtgggtgcccacttgtggggaaattcaggctggggggacaggctgggtgccatctagtcccaggaaggcaggcctgggcacccccagaccagctgctgcctcagaggtacttgtacccccttctccaaaatgcccttcatgggaaagcccaggctcagaagagaggggctcccctagcagggtttcttcttatttctcttctgcctcacccctgtccttccccatcataggactgccgccagaggagggggcccgaagccgaggggagagctttccagccccgtcgactgccaggcaggcactaagtccaaacaggggtgggggggagcaaccaaggggaaggagagaggcagctacttcacaccaagtgcagcctgaaggatgggagggctctgccca

SEQ ID NO: 1243 - DNA, 663 bp, Rattus norvegicus
tttttttttttttttttyywkwtgacggtagaatatatttattgctgtatttatatacaattatacaaacagaccagacaggagggggtatgtcacatcgatttctgcagattccacaggaactcacaaggaaggaagtttaccaagtttgttctcagagaagccaaagataagtcataagtcacatacatttttttaaaaagttgtwaagtcttgaaaattctccccgtctattccatcttatgagctaatcaatcatgcagaaaaaggtgctgggggaggggactcggtggtatttccagaagcttaggccttccagcacatttgagaaagtggcatctcaagccgagctcagcagatgctggctcaggactacagggccacagacaccccacgtcctggtccatctcccgaggtctgatcctgggaaaggcagtgaggaagtgcaggaaacacagtakcaggaagagggaaacccacagcacagcaaacaggcgctggggagaagcatcagcaagtgccctggttgmybswgatrccrraktgtgggagtgtatgtgttcaagactcagggctgactctgtacatcctgagtctaaagcccacgtgggtcagtcacccgggacctcatgaggagggaggatcgtcctcgtgccgaatctt

SEQ ID NO: 1244 - DNA, 665 bp, Rattus norvegicus
  misc_feature (53)..(53): n is a, c, g, or t
tgaaaaagaaaaagatcccgaggagaaaaaagaagtcacagaagaggagaaanccaaggaggagaagccagaagccaaaggggtcaaagaagaggtcaagatggcctgagcaaggtctgcagctccatcttctctccaagtcccttactkkccswsratttctmagawttyrkmwykwsdattcctgtgtatttatataaaatatattaaatataacgtccccagggactagatagggaccagcgcacagggcagtggtactgggagaactsttcttcccagagctcccttgtccgtcctgccmtaggtctgagttttgaaccacgtagggtccaggtgaaaagaaaacarccggaagactaaatcytgaamtgcaagtgcctgcytaggagmtytgmtaggatggccttgttaagcttttcagcaggggcgactgtgtctkswgggrmsccttttcaggcttgggtaatatcagccatttttagattggttstgtttstaccttcccacccaccccgggcaagcagaaaaacttacaytgccccgtcttcccccaattytgcaggtggaggttgttagcctagcttcctttttgagatattttcatttttgtgagactctttgtaataaaacagcgsgtttctwtammwwmaaaaaaaaaaaaa

SEQ ID NO: 1245 - DNA, 591 bp, Rattus norvegicus
tttttttttttttttttggagtaccaataagtctttatttttcccagggaagagaagggaaggtaaagtcagcatgtgttacaaaatgattatacgataggaatataagtacccggggacagcaaaactcaaccatgaaataaaacaccccagggggtggggtcaccaaagccccagggggcttagtctcctgcagttcaggaaagatatcagggaaaggacaggcaagtacacactttcccaccctccccataaattcaagatttctcacaaagctttggtttctagcagtaaacatggagatacattcgtccgtctcctagtaacaatcttgtggccactttgacataagtttcttgcaccggcattaagttcctgagtgtctcaactttacgtacaktcatagtcccttcctgaactttgaattccaccttctacatggaaggccccacaactgcttctctctacctaagggtgacagattacgttggttggatctgtccaaaggtaaatcacaccatgaaatggtcttgccagggagaaggggctcacctgcagtccctgcacagaggagtctgaggccggaggata

SEQ ID NO: 1246 - DNA, 583 bp, Rattus norvegicus
  misc_feature (458)..(458): n is a, c, g, or t
tttttttttttttttttywccgggcagcaagcagtttattacccatcaacctgtccagcctgccagcatyatascctgcacagcctggacagcatyttcgtcccagtcagctytggcacccagcctyaggctccaccctygccctgtcctccacaccctyagtccctttmaaggsagcaccaggcctgggggccacaccttmgccaggararaaaggggatacaggaaggtaraagctgggcaaararaaactaragttggccccaagcttytggagccagcacccargttaaraggrcaaggaggcgggacttctggggccactacatgtggttcaggcaggaggctcttctccaggacgtgcagggaagccactcaggtctcggccaatgatctcactcacttcctccagggtgataccctggataggcacattgtctctgaagccgctgccgtanccacccctggatttctcctgcgccgaagccccctccccagggggtatagcctggccccacctcattgtaaccctcagcaggtaaggggtggacagcactcgggggggttaagggggtcttcgagt

SEQ ID NO: 1247 - DNA, 711 bp, Rattus norvegicus
  misc_feature (15)..(15): n is a, c, g, or t
  misc_feature (40)..(40): n is a, c, g, or t
gagttccctcccatntaggaagcaagtacaagcaacctanctgcagtacaagaagatgtgtcttggctagaatacgagtctagttttccggtgaggaaatgcaaaaggtccatgcgctccgactggcctcacatctcaatctggccatgtgtcacctgaaactgcaggccttctcagctgccatcgaaagctgtaacaaggccttggagctggacagcaacaatgagaagggcctgtttcgccggggagaggcacacctggccgtgaatgactttgacctggcacgagctgacttccaaaaggtcctgcagctctatcccagcaacaaagccgccaagacccagctggctgtgtgccagcagcggacccgcaggcagcttgcccgggaaaagaagctctatgccaacatgtttgagaggctggctgaggaggaacataaggccaagacagaagtggctgcaggagaccatcccactgatgctgagatgaagggtgagccgaacaatatgccaggcccaatgatggcgctatggtagaagtggcactagaaggctactataatgaccggctgtttgaccagcgggagctctccgcctacccacccctgcggctgcctccctgctcccttccctactccaccctgttagttttgtaaaaactgaagaattttgagtgaattagacctttatttttcaaaaaaaaaaaaaaaaa

SEQ ID NO: 1248 - DNA, 702 bp, Rattus norvegicus
agtgccaagctaaattaaccctcactaaagggaataagcttgcgkyykytywyttttttttwwtttttttwwywtkttctttaaagaatgtttattgkckaaatatggcttcgttcattcttataaaaacattacttggacattgtatttactggatttcagttcaaaakaagtcctaaggcagttcttagtgatrgragtacactttgatggtgtctacgtgagaaaatagcactctactgagagctgwttgatgccaatgcgtccytcaaacatttcctmtyaatactagaaatacacaagttcatgtacataaaactaaatgcaaaggaaggcacakytggttataccgtgtatacaagcagagctcagcatatgtagatttaaagcgatakaaagcttcacagccttattagttacactgaaaacattaagaaaggctcctcactgtcagtgttcaacactccagagctaacaggataaaaaacawmcattaaaatccacttgatgcaaaacmswcktscmkagakwsytgaatatatatatatataaaaccgtcttttaaaatggtgacatacatctagattayccgtgttatgaaaagtgcaaaccaaattgaccgggtttcacgacgtccttctcatgacacaggkwaactagcccagagggacaaactggcatcatcagttctgtgagtcctta

SEQ ID NO: 1249 - DNA, 668 bp, Rattus norvegicus
  misc_feature (649)..(649): n is a, c, g, or t
cggccgcttraaggttttcccatactcatacacagtcttcctgcgcgtgcgagccaggytcggaaagcacacttcccwytgggtgaagctggatccatttcaacactatgagaatgttactgttggacctccaaaaaacatctcggtgaccccagrgaaaggctccctcgtcatacacttctcccctccctttgatgtggtccaggaggcatcttttcagtattttgtccactactgggaaaagacagaaacccaaaaggttaaaggcccttacaagagcaactccattgtgctggatgatttgaagccattcagagtatattgtttacaaaccaaggcccaactgattttgaaaaacagaaatatcggaccgcacgggctcctgagcaatgtatcttgtcacgaaacaacagcggatgcctccaccagcctgcagcaagtcatcctgmtcstktkysgmatcttcatgttgctgctggcactgacgggagcctgcttcatcctgttcctcagataccaaarccgggtgaaatactggtttcaagctccaccagacatcccagaacaaataaaagagtatttaaaggacccagatcagctcatcctggaggccttggacaaggacggttcgccgaaggatgaggcctgngactccgtatcaatcattt

SEQ ID NO: 1250 - DNA, 739 bp, Rattus norvegicus
  misc_feature (100)..(101): n is a, c, g, or t
  misc_feature (710)..(710): n is a, c, g, or t
gtttctggaggaggcgaaggtcctgaggagcctgccctgcccagcctggaaggtgtcagcgaaaaacagtacaccatctacatagctcctgggggcggannattcacgrcrctgaakggctccctgaccttggagcttgtgaacgagaagttctggaaggtctccaggccgttagagctatgctatgccccgacgaaggacccaaaatgacgtcacagggacagccagaagatggggaccatggggtgctskttctgaagactctggtgatcggggcggcaccctgggagggggaaccctaggccccccaagccctcctggggctcccagtcctccagagccaggtggagagatcgagcttgtgttccggccccatcccctgcttgtggagaaaggagaatactgccagactaggtatgtgaagactactgggaatgccacagtggatcacctctccaagtacttggccctgcgcattgccctggagaggaggcagcagcaggaaaccgtagagcccggagggcctggcgggggtgcctcggacacagacggcttttatacaaagtatctatattgaactagtctatattgtacagcacgggacccgcgcccactactgccttttctatgggcccccactgcccaccgagccggtgacccggcggtcgaacaaggccccctccccgccctcctcccaacaacaaatttgntatttcttcttgaaaaaaaaaaaaaaaaa

SEQ ID NO: 1251 - DNA, 1151 bp, Rattus norvegicus
  misc_feature (1053)..(1053): n is a, c, g, or t
  misc_feature (1118)..(1118): n is a, c, g, or t
ttttttttttttttttttgkgbywgaraytaaygacttyattgacacaarcttcgawatggaaagtgktatcscawtgggatakttaagagtcagctchkgctttarmcacacatttaamaattgccagatgrwaattymaatggtgtggccagatctcaggccctccctctgmtcmgtctccactcaaascgagaatgtgttyctataytygcagagacaactttcccagatggtgaagaccagtgaactgagtraggcawmcwcaagagttgggaagagaagctggcctcagccchtggctgatagcwtcaactgggraagcagtgtgtcaaaacacgccctggagagcaagcccttgagctcgcakgactggacccgctgccaaccctgtggaagaactccagmccagcaatgcywytkwkkwywydkkwktcacggggcttgcttttgttttattagttaaattgtcakaacatkargttccctaaaagccctttgacaaggagtcaargtgagagaggttggggaaaactgtrgtctacayggcagaggaraavacatacatttgckatggatabaaagctacctttamcctaraavtgasattccactgcaatggttggtcctgtgccgcagggttcaggtcattctcctgagtctcaagcctccccatagagtcagatgtacggtcgtgactgccakactccaaccccctctgtgtctgttactgtagctggcacaagattggcagtgaattttaatacgaataaacgcacagtttacagttctgtctgtgttggagaaatcacttcagagacaggcrtgagcatctgcattttagcccgcttaggttacytctcttggactgtgtcgtawaaacatgtcmmcagactgctcttgctgctagawgtggagtctgttgawacagtttgacacaacttggactatacctttaataagcccaagcaagtgaacggtcctttcaaactcaggctgtgccatactttgcaggaggatgtgtttaggaatgtggggaaatggtccctatcanagcatggcttggctgtgttggctgcctgcttccaatacagtgccttcttggtctgatgtcagcangaatatcatcaacaggctctggctttcaaacta

SEQ ID NO: 1252 - DNA, 1086 bp, Rattus norvegicus
tttttttttttttttttaaactctagaaagattcatttttcataaggagagaacatgaggctagaaccaaggggcggtcatcagtttccttttcctgaggtcacatgacccagcccaggctgacctggagcttctggtcctcttgccatacttctggctgctgggactgcagtgtcgggccaccatgcaggactagattttcacttttcagttkwwkytywktkwtwttggggatctgttatctttttatttaatacttctatttcaatagcttcctcttttttttttcctccccattagaagaaacgtagaaataaagacgggcaaagaatggcctagaaattcagtgcagaaacacggtcggtcacatggatacgatgggacacagacaaaccactccgggaggacagattttgaaaatgagctcaaagtgccagagggagggacagggacgcctgtgaccccagcttcaagggcctcacacctcaccattaggcgagagtcaacactgatatgcagggacacaggctccctaggctgaaggggtgaggggggacagtgctgtgttcagttgagagctccccactggtctaaaacaagacttgctggcaggggtttgaactgtgttaggttacccaggctagtattccaaggaggttgtcagctcctggcctcagatagtgaatcccaacatggaggctcatgcttcccgacagcaggacacagaagggtagagagggatgggtttcacaggtgtgccaggactgccgggaggctgctgtccagcatgtagaggttgagctttttcacctagctcgatgttctgacagcttgcactgaactcccctaaggaatctgttgcccttctggatcyacwcwgcacccatcggcagtgtcctagtgaaacagcggccctccctcagtaaacattcagcgtggcgaaggcttagcacactcagagcttcaggaagcccaggttcgtgtcctcgtcactgtgcaccgacaggttttggcgctttaccggttgctggtgagcaccgctctctgggggatttgggggacgacactgtaaacatgacttcttgc

SEQ ID NO: 1253 - DNA, 766 bp, Rattus norvegicus
ttttttttttttttactctcacttgttcagcttcttgtttccttttcaagcagaggcaggagaggaaatacaccagaggcaaatgtgtgtgtgtgtgtgtgtgtgtgttgggtgtgcatttcaaacttgtagtgctaaaagcacagcatttcaagaaagcctctagttccctggcccggtaggaggtctctcccacccccagccccccaacactcccttcggatacaggtgccaaagaactttgtgaagaaatgaagaaccaatcgtctgggttaagaaagtggctctcagtattgcgacagtacaacattttttacaaggttgtttttctaccaccgtatttttaaagtatttttatgatcttcgtatactcacttcgcttgtattgtaaaaggagggtatatttgcacttatatatacttttacagtktgccaagatattttgatgtaagtttcttttttttttcaataaaacgtgtataatgmstmgtksykctagggaccctttcctctgcagactccctttcatggccacaccctccaggcaacattgcaactctaggctgccccccccaagttttataactgacatgatgtgaggtttctgttttgaataagccaggtcagtcctgatggtgggctttctcagcggagagggcacatctattatttttctctctctagttcactctcactttttctagtcaaacaaaaaccagaaggtgaaaggaacttcaagacaaaacagcaaaaaaaaaaaaaaaaa

SEQ ID NO: 1254 - DNA, 512 bp, Rattus norvegicus
tttttttttttttttttgcaatgcattcttctttattatagagattrcaagatgaaataaataaagatgtcaagatctacttacaaaaaaaaaaggaatgaaaacaggagaaaatataccctagcagcttaccatttaagtccacaggatttttagtgtagtgatccagtggttattaaaggactgtgtacgacgttgactcaagttaaatcgtatagtcagaattgctgcctactccacacagataaaatatttgattcaaatatatgaacttaaggatttggccaaattatagaaacaaatacatagaatctatttggttgtgtggctgatgaatttataaataaaccaagcataackataaaacagtcgaataataaatgaagttatacaaggttaatatgaacagcagaaggaatgtaataatgtgaagagrtctagttcttatgcaatttttctctcagttattaaaaagacagtttcatattagaaagcccctcgtgccgaattct

SEQ ID NO: 1255 - DNA, 603 bp, Rattus norvegicus
tttttttttttttttttwwwaagaaccatctgcacaatttaggcaaaacttggtacacagaaaaatgactgagttcttggccaggacaaccctctccaaaaagctttcaaagaaacaaaatgggaccctttaacccgccctgccccaccccaagccccacccacaaaaaaagttatcctagtaactgtgtctttcacattttataaatattaacctcttagacctgcaccttcttctttgtccacatackgtcacattacaaaaagagagaaatgtcaattaaatacattgttaatgttacwatattaactctgttctctgcttcagcaagcggcttcttacaccaacttttcacctctctgtgcctgccgccaacgtcgggtggcgcaatcgtcacaaccagcagacgcccacgggacagtggctcggaracgaggaatcctgragctgtaggaaaggcgctcttcccggtctgatgtgttcatccccaagcattcctascaccgatggtagagtckgaacagcaccagctgcaatgcagccttggtttatttttttgagaaaggaggaggagagaatgggaataaactggcagaaagtgta

SEQ ID NO: 1256 - DNA, 632 bp, Rattus norvegicus
tttttttttttttttttgttccttaaatcagtcttttaaaactaagctatccgaactacataacagttatgtatatatatatttatatattttttaaacgctacaaagactttaaacagctgttgataaaaattttggtagaatcatgaggtttctctcatctacatatttaaaaggagaaattgaaataagaatgggtcaaatattgaccaatgwwytyywtwwwywttaactcatgtagccacagtggcacaaaattaaagaacaagaaaaaaggctttccaagcgggggaagggcgaaccaagaaccagaaggaaacacttcaatcaagcaggggcacggaagacgaggaggcgaagctattctaaagacttggtcaccmkmgrcmgaggctggggttgcgtcccagccagcgagttgtgggaatgthaggaagaagttgatggttgtgcgagcgatgaggaagggaccatggrcggctgcaaagtggcargtggcasgtccagggccccgttgggacagagggcagaggccttgccgtgggcagcttcagccagcmskmgygcsggtggtggaggcatcatggacaggtgggccagaggatcaggcttcagggacagcgagcctcgtg

SEQ ID NO: 1257 - DNA, 499 bp, Rattus norvegicus
tttttttttttttttttwwtttttttccaaatgcaracaagtctttattatcataataaaaataagtctgttctgtattttacaawatatttcaaatatttccattatgaagcatgaattagtccaacatggtcaagaagtgtacaaccttcgccaaagacagaagcttctcgagctgcacttaggaggcacatctcgtgcagccgcacttcaccaccttctcgacctcgtccacaaatgaagatccatctgtgcattcgaaagagtatttccgcctcttgcttctcagaggtccacagcactgccccccagcacacccgcctctgcactccaagcgagatactttcttagtcgtttgacaggcagcgtaaccctgctgcttttggtaataatcccttatccgttcccctcgacaagaaatttctctgtcacagctgtccccggtgaatccactgctgcattcacaatagggctgcccgagcccagagagcctgcactt

SEQ ID NO: 1258 - DNA, 494 bp, Rattus norvegicus
gtggagcagccgccacgatgcagatttttgtgaagacccttacagggaagaccatcacgctcgaggttgaaccctcggacactatagaaaatgtaaaggccaagatccaggataaggaaggaattcctcctgatcagcagaggttgatctttgctggtaagcagttggaagatggccgtactttgtctgastacaacattcaaaaggagtccactctccatctcgtgctgagacttcgtggtggcgctaagaaaaggaagaagaagtcttacaccaccccaaagaagaacaagcataagagaaagaaggtcaagttggctgtgctgaaatactataaggtggatgaaaatggcaaaatcagccgacttcgtcgggaatgtccttctgatgaatgtggtgctggagttttcatgggtasyscttyracarrccakwaswswrgwagtkktgtmtgasttmmtrmwkmgaasraacctgaaaaaaaaaaaaaaaaa

SEQ ID NO: 1259 - DNA, 942 bp, Rattus norvegicus
taggctctcctcccagccccctcacctctgtttggtggactttgtgaatctctgaactgctctactttgacaagatgaccagattggagtaatcagaatgaaccccctctcctttgtaaggattatttttggaaaagcggtctctcctgttgaaagaccagattcttgaagaagtttgtgtggtagagaaggaaagcggcgacagctttgcagcaccttggcacagtcactcttcagctgtttaagcctgcccagccagccttccagaaggccacgcgacgctggtatgtataggagacagcagcagtgaaacggctcccaggagtggggtggctactgtgggtgggctgggaggragttgtmggygrggyagagkttttgtakkmasgvssagtgatgatgtwdtgatatytmtttcmtgctactgarryhygarkctgaatraaatgcccctatttytgatgatgtcgatattgtmmagsgacrgattcataargtaatgatcaaatcttcacttckgtgtgtatttctaagaaacagagccaactyttttrtatgtaarcaccmagagcgrcttacctggtastaaacccacagcccagccctccttccttcctcctgtcctggaattgtcgccactgtgtgatccggccctggctstgactgtggtcagcagatcccagtgaagggtttytcgtctttaggcttcatttctktgtctttttcctactctgttgccagcatttgctgatttytagtgtatactttgtagtctcagtcggtgttgaktccattccgtggaaataaaagtatgttgtacatactgcmmaaraawmwmmmwrmaagttaaggctccccctttactataagaatataaataaagacttaktttatcctwrwwaaaaaaaaaaaraaaaaaaaaactctagcggccgcaagctt

SEQ ID NO: 1260 - DNA, 1255 bp, Rattus norvegicus
tttttttttttttttttkdbwkkwwwtkwdkwwcactttattaakgtttatttctaataayaagaaacagaacatcagtcccttatttgtacaaaaatacctgaaagtttacaattaggttcacgagccaaagagctatatagcacagagtgaagcaaagcacgcgggataaaggttttgkctatcaattaacaccctctgcattccctgaaaacgtttacatgtcaggkcawtttccggtcactgcagtttacactatgayrkcacarrtstacgatgagctagtadcgccctcggaggsacagtgatcggacargctgtcadgtatttaagtgcagaaaggagamgacwwaacatcthrgcygakvcwywtwtttmttcaaagttkadgcaaacaaaaaamraaaaawgaammywyktkybkwwamkmwyaacacctaataatataacagagcctacgtattaaaacgctaaaaacccaaagcatttggcattttccttctcaacwtastccdbgtrryyacacggagttgttyttaagaaaarahhdtydhwkshrkhkattgcmwmgtsaaacaggctccaaacaaccctgagctgtccccttacattcatgtcaattaaawamaaaaawaaamstcrattgycsttcagtctccggttargggcggctgggtgcccgctaacctarggaccagctgtttctggtggaattcccagctacctgtgcaaaggctggtgagcgagctcggggtcactgaagtctgctgcacycwmggcsgrwkkcttgcagccttcaacaattcacttcagcaagggaagtacaaaatactacgtcaaaccagctacgtacaaaattgtgaaccagagtcaagcctatacttccgcttaaatagaatgcgtacttataaatatgagatacacatcttagctgtctactgtagaggcagaagagtaaagggttatgcactgtggggactggtctgtgtaaactggagaaagaaatcctagggctgtttgttatctgtttgtaaaggtctgacctcgaagtcagcggaaagaaatgaatatggtaaaactgaaatgtccactatttgtctcaaggggaagatcagtgggagcctgctgccaagtatgaacttgagaattctctcattgtcaactgaatgattaactagctgcgaaagaaagagaaatgcaattgagcgtttatgcgtaagaaaatgttttactaaaaaaaaaaaaaaaccctatg

SEQ ID NO: 1261 - DNA, 556 bp, Rattus norvegicus
tttttttttttttttttkttttwytggaatgacattgtacctttatttaaaawwwwwwttttttttttaaggactgcakcctataggacaaatgtaaaaactgttggattcacggaagctattcagtttcctctgacctggagcccagggtgacaacggcaagtctccgtgtmccarcagctggtctcacaggggcctgggtggcaggcgctgcttatacatgcccgccaaagccttggctgcactgtagatcatctggcggcgagacatgccagtgaaagccargtgccaatcagtccgggtgacgtttagcaagctcttttccaggacttcacmcacggttaccagaaggcctgaccacctcagattgtagtcctggggagtcaggctwtgtgsytsckgtmcmwrykccarmgryrycrkwstggcttgggtaawggskkcyaggcrratrscatgmacggggtctycwmsyrccaakcagccgatgtcaaaccacttgtcaggcaggagctcagcaatgaagttttccaccgacaccgcggtctgcttttca

SEQ ID NO: 1262 - DNA, 489 bp, Rattus norvegicus
tttttttttttttttttaaaygtagacaaaagtttatttacaccatacaacattttaaatattttatacacagctgcagcagaraaagctactcaragccttctagagaaaactgcaataataaagatgtgaaatatattattcatataaaagtgagattattactttattgcgtttaaagcaatgaagaatgtagctcaacaaacattcatttaatgacaaaaactttgcttttatattataaagtaaaaagtgtagtaatggccaaacagactgttataaactttaaaaactgcataaatatatacattgtgcttcatggtgaagttttcttaaaactaaaccacatgaagctgttacaacatgaatcgttgcttgaggtttatctagaaagattaccttacgaatccattccacgggtacttacaacacggggtggtgagaactgtacacttggccgtctctccactagcctgaccagtgagaaat

SEQ ID NO: 1263 - DNA, 457 bp, Rattus norvegicus
caagtatggcggccctcagcacattgtgggcagtcccttcaaagcaaaggtcacaggtccccggttgtctggaggccacagccttcacgaaacatccacagttctggtggagactgtgacaaagtcctcctcgagccgcggcgccagcaacagttccatccccaagttctcctcagatgccagcaaggtggtgacaaggggccccggcctgtcccaggcctttgtgggtcagaagaactccttcaccgtggactgcagcaaagcaggtaccaacatgatgatggtgggtgtkcacgggcccaagaccccctgcgaagaggtatatgtkaagcacatggggaaccgggtctacaatgtcacctacactgtcaaggagaaaggagactacatcctcattgtcaagtggggtgatgaaagtgtccctggaagccccttcaaggtcaatgtgccctgaatc

SEQ ID NO: 1264 - DNA, 1078 bp, Rattus norvegicus
ttatgtgcccaatgccaaccaggccgaccacgataaagatggtaaaggagacgcctgtgaccatgacgatgacaacgacggcatccctgatgacagagacaactgcaggctggtgcccaatcctgaccagaaggactctgatggtgatggccgaggcgatgcctgcaaagacgactttgaccatgacaatgtgccagacattgatgacatctgtcctgagaatgttgacatcagtgaaaccgatttccgccgattccagatgattcctctagatcccaaaggaacctcccaaaatgaccctaactgggttgkccgcmatmagggcaaagaacttgtccagactgtaaactgtgaccctggacttgctgtaggttatgatgagtttaatgccgtggacttcagtggtaccttcttcatcaacactgagagggrtgacgactatgcyggctttkktttssgsctamcagtcmagmagccgcttctamcgttgtgatgtggaaacaagtcmcccagtcctactgggacacmaaccccamaagggctcagggatacycaggcctgtctgtaaaggttgtaaactccaccactggmcccggmgascacctgcggratgmactgtggmacacmggaaacaccccyggccaggtgcgcmccctgtggcatgaccctcgtcacattggctggaaagakttcactgcatacagatggcgtctcagccacaggvcaaagaccggtttkatcagartggtgatgtatgamggaaagaaaatcatggctgactcaggacccatctatgacaaaacctacgctggcggtagactaggcctgttcgtcttctctcaagaaatggtgttcttctcggacatgaaatacgagtgccgagaactcctaatcaccaccccgmtcataaccagmctggcattgcaccttccgaaaccaagggctagagaaaaacccctccaggatcgcttctcctcgccttccctgcctctcttcttgcatagtgtgggcttctagagtctgtgacctgcctcaagaaaatgcagttttcaaaaccgtaggccagactcaagaactt

SEQ ID NO: 1265 - DNA, 416 bp, Rattus norvegicus
cgcaaacatccaggcggatttggaacacggatactgagagtcgatggaggtcggcatgagagcgtacagtcctcggtcaaagcgttcccgcaagatcgaccactttgttgcacagtaagccttggcagctttagtaaatttagcagcattgtagtctccccccattcgtaagacatcttcggtgcaatagtagaactcagagaagccatagaattcactgttctggaagtggattggaggctggtagactccattgagagaagtctgtgtctcattggttttgtccatgaaagactggagggtctctcgacacaggtcgaagtctcctgtcccccgaaggtacagggtttgcccattttgctggatctcatctttaaggtccagaggcaagcaggggtccagaaatggagcatcac

SEQ ID NO: 1266 - DNA, 476 bp, Rattus norvegicus
tcttttgcagtcagcctaaatagagccaaaggggcaattggatgccaaggtgcatagcccctcaggagctctggaggagtgctatgtcacasagattgaccaagataagtatgctgtgcgtttcatcccacgagasaatggcgtctacttgatcgatgtcaagttcaatggtactcacatccctggaagtcccttcaagattcsagttggggagcctggtcatggaggggacccaggcttastatccgcctatggagcaggcctggaaggtggtskcacaggggagcccagctgrgttkatkgtsaacacaagsratgcaggagcctgggtgccctttccggtgtacsaktratggcccctccagaggtgaagatggattgccaggagtkccctgagggctaccgtstcacctatacccccatggmacctggcagctacctcatctccatcaaagtatggtggccctatcacattg

SEQ ID NO: 1267 - DNA, 503 bp, Rattus norvegicus
agagtgcaggctgtgagagsagcrcassagmtcacagttctgggatgcagaccctggtgctactcctctggactggagccctgcttgggcacggcagcagccagaatgtccctgacagctctcaggattccccagcccctgacagcaccggggagcccgtagtggaggaggatgaccccttcttcaaggcccccgtgaacaagttggcagcagctgtttccaacttcggctacgatctctaccgcctgagatccggtgctgtctcaaccggcaacattctgckgtctcctctcagcgtggccasggccctctsggccctttccckgggagctgaacagcgaacagagtctgtcattcaccgggctctctactacgacttgatcaacaatcctgacatccacagcacctacaaggagctccttgccttctgttactgcccctgagaagaacttcaagagtgcctccagaattgtgtttgagaggaaacttcgagaaaatcagtt

SEQ ID NO: 1268 - DNA, 302 bp, Rattus norvegicus
tttcatctgcccaatggtggcgtggwgggggctgtactgggcaaaggaggcaagccgcagtttgggctcggtgagctgtcagcccacgccactccagcctttaccgctgtgctcacttccccgttccctgcctcgggcatgccagttaggtttgaccggactctctacaatggccacagcggctacaacccagccactggtatcttcacctgccccgtgggaggcgtctactactttgcttaccacgtgcatgtcaagggcaccaatgtgtgggtagccctgtacaagaacaacgtgcccgc

SEQ ID NO: 1269 - DNA, 457 bp, Rattus norvegicus
ccagcaccgagtctgccaactttcactgaagccagcttcaactttcactgaagccagccttctctctctctctccaccatgcagatctctgccgcgcttctgtgtgtgctgctcacagctgctgctttcaccgtgcacgtgtgggcccaaccagatgggaccaattcatccacttgctgctatgtcaagaaacaaaagattcccaagaggaatctcaagagttacagaaagatcaccagtagtcggtgtccctgggaagctgttatcttcaagaccaaaagggcatggaagtctgtgctgaagcccatcagaagtgggtcgaggaggccatagcatacttagacatgaaaacttcaactccaaagccctgaagacagatgcctgaacagaaaccaaccctgaagtcaagaagcaaaattcctcacccttgtcttttctgagaactgtgctgaaatgg

SEQ ID NO: 1270 - DNA, 1221 bp, Rattus norvegicus
  misc_feature (674)..(674): n is a, c, g, or t
  misc_feature (743)..(743): n is a, c, g, or t
  misc_feature (1063)..(1063): n is a, c, g, or t
cggtgctggtatttagagcgcagtcttgactggcggggtcgycttcgsatccgccgmattccggagaatcttctttcgtctgctcgctctctctcccgtcgtcctagcccgccgccgcctgctgagcttgccctctccccgcttgcagacatggctgacatcaagaacaaccccgaatattcttcgtttttcggtgtcatgggcgcctcgtccgccatggtcttcagcgccatgggagctgcctatggcacagccaagagtggcamtggcatcgcagccatgtcggtcatgaggccagagctgatcatkwagyccatcatcccagtggttatggytgggatcatcgccatctasggcytggkggktgcagtacttatcgctaactccctgactgakggcatcaccctctacaggagttttcttcaactgggtgctggcctgagtgtggggctgagtggcctggctgctggctttgcmattggcattgtcggagatgctggtgtccggggcactgyccagcagcytsgactgttcgtgggcatgakcctgatcctcatctttgcggaggtgcttggcctctacggwcksatcgtggccytaatcctytccacaaagtagtctttyccaccacmagtcacagratmgraykwrragwtcamcccysbwcabkscandmggmvharsmtgacacatgcacgggcagytgscccvtyagtagttggtcttgtraatgtgcagtgtsntagtgcccattgtytgwtgccccgcctwgmmmmkrctrccmcrtvmwrtggamrkywgsrsscdckcawmtyccachcasgyccbtgaccagtgacgatytcagcsthtggtcaccccacccatmgccmtrgmrygmgscttgtgtataagamtgaattagasttgtcatttttctvwwmavwvvawrwwwawwwmwaaamgrywygasstmtwmawrwrwmwrwrrarmagccctgtctcccaactstatagtamtcattaktagactgytsccytgwggggwtcctgttgctgmgactcmwkggrtrdarysascmynycmccagccctgaayagssgggggrgggtaragagttcctcagagctggcysssagctgtgtccwataaaagttctcgrwtgtgmamammaaaaamaaaaamammaaammmammmmmammmaacaccccacaacaaaacaaaaaccccacccaaacaa

SEQ ID NO: 1271 - DNA, 638 bp, Rattus norvegicus
tttttttttttttttttkyywkwywwkkwwwtgatkwywkyywkkkywkytyykwtgcyckgcatgtgtgaatagtcttcagggaccaacacctgatgggattgcagtggtaggctgagaacgttccttttccgccccttttcaaatggttagggtcacacarcacactggggtgggtcarggactctcagcaacctccttctcggggagtccaaggggcacatttgtcttctgagatgcttccttccccatcaatgatagacackakgggcctacacctgagaagagggagtgctcargaggctgggggctcctcadgtctgggacccgccttgtccccaaggccctgctgatgtttcctctgctccacttgatgacgaagccgtgtcaagaccwsctcagaggcctggatcaggctgtgctggaggatgtgcacccctttcagggataccacagccagctcccgcaggccatctccagtcaggtccacatgggccatggccaacagggggctggcaaacttcttctcaacagcaggcgaagcctgtggtggcttctgcaagccatggaacttttaccagaaagtctctgtcatatgagcccgccatatttcgggtgtagttctaggtcaacgtcga

SEQ ID NO: 1272 - DNA, 5240 bp, Rattus norvegicus
cctcccctggggaggttcgcgttcccgtggctcgcgcctgctgcccgccggcctcgagaacgcgctctctcggccgcggcgctcacagtctccgccacccaccagctccagcaccagcagcagcgccggcgccaccgcccaccttctgctgtcgccgccgccacaaccaccttcccctccgctgtcctcttctgtcctcgcctcctgtcgattatcaggctttgaagcagcatggctgaaccccgccaggagtttgacacaatggaagaccaggccggagattacactatgctccaagaccaagaaggagacatggaccatggcttaaaagctgaagaagcaggcatcggagacaccccgaacatggaggaccaagctgctgggcatgtgactcaagctcgagtggccggcgtaagcaaagacaggacaggaaatgacgagaagaaagcgaagggggccgatggcaaaacgggggcgaagatcgccacacctcggggagcagccactccgggccagaaaggcacatccaatgccaccaggatcccagccaagaccacacccagcccaaagactcctccaggatcaggtgaaccaccaaaatccggagaacgaagcggctacagcagccccggctcgcccggaacccctggcagtcgctcccgtaccccatccctaccaacgccgcccacccgagagcccaaaaagktggcagtggttcgcactccccctaagtcaccgtctgccagtaagagccgcctacagactgcccctgtgcccatgccagacctaaagaacgtcaggtccaagattggctccactgagaacctgaagcaccagccgggaggcggcaaggtgcagataattaataagaagctggatcttagcaacgtccagtccaagtgtggctcaaaggacaatatcaaacacktyccgggcggaggcagtgtgcaaatagtctacaagccagtggacctgagcaaggtgaccyccaagtgtggttccttagggaacatccatcacaagccaggaggtggccaggtagaagtaaaatcagmgaagctggacttcaaggatagagtccagtcgaagattggctcsttggataacatcacccatgtccctgraggagggaataagaagattgaaacccacaagctgaccttcagggagaatgccaaagccaagacagaccatggagcagaaatcgtgbacaagtcacctgtggtgtctggggacacatctccacggcacctcagcaacgtctcctccacgggcagcatcgacatggtggactctcyacagcttgccacgttagccgatgaagtgtccgcctctttggccaagcagggtttgtgatcaggcccctggggccgtcactgatcatggaragaararagagtkagagtgtggaaaaaaaaaaaaaaaraatgacctggcccctcaccctctgccctccccgctgctcctcatagacaggctgaccagcttgtcacctaacctgcttttgtggctcgggtttggctcgggacttcaaaatcagtgatgggaaaaagtaaatttcatctttccaaattgatttgtgggctagtaataaaatatttttaaggaaggaaaaaaaaaamamrwaaaaccatggccaaacaaaacccaacatttccttggcaattgttattgaccccgcccccccctctgagttttagagggtgaaggaggctttggatagaggctgcttctggggattggctgagggactagggcaactaattgcccacagccccatcttaggggcatcagggacagcggcagacatgaaagacttgggacttggtgtgtttgtggagccgtaaggcgtatgttaactttgtgtgggtttgagggaggactgtgatagtgaaggctgagagatgggtgggctgggagtcagaggagagaggtgaggaagacaggttgggagagggggcattgcgtccttgccaaggagcttgggaagcacaggtagccctggctgcagcagtcttagctagcacagatgcctgcctgagaaagcacagtggggtacagtgggtgtgtgtgccccttctgaagggcagcccatgggagaaggggtattgggcagaaggaaggtaggccccagaaggtggcaccttgtagattggttctctgaaggctgaccttgccatcccagggcactgctcccaccctccaggaggaggtctgagctgaggagcttccttttcgatctcacaggaaaacctgtgttactgagttctgaagtttggaactacagccatgattttggccaccatacagacctgggactttagggctaaccagttctttgtaaggacttgtgcctcttgcgggaacatctgcctgttctcaagcctggtcctctggcacttctgcagtggtgagggatgggggtggtattctgggatgtgggtcccaggcctcccatccctcgcacagccactgtatcccctctacctgtcctatcatgcccacgtctgccacgagagccagtcactgccgtccgtacatcacgtctcaccgtcctgagtgcccagcctcccaagcccaatccctggacccctgggtagttatggccaatctgctctacactaggggttggagtccagggaaggcaaagatttgggccttggtctctagtcctacgttgccagaatccaaccagtgtgcctcccacaaggaaccttacaaccttgtttggtttgctccatcaggcgtttggcgccatcgtggatggagtccgtgtgtgcctggagattaccctggacacctctgctttttttttttttactttagcggttgcctcctaggcctgactccttcccatgttgaactggaggcagccaagttaggtgtcaatgtcctggcatcagtatgaacagtcagtagtcccagggcagggccacacttctcccatcttctgcttccaccccagcttgtgattgctagcctcccagagctcagccgccattaagtccccatgcacgtaatcagcccttccataccccaatttggggaacataccccttgattgaaatgttttccctccagtcctatggaagcggtgctgcctgcctgctggagcagccagccatctcagagacgcagccctttctctcctgtccgcaccctgctgcgctgtagtcggattcgtctgtttgtctgggttcaccagagtgactatgatagtgaaaagaaaaagaaaaagaaaaaagaaaaaagaaaaaaaaaaaaggacgcatgttatcttgaaatatttgtcaaaaggttgtagcccaccgcagggattggagggcctgatattccttgtcttcttcgtgacttaggtccaggccggtcgagtgctaccctgctggacatcccatgttttgaagggtttcttcttcatctgggacccctgcagacactggattgtgacattggaggtctatacattggccaaggctgaagcacaggacccgttagaggcagcaggctccgactgtcagggagagcttgtggctggcctgtttctctgagtgaagatggtcctctctaatcacaacttcaagtcccacagcagccctggcagacatctaagaactcctgcatcacaagagaaaaggacactagtaccagcagggagagctgtggccctagaaattccatgactctccactactatccgtgggtcctttccaagccttgcctcgtcaccaagggcttgggatggactgccccactgatgaaagggacatctttggagacccccttggtttccaaggcgtcagccccctgaccttgcatgacctcctacagctgaaggatgaggcctttaaagattaggaacctcaggcccaggtcggccactttgggcttgggtacagttagggacgatgcggtagaaggaggtggccaacctttccatataagagttctgtgtgcccagagctaccctattgtgagctccccactgctgatggactttagctgtccttagaagtgaagagtccaacggaggaaaaggaagtgtggtttgatggtctgtggtcccttcatcatggttacctgttgtggttttctctgtatacccccatttacccatcctgcagttcctgtccttgaataggggtgggggtactctgccatatctcttgtaggcartcagcccccaagtcatagtttggagtgatctggtcagtgctaataggcagtttacaaggaattctggcttgttacttyagtgaggacaatcccccaaggccctggcacctgtcctgtctttycatggctctccactgcagagccaatgtctttgggtgggctagatagggtgtacaatttgcctggwwcctccaagctcttaatccactttatcaatagttccatttaaattgacttcaatataagagtgtatccatttgagattgcttgtgttgtggggtaaaggggggaggaggaacatgttaagataattgacatgggcaaggggaagtcttgaagtgtagcagttaaaccatcttgtagccccattcatgatgttgaccacttgctagagagaagaggtgccataaggctagaacctagaggcttggctgtccaccaacaggcaggcttttgcaaggcagaggcagccagctaggtccctgacttcccagccaggtrcagctctaagamctgctcttgcctgctgccttcttgtggtgtccagagcccwcagccaatgcctcctcaaaaccctkgyttccttccttctaatccactggcacatcakcrkcacbwssggattgacttcagatccacagcstacactactagcagtgggtaagaccacttcctttgtccttgtctgttctccagaaaagtgggcatgraggcggtgttaataactataggtctgtggctttatgagccttcaaacttctctctagcttctgaaagggttacttttgggcagtattgcagtctcaccctccgawggctgtagcctgtgcagttgctgtactgggcatgatckbcastgmkkgcaagtcccatgatttctwtggtgttttgagggtggggggagggacatgaatcatcttagcttagcttcctgtctgtgaatgtccatatagtgtactgtgttttaacaaacgatttacactgactgttgctgtacaagtgaatttggaaataaagttattactctgattaaamaaaaaaaaaaaaaaaaaaaaaaaaaaaaaaaa

SEQ ID NO: 1273 - DNA, 594 bp, Rattus norvegicus
ttttttttttttttwtttwwywwtcacawaaggaagcatttatttgaggttgaacatgaastcacacaaataaaaatttgtataaacacamatccacattgagtcataacacagggaaggaacawwsgacagattaacaaaggaactaattggcagctatgtacagtgggacacaattgtgtcatgtacactacaaagtctttacaaaataatcatcttaggtcaacagaagatcaagcaaccttcartgtcgycctgtmagatggtttctttacacctcctgctctsccascgkcctcctttagtasggctggyaattgytctggwgattgccaccccckcgggatgccttgccataagtgctctgctgaccgctgtagtctsywbrtscckgtccatatccatagctcccatagttataccccgtawagtcatagccgccatagccactatagctctcmtcrccataggcactattataatttccawatccttgatcataatagttattaaatccttggttccagttttggccctgacctcttccgcgtaccctatcaccatcttttccaccagccgcagcccctcttacac

SEQ ID NO: 1274 - DNA, 772 bp, Rattus norvegicus
ttttttttttttywtttkktyccaractagaatgctttattcaagagaakctggcttggcagttagacagtcccggaaragacaactggtgggctgcaagggccctccagsaattggttcgcttttcakarytgtrcacatggcccaracttgcartggycamagtcmatggrctagtactcctcatgcagcctgccctctgttcagccccgggccactctgcctgtgtcccaragaggggacavcttggtggtgctttgyaaagggtraagcgtgaacttctargctgacaggsaaagcccacaggcgagctctgtcctccakagccaaatatcccgtcctgatytccaggatacagtagactgggtcccctccacatgtcttcaatgcakccagggccggagctgctgtctgggtggaacagaggaccaargcargctctgggtctcctcytttcttctccagttccctggagacccarggcctctggggtgtggcttatccctagtacggccatgtccgtgtcttgcttcttcccaagccgaaggaagctcccacggaaccgtggctggcttcttcctttctctcacgttctgttttaaggcactgaattcctgagggtcttgtccttccatgccccttatcttggagggagcaagtcattcagcagggacgagttggctaataaatagagggtaggtaccagcagggagggttctgagagggtgacggtaataaatatatgagctgggtgtgggtctctcccctcgtg

SEQ ID NO: 1275 - DNA, 899 bp, Rattus norvegicus
aatgtataaaagtcaatgtcaagaatcatcataaataaataatgcaaactgaaatagcatgccaaacattcggaccttagtattttttggggggaaaaaatttaaaattagcaaaactgtaacagaatcagtaaaaataaacacagtcaactgtgacaccgaagtgaacctggtctcgagtttttttttttttttwwtagtrakswragccyttattattctattaataawcawccgaatggkcttttcccawcaaawcawcatcatttgtgagggcasaggttctgtttctggkgtacacattccarccttaactctcacggttggcctgctaccagcgcwccastasgcagtctccattctccacagaataaaactgtaatggctgcaggtcattttctagttcgatttctctgcccggcatcttggaactttcgtasgwcawcagaagttctgacacaggaaccttgagaagacgtgacagcagtccctttaccttttgaattgtcatggagtctggcaactgcttttctaatawttgttgttcavgttgatttgagcattttatcttcastgttagtagctgattttttagcatgaatgkctgcygwrttttgagctcctcatcttcaggtgchccatatttascwggacgtactgcagcagagaagctggtatcttggatgggccgagagaaactctgcacttggcctgtttctgtctggatctgggtgtccaccagcctttctccattcttttccaaaggcttttcgataatcaagctcagcaccacgcctttcctctggaagaatctgacacctgttcagggtcttcagctgaccaatcttggcaatgatgatctcctctgctttgtctcctttggtcaaagggtttctagc

SEQ ID NO: 1276 - DNA, 526 bp, Rattus norvegicus
gcctccatgatgcccgtrgctgaaggaggaaatcaaaccctaacatcagccgctgttcggtgtgtgaggctccggccgtggccattgctgtccacagccaagatgtctctataccccactgccccgctgggtggcggagtttgtggatcggatattcattcctcatgcacactgcagctggggacgaaggcggtggccagtcactggtgtcgccaggcagctgtctggaggacttccgtgcracaccatttatcgagtgtaacgsgggccgtgggacctgccattacttcgctaacaagtacagcttctggctgaccacaattcctgagcagaacttccagagcacaccatccgctgamacgctcaaggccggcctcatccgcacccacatcagccgctgccaagtgtgcatgaagaatctgtgagccgtccaccctgccggccagcagctgtgtggggaggccactttggtgcttatccttttgtatttgtttcaattttgtttgagacattgtctcacttttca

SEQ ID NO: 1277 - DNA, 653 bp, Rattus norvegicus
tttttttttttttttwtaaatataaacttccatatgatttattgttgttccttgtacacaagaaacagtaatatacaagttacactgctttagaatgtaaaatggataaaatgtgtacaaaaaagcacgttcctagaacacagggcattggcaaatagtcaaacctgggaagtaaaaagcaaaaccaaaaacaaaaccaaagaaacaaactaaaacaaaacaagaaaamccaacatttcttcaattcagtgtgcaacatataaaaaacagaaatactaactctacaggcagtatttcctgataaattatttaaatagcatatctacatagtctgagatctctattccaatggcaatgagaaaataatttataaaaataaaagcaatggtgtacaagatgatagaacaaaaccagaactttgargagttgtatttaacatttcaaagctatttctgtattgggatcattctctgcaaaggatttttatgctatgtacaacactgactttttagacacgacagtagttttaagtttattgacacttaaactctttcttcttgatycaaaatyctktrctcagtcacacaacaaatgaggtaatatttgtatataagttccacctttgtctcttttgggaaaatgaaataaaaagt

SEQ ID NO: 1278 - DNA, 1071 bp, Rattus norvegicus
ttttttttttttttttttagaggaaactcgagttgctttatttagcttccaatttctgggaggctcaagaattgtaagtattctggacaacagaggaaaataaggctgtgcttacagaggtctttctkyywtwytytttytttaggatcgctattttattgttgccctttccgttacatgaatgcacacatcaggtgytaaagrtacaatacattctacaactgagcaccactttctgtaactcaacaggcaaaggatcacactgaacatcagcatctggcagtatttttgggaaaaaaaaagtgactaaaatgggtttaaattgattaacacymtyrwrycacatctaatatttgatactacatgattcaatacagctatacgatacaattatacaaaatgtgttaacatcaaagaatacaaccaaaattaagatagcaaacaaaacctatataacttttttttgtmcaggaaaaatacttttgaagtatgcatgtaactgcccattcttttaaagaaaatctaccgcaagcaagtcgtcaccctccagaaagtcacacagcattactaagcatatccccaaaaaagtgtacaatatgcacacttggaaaatacaaaattaaaammatygtrmssaaywsktgagcttcgtatttataagaatgtgaaaagaagtcccatttttagcactgttgtataaagaattgtcttttgatgcgaagttcatgaattgtcctcctgttgggaccacactttacaaaaacaccttgtttttgaaacgagattacagagcaagatagagcatcttagcaatgtcatcttattaaagtatttttttaaatttttactactttatcaaaacatgtcccttaagtgtgtaggattcatttttaaaattcttcctagaaataatatacaaaggagaggcatatttattcccaatcacactcctgaagaggcttcccggggtcgagaaggtcttctctcttcttttcactggttgtttttggctttagcgtgtgttaagatgtgagatttcaggttagttgactgagcaaacttcttattaca

SEQ ID NO: 1279 - DNA, 681 bp, Rattus norvegicus
cggccgcggggcccggcggcccggtcctgccagtgagtgcggcgctggcctccgcatagtctcctgcgaccatagcgccaccgcttttatggccccgtcgagagctgcagcagcagcggctggtgaagcgccgccaagactccagggtctttccggaccagatccagactcccgacgtgatgcccaccaccaggcacatgaagtacttgagcatgagcacccagtactcgggtttggcgcgtggctggccagcgtccgaccccggacacgcgcasgtgagggctgcctcccagctctcccgatagtgctgttcatacaggtagcaggccaccacgatgctggctggcaccgtgtasagcagagtgaagatgccaatgcggatcatgagcttctctagcttgtccgtcttagtgccaccctgcttgatgacgctccggatgcggaagagtgacacgaagcstgccagaagsaagagcgtgcccaccracaggtwcagcaccagtgggcccaagacaaagcctygtagcgagttcaggttttggttgcccacatarcagatgccagccactgggtctccgtccacggagctcagtgccagcgccgtaatggacttgacgctggggatgagccagkcagcaaggtgkaagtactgtgcatagcstgcgatggcttccctcgtgc

SEQ ID NO: 1280 - DNA, 655 bp, Rattus norvegicus
tttttttttttttttttgcatttcacaagcatttattcagcacattgggatgtttagggatccaggttttaggaaataactcaactcagtaattgcccctttccttggggggctgtgcgcccgggaacaacatgaagagaaaattcagtatttcctgggcagaccarcaggtcsaaagtggttggggtctttgccamtccggccccacttgttggcaaactggtcagctcttgagtcctctgctccgtgtcctgttaatctctgaataccctctctggcatcactgatgactttagcagcccaggctcccccaggaccccttcgggcggcatcatagttcccccgagcatggaagtatttgtctgagtttttccagttggcctttctcatgtccgagtaggcgcgccmcwygtstttggtcccttgcccagcttccttcataaactggaaccgtcttttgctgtcaactcccaggatcaagaggcaaaaaacgatggcaatggaagacttcatcctgcttgtgctgtgaactcctgctgggaccccaggtgagtggcctctgtcccttgctgaggagatctggctggagacgtctatatgtactgccactgcccgtatggagcaatccccttttggtcttacgcaatcccccttg

SEQ ID NO: 1281 - DNA, 629 bp, Rattus norvegicus
tttttttttttttttttccttccttccttcctcccttccttccttccttcttttytttwyyttytttygagactgaagcttggtctagtgtccagagtgaaaatcktgyggcaatcmtcmtgcmtgagtgcggggattacaggcatgagccrtcatgcctggcccagagtcgtctttactgcacagagagctgattatttaggagtccactgaagtgttcgaacttctgttctgtctcctcactgaaggctccacctacgtgacaattgtacatccagatgcggtagccatcatagcggctcctgcacttcatgatgttgttagagaaatctgattctggcacctcatagttggggttaatgacaacctgaaacaggtagtctccagggggcacatcggtgatgtctatccactggcagtcaatgtcatgacgatacatgtcccagcagcccatggtgatgccttgttctccgaagttggsacactcrtaactcttctgaatgtcwccctcacactcagtgtcctccaagcagaagctggccttgtggccctcagccaccttggtgccgytgacctcgtgccgaattcttggcctcgagggccaaattccctatagtgagtcggattaa

SEQ ID NO: 1282 - DNA, 610 bp, Rattus norvegicus
cccaagaccatattttcttttattgctttgaaactcaaaggaaatacctttcccagggattccttggctggtaaaaaaaaaaaaaaaatgctttcataaggaccacagtctccaagttgttctggcaccattaggagaaaggctgtcactctcaggtggagagcatgaaggtgaggggtggcagtgggcaccattgctccgagtgggccagatttccaggtctacacccattactactgtctcactatgcagtaaaggacatactcatgtattgggtgggcggtggaagaaatctggtcaacaaaaacatatagtgggggaagcaagaatactggccacagtgggattagatttcttgccctgacatagcagcaggactttctatatcccagaattcagtttacgactgttctgagctcagcatttgttggtctctgatcattctcatactcaacgctatctgcctcacagccaagcgtcagggggcaaacaggattatatcagtacaggaggacatccatcatggtctcaggggtggagtcaggtcccatagacctgaacaaacccattaaacacgttcaaatatcctgagcccagcccatccacctga

SEQ ID NO: 1283 - DNA, 660 bp, Rattus norvegicus
aaagggaataagcttgcggccgcttccatttttttttttttttttttttttttttkkyttttaggtgtttaagttttattttctttaaattakcctttgaaatgtgtgtttacattaccttccagarraataactttaaaaggtacagtcctcattttgkccaaggaakaataaagaacagaggtgcctgctattarcagcagtaggttatgaccaagagcaaggtttcaccctcttccttgctattggacaagatgagttctgtgatgtcgcatgaggtgtgagttagaaataaaagctgcaccacactttgcacattcatagggcttctctccggtgtgggttcgctggtggacagtgaggcttgacctctgtctgaaggccttcccacactcgttacaagaataaggtttttycccattatggattctttgatgaatcagtaggtatgagctacaagtgaaggccttcccacactcattacatacataagggagmtctsswstatgaattctctggtggacaataaggcaagagagctgactgaaggcttttccacattcgctgcagtcgtaaggtttctctgcagtgtgaattctctggtgcacaatgaggtgagaaaaacaactgaaggctttcccacactctttacactcatac

SEQ ID NO: 1284 - DNA, 967 bp, Rattus norvegicus
  misc_feature (203)..(203): n is a, c, g, or t
tttttttttttttktythhwkbtgytggcagkgatatttattatactgacagatgggagttatatacagcagtgacaagatgcccctmaccctaccarggtcttgtgggggaaaggaggaggtwttgacakaaggcacatggkggtarccccaggaggccadaagtaaaggtaaragggtgtabtgtgtcctggggaacccanaggttgaaacadaggctcaktcaragaragccttgggccacacagcaagystgwgscagctggtcccraragcttgtgctggtcacttgaggctacagcakgacacaggggcacctcccatccttcttcctaggggcactgggtgggctasgagggagttcttgctcctggtatttccggacagtccgcaccagctgctcaaatgcctcatcgacatttagacgcagtttggctgaggcctcaaagtaagtcatatggtgggaagcactaaaggaggaggcctctgatcgaaggacctggcgctgtgtctccagatctgccttgttcccaaccagcacaatggggaagtcatcgcggkccttgaccctgaggatctgagtgaagagctygcttacttcaatgaaactctgcctgwcgttaatggcaaacwccagcaagaagccattgccagcacgcgatgtactgctcccgcatggcgccgaattcctcttgccccrcagtgtmcaggatgtccagccgtgcagggatgccgtccwccgtgcagatctttgtgtaggaatcctcaatggtggggtcatagtcagacacaaagtaggactggatgaactggatggtcagcgcgctcttgcccacgccgccrccgcctacgaccaccagcttgtgagtctcgccgggcggggggtccmtgggtcmmggccccccgccccggggccgcccccgcccagtcccgcswcgysgccccgctgctcatgttcgccatccgc

SEQ ID NO: 1285 - DNA, 546 bp, Rattus norvegicus
ttttwttttttttttttkdwwyyttaaaacysccgtcttctgctttattgacaggtaaattgttcaaaaatgttctcacaattcaataattacaaagactcagacttacattaaaaaagtaaaaaccagaacccccagsaggtgcctgccccggcacaaagcckgggagggtggacggggcadgcarcargtgctgggwrksmcayrsakgcttggccwgsagtgsymcwrsysksagtgccaacttggscaagcgctcaccccgaatctcgtccccgagtgcgccarcggggaagggaggcctgtccaggacgaggacaagacatgtctgctgccacagttagtcgcaagccttcatgggtakggccacagacctgatctcagcccargacacarasggatgaggttcaacacacgtggsattcccgggscgtggkgctgccgatgtgcargartgtggggcagtcgtgtgactgactcggccactaagcacagaggctccatgcagggtgggggagggcggatkggrkaksrkyktggatctca

SEQ ID NO: 1286 - DNA, 1262 bp, Rattus norvegicus
  misc_feature (66)..(66): n is a, c, g, or t
  misc_feature (1236)..(1236): n is a, c, g, or t
  misc_feature (1246)..(1246): n is a, c, g, or t
  misc_feature (1250)..(1252): n is a, c, g, or t
  misc_feature (1256)..(1256): n is a, c, g, or t
  misc_feature (1258)..(1258): n is a, c, g, or t
aatttcatcacacaagtgaactgtattctccaatggcagacctcctttcaagggtcaccacaaacntgatataacagggttccccacatagacccagcacagtctgaccactgatgtggaccatggggtctgtctgttgagtctattactactgtggaaaccctttgctaagattttatgtaaaaaaaacaaacaaacaaacaaacaaaaaccaacggcttccctttgcacggatgtcccgtggggcagggcactgatactgttctatagtttttaaagatgtcaataagctggtatggggacttgagctattcattatccacgggcagtgtggcacaggacaaagttgccaatgctgccgccgcccctgtggggagctggggccttggtctgtggaagtggaaatcgaaaagggagaagcggggaagggagaggaaaccacaacctttatctttaaacctgggctaactgcaactttgagtaaatctgggcaagaaaagaaatgccattcttttgaagtagactaaagcagtgatttttwwwwywwwkywwkhwkwdywagaacatctgaattttttaatccttctttacaggttacctagaccacttttgatyaagaaaactgkasaaagttagtaactgccacaagcggacgccagttggtggcacgtgtcaatttccacagagtcytgctttgcggggtgtctgaatgcactgctmggggyststgctyaaacttgctggaatcactcgtkgcagattttagtccacaggtcgcttktccccatatttctttgkraactcttcagcattcttacagaatwtkkyacggkcytyagwgymktcttcagctaggtcagcccggagtgggtgctcavgctgagggtcgttcaccagtgctatgakggactggattacttggkcagtcttggtggccggcttycagttttccgcactaattacgggcagacagacmtgccccttckcgkcratgttagggtsstagatctttgttttaaatgtgatcttgggtggcttgaagggatactctgctgggaagttgatctcaattctgaaggctcccttatcatatggagggttgtcaggaacaataagcccttgccaagtcaataaattagcttcatcaacctggatgttacggaagtttttcattccacatttgcggatctcttcaagctccttcawcagcctcctgctggccgccatsytgscgantctttggtanccannntgtncnactg

SEQ ID NO: 1287 - DNA, 745 bp, Rattus norvegicus
ttttttttkkyhhkwkdkyyyttacawaaacgtgcttagtttattcatgatacagtcttcaaattacctcatttaaaaataacagctaacaaaatccatttcaaaatacgatgataatttgaaagcaggsacaacattaaagtgaagactgccttactattaaattatctttttaaaggttttagctcaattctgggtgaaccacgatggtctctttatgtttcgttcaacaatcctcttgccctgatccttttctgatggtttctctcctgtgtacagtaccacagtctcgatggaaggagctttgaaaggtcccccwtcttgagcccatatctgttgtctgattttagktgbckcttggcttactttctcatagcawtagscwcaaaggacgtgtttctgcttcaggtgaccacattcagggcaaatgtctatattgktcttaattttaataagcttgtgagggtttcttctcytacatcggttaacttcgatggtgcgtctgtytttgggagctgccatccwaaagatactatctaaaaagctggaattctctttatttttactggtatcatatgctagctccgtgagggtggatgggctctggactgctagtgctggtgcccwctgaggactggcaaarccactccatgtctgcttcagttgccgttgcagcagctcccagcacctatgtagcggtccggaacgcactggccacgggagcgacagcagcagcagcctcgtg

SEQ ID NO: 1288 - DNA, 723 bp, Rattus norvegicus
ttttttttttttttttttwyycctgggaraagtttatkgagagtagccagcaaccatcccatccccagcgcagscagccatggttctgacccckaraggccggggcggtgatggraacagtccttgacctyacagccgggcaraggtatgtggggaccgctggwctttcctcagagctwmtscaagkrcgaaccagggacaaagccacgttgtccgtttcgttycacagtccaccagccatcctccccttccaggatgactgccaggatgtctcccgcagaaatgtccagctcatcagaattctgtgccgtgtagtcataragcgcccggtagtcctgggctgctgagttaaggttcccctgggttgcmtgcacttcratggatgcatagaccaattctttctgctcagaggtgggagccagagtctctgtggaagcggcaggagcttgagaaggtgtggtcttgggacttccatgtagcagcccagagaacctctttatcacaccacaggaggtctggacgatagggctgccagtcagtggggtgacctcccggtcgtagtagttctgataaggcacgggagctgggggctctctgccagtgctcttggactggatgaagccattgatatcaccttccacatcacagccctcaagtgtcagccggacttyctcatagagctcatcgtccttgacacactgcatggagagctggttcctcgtg

SEQ ID NO: 1289 - DNA, 679 bp, Rattus norvegicus
tttttttttttttttttkkkttttwywttckaatacagractttattaggaaaaattgtasgtgmavatacatcakttttcattgatatgacttcaamgtrkaaatgrsctytcawataactgkcatatwttaaraacgagaataagaaagsacacactgcgtmtaggaagytgccttctcctggaccattttcacattatctgggasacagamctgaaacaaartacagtattcaccacatgmaacactgaaaccatcgctgcgtaracactgcaagctctgcggaggaatgacttctgtgaggaagcccctggtgacgccgccgagataatcacccatgagaagataaacagaactcgatggagaggcctaaaggcctcakgccaagtcccacagaggaatgcagccttttgctctccaaacccyycstsaaagccgaccargcaatgaatcakaggggtctgccacctcggctgcacttccttcccactgtccccgakagcargcagcacagtgtaaacacarggtacaaatctgggtttcaacacaaagcagactgtatgtctccaacccccttttccctatccagatgcaaaggctggtgacagagggactggctgcctggcaggttacttggcgcccaagggaattcgggcagcaccaggatcatcagggaca

SEQ ID NO: 1290 - DNA, 1135 bp, Rattus norvegicus
tttttttttttttttttcawtcttacaaaagcagctttagattaataccgcattagcgtagggtggcaggcaagggttgggggctaaggaagagaccaccagtccaggatgactgatgcagactgcttagcaggacacctccatggacttgggcccgkywttsttyyctgtkkywycsgagctggggrtgatgttcagacgggcatcctcactggtatgggagcggctacgggacccctcacttgtgtgtgagcgacttcggggcccctcgmtggtawgggagcggctacgggtgccctccagggatgtgacactggagccagaggctgtgcgsswcygcmkcaggcgagtcatgctggcagaaggcatgtatcccatgccctgcacaaagtacttgaaggcctctgcaagcttggcaggctgagagatctgaggaaggcctccacagtctgccatcttgagtagggtggtcyycsyygggtccaatttggaattgcattccaccacagcatccacggcaggagagttgtctccaaccacgagcagagcagggcactgcagggtgacagtgtgggttccargcatyggccgytcaatctccaggtctctccggctgttgtaggcgctgatgaacaggtgcaggttgctcgggttcatgtcgttgaggatgtgctggcggtacgtgtgcaccacctccacrttgytgtgtatctcctccttgccgaagaggtgggacaccaccatgtctggcagggcttgggtccatcctgagatyttggaggcagcccagtccatccagccttcagcacarggattcacattcatgagcacaaggccctycaccatytcadggttgttgagtgcaaarcgggtcaggatgtadgcgccagctcctgtccccatgccaatgacactcttaagcccaaacttgtgaaggactccaggaagcatttcagccaactgatccattgagggatacatgtaccccactgggaaggaaggggcaccatcctgttggccaggggcatccacatggcagaccgcaaaatgttgtgtgatctcttgcatatcctcagagttgaagagagggttgtagcaggtcttgtggttcatgccgatgtcgtgatacgtgagc

SEQ ID NO: 1291 - DNA, 732 bp, Rattus norvegicus
tttttttttttttttttgcytgattttaattcctcaakyttagttttctawcaattkyaaagttctccyttgccsagcaccccaaacagctgtagacrtsagccggtgtccacgcktcagakagctcgccgaggaamacgggtggctggtgtctgtaccaacgccagctgcgagttttgtccaacaggctcgctgttasgaaagactgaaacccgagctcatcaccctacttttacagcaattcaatggtatctgttactcaggatccaaatgtcttaaaagctgaaatcggggcaaagtgccgagggaccccaaggtggcttgtgacagatccagtcaagaggacagcaaaacaaacttgggcaccgttcatccaaggacacgtgttagttgtctaggaagggtgtggccgcattcttcggtgtgtgcgctggaagtcctgttcacaatatttacaacgagaagaaaacyttccactgctcatgatgtaacttacaggaaaaaaaatcatgcttcttttcatatcacatgatggcggcaagacgaggtcacatgcttgtcyaacactgtctggttaaagataaattctctggagacaaagcatcagcaactgagtggaaggccaggcgtgggcttctttagtgtagctactcgatcctcaggaaacagtgacagactccccgcgtcccgggctggtagggtgtctctgtgacaggccgcttctgcctcgtg

SEQ ID NO: 1292 - DNA, 791 bp, Rattus norvegicus
tttttttttttttttttwykwktttytgaaacacattttaatcaataaataggaatatttgtcaaccacttattaggaggggaaaacaggaatgtagaaagaattccaaagaaaacgacaccttgaaaagaggaaagtgccaagacctttgcstaaagtgtcatttgtagaaccagaggtaaccgaagattattcagaaaaamaacyttggaatatwtgacagaattccagatgtatttgaagtacaaaaacattattctgaatacaacgtgggatgggttactcttcagcacctgtgtggatgatcgggcaagtcagtgaataatgaatgaatacattgtarcacgccggaggacatggttatttaattcacatttggggccaagtttaccccccaccactacccctgccttgctatccgttcctctgctctacamcacaagggagcacggttcccarggcctcactagctggctttcargcaccctggaatggtaargcgctggtggatatgggcacaggcctggggaggtctkggggtatcttggtgcctgactcagttctggcttggtttccatgtcagacagtggcttgtcctgggcatggctgcaatcaccatatccctytatggttttagcttctagaaggcygccctgccacacttttttctgatgacaagggaactgaactcttcagccccatggtggcaggtgaggtaacagatttttactgcttggctctcttaattacccacttaagtgaattccctgtgtcgacccttctgcctcgtg

SEQ ID NO: 1293 - DNA, 666 bp, Rattus norvegicus
gttgtaaaacgacggccagtgccaagctaaaattaaccctcactaaagggaataagcttgcggccgcacaacttttttttttttttttttttttkkycagcgtggtaatacatttawtasttcakagctasaawragcaagagtccaatagctttttgrgtaaagactgtcttatggctgakgtctggtctgccctcctgactctackcaatttgccctgctattaasgcacktgrkaawkgggaagcagggatgtctcawmccaarcagcctcacrgtcctgaaggcagccagcaatgtcccctcctgktcccctcagccactgctcagcatggagagttggcagggcaggagctccacaggacagaaaagtggccccycaaatgctggtgtcaggcakacctcatgggggctgctcctakgagcgttgctttggatcaaggtgtgcarggatccatgtckaggaagacactggatataaggsyttacggcctgaaggccacagctssagkmtgmmcstskctwggwgagkgcwwgwrsctsgwggatggaagcagggtctcaagagttccctaccaaaagaagagccgactatcgtacaggggaagagcccgagtcctcctagctccacttcagggaagttaatgcttctgcttaagcacctcc

SEQ ID NO: 1294 - DNA, 572 bp, Rattus norvegicus
tgacaatccgtgacgcccagaatgaggatgaggctgatwattactgtcactcaacatatagtgatgataaacttcgaggtactcggtaaaggaaccwkwttswctrtcctgcagaccaacccaaggytacgccctcagtcaccctgttcccaccttcctctgaagagctcaagastgacaaggctacactggtgtgtatggtgacagatttctaccctggtgttatgacagtggtctggaaggcagatggtacccctatcactcagggtgtggagactacccagcctttcawacagaacaacaagtacatggctaccagctacctgcttttgacagcaaaagcatgggagactcatagcaattacagctgccaggtcactcacgaagagaacactgtggagaagagtttgtcycgtgctgagtgttcctaggtcatctgactttcatcttacccacagagacttggatcagaaacatgtccaagtgtacctatactgcttttgcctaccatagcccttctccctattctcaaaatgcacaataaaatgtctattcacaammaaaaaaaaaaa

SEQ ID NO: 1295 - DNA, 629 bp, Rattus norvegicus
tttttttttttttttttcaaaatgcatattggtaactagattttaaaccaaaaattcctcacataataaatacattttatgcacattaacttcaattttacttcagaaagctatttacaatataaataattataaatggggacactttgcaagawatcattgacatagctattatttcctacttacattccaaagtaaaagttcagattacaagtttatactataakatccctaaaaactatacattgcaagagggtatttcgaaccagtatcttctctcacaaatataatcctttttatatyatgtcaatcaaaaaacaagcataaaatattttakctttcttgaagtgcctctggtttctttctttctgaaatctgttcctttgaaaagaagttacaattactgtaaaaaaaatttgtccatgccaatttcatttcttttgaaatgtaaacacatcacaattattgggtaraaattgactagatatgtctaagattarcagattaggacaaagtcctcttacctaggttatgaaggcaagttcacacagcaaatctcagtacataaaactacaatgcttagattaaaattatcaattagagtttcttgtgtgaaacatcatacattc

SEQ ID NO: 1296 - DNA, 672 bp, Rattus norvegicus
tttttttttttttttgtgtttttctctgttgttttcctcatgccagatttattacttatttattcattactgattagcataggagcacatgcacctgcacatacataggtaagttacataagcccataatggaatacagacttttcctaaatgcaaaataaatctaggtagagagcaatgttctgaaaggmtgtgtctcgggtcctgggtaactaacctggggtaaatgttcccttccttccatcagtcactctgaaagctgatggcccaactgttcagtgctggttgcctaatccctcatctcacacctgtacaggccttgctatgacttcccaggagcccagaaagggaatctaaagcctactattcagcttgtataaagtgctgcatctttcagtaagctggatagttatatagccatgaagagatgattaaagcagctcctgtcatctccagttaagcagcaactaaaaatatcttrgaaatctggaaaaaatttgtgtcataaaaatgatartagtaattatgagagtaaaagtttgaattggattcaaatagtccaacaacggttataatagacatttatttaaagtgaggcatgtgtagagcaaatgattcttaagttgtgattcaggttgaaacaatgtcataaaatagggtgagaccctcgtg

SEQ ID NO: 1297 - DNA, 634 bp, Rattus norvegicus
  misc_feature (455)..(455): n is a, c, g, or t
tttttttttttttttkkkkkkgktttaacaraagtttattatgatgtacaaaggactagctattcagggcgtggtgggagatggcacaccaragaacccaggaactcacaaaggatcaggatgcaacggcaccatcacgtcccccctgcccgtggycccactgtgccaccctgtctggccttgccgatttcttaactttacctattggccaagcaccttttcktacagcttttggctccttgastttcttctgctcctgtgtgtatcttcctcatccaccttcttggktcttggtttgctcatgccaccttcaaggstgggcatgacactgctgtcccctctcccaattattattaaccccttscygaaytgttctgaggcaccatgtwsaaaacgcccatagkacaggttctcacgtttcatttgccacaagttgtaccgtgagcacaccttanagcagcrgcagttgscccctggcttccttgacaatggcataaaaatttctgadaaaccttcagggctctgagaccaaggccttgcctgggtcgcccctaaggaataattttttcctttcatgttaacaaaacactgtacaaaagaagaaatgcccttttactcgtaaaatatcagctct

SEQ ID NO: 1298 - DNA, 681 bp, Rattus norvegicus
ttttttttttttttttttccakktaacamyctacacttgakcctttattgckttctgatmdggtcaggggttacagaaggarcatcagaggtcgctctccccgtadagggcagaggagaaggcagtgtartccasrgccccggggacactgcctgggcctgagtatgggggcattctcttgatgcagtactgggcctgatycggargyagctctcgacgaagttcctctgccaagatgtaaggcttatcaraagccasaatccggaaggaggcgatgacctgttctgcartgtccgtgtctgcggtctctctagtcatgaagtcaatgaaggactggraggtgactgtgccttgtccgttggggtcaaccagagtcataattcgggsamactcagcttcacccaagtcatagcccatggaaatgaggcaggcyctsrwrtcckmatkatccatcaggccattcttcctcctgtcaaagtggttgaaggaggctctgaactcattcatctgctcctgggtgatgcccttggcatctcttgtcaggatctgggtctccacctcattgatggttctggcgatagttgtgagcagcaactcccatccgacacggatatgctccatggtgtagttggtgtgcttgttgtcgaagaccagggcttcctggatgagatggtggtcgcc

SEQ ID NO: 1299 - DNA, 466 bp, Rattus norvegicus
tttttttttttttttttywwkwtgacaagaytaaagtcaagtttattgggagataaggacatgttgtgaccactagtgtgtcccttagggtctgcaggtgtcygtttctcaatgccctctcaatggttcattcctggatgtaraggttgctgggggcggtagggtcatccstgkgccgtgtttccaccactacaggcctcggggagcagagcasacggaaggtgagkgtgggatctctcagctcctgcagcggytgttccgagtctggagcccacacctgaactccgtgcttccagaaggcctggagtcgatctccaaccattgccacagcctcraccgcttytgtcatggggatctcaggggtgcgaagcccgggagctggtgccccctccggggtcactagcttcagagagccatccatcaacaccatcaccatgtcttcctttacttggatcacctgcactgg

SEQ ID NO: 1300 - DNA, 609 bp, Rattus norvegicus
ttwwwtttttttttttttyaaaggtccaaagttttattgttttgaatacattctccagcagccccctcatgtcccaccccaccctscattcccaatacaraataaggcttgaccaaaaccctccagcccacccctggggccccagctgggaggcagagaggggcttccagtttggttttgagggacccccccttcctgtcccttgacccacctgcccatgggccaracctaggagcagctgggagtgggtgtgaagggactggactagtactggggtggtgtagggaacaggcacttgtagagatttgtggcccataggcggcacccctcaccttcctctgccccccacccyamcaccccccacagaatttttggttwataaaatytgtccctcctgcctytgctgcaaccttatggggtataaraaacccaggcactcacagcccytggaggggcaaggaaggcaggkttagggctgggggaggggcacgagggggggagaggcaggacgaggtaagaggcagagaaragggagggagacaaggcyytmstkcctacgattgtaataaaaaagttcctgggttttaaggccaaagcctctgttcaaac

SEQ ID NO: 1301 - DNA, 635 bp, Rattus norvegicus
cacgaggccgcctcacgccccacgccaggtcaagatctggttccaaaaccatcgctmcaagatgaaacgtgcccgggcctgagaaaggtatggaggtgacsccctctaccccctcgccgcsccgtgtggcagtgccggtcttggtcagggaccggcaaaccgtgccacgccgcctcaaagcccaggacctggcagctgccaccttccaggccaggcatccccttttccgcctaccagcgcgccagtccgctgcagcacatgccaataccaaccgcccagtaccagcttcggcccagcaccccccccagtaccccgaccagcacaccccctggtccaggcccagcagtggacttggtgagcgccgcccctccaagactggaggccttaggccctggccccacccccagcggcggcggtggcgaggaggacctcgatccttaccacggttgytattattattattataattattatagagtcggactctcggctcggttgaggaggcaccgggaggttgcctgtgcctcctcgagtggcagattccatcgactctgccccamcgctctctcctttgaacttttggagagggtagaactctaagccgtgtttacagaatgtttgtgcagcttcgcttc

SEQ ID NO: 1302 - DNA, 580 bp, Rattus norvegicus
cgaggctctgcccaatgccctggcctacctcttgattgtcggtctgtggatgcccaagcccctggagaggcctgatgtaaatgttatccatgtggcctccccaccagctctggagaagatcctgcaaagcaccagcagggaagtacctgtgtaggagatgaggtgtccatggctgatgtgtgccttagcgccccaagtggcaaatgctgaaaggttcaaggtggacctaagcccctaccctaccatcagtcacatcaacaaggcactgctggccttagaggctttccaagtgtctcacccctgtcgacagccagataccaccggcccgagcctgaggaccttagctcccaaaccatgccctcactggtaccagggaggggagtagggctcagatgttgggtgtcttagggttttactgctgtgaagagacaccaagaccatggcaactctaaaagaggaaaacatttaattggggtgggcttacagtttcagaggttcagtctattatcatcatggtgggagcatggtagcatccaggcacacatggtgttggagaggtaactgagagttcacatctgga

SEQ ID NO: 1303 - DNA, 348 bp, Rattus norvegicus
tcttttattttatttttttaatttttbgccgctttccatcattctgatgtkggrgcggatgactcaraaaagggtgcacagactaatgtcatctattgagggtggagaatgacctgtagccgagaacgctattttkagatgtatgatattcaattcattcacttgattactttggtctggttgcagcgcaactgtatawactgtataacctaracggrttattttcattgtccttattgcagtgatttataattagggcatgtttaataaattgacttcccgttaaccagtcatttgactgaraaaaaaaaaataaagttcttttwaatggaaaaaaaaaaaaaaaaa

SEQ ID NO: 1304 - DNA, 965 bp, Rattus norvegicus
cataagcttgykgccgcagctccggagcagcctgaacaagaccacggaaggttgaaggataatcttctwktwccagcactttgaatgagaatttgtttctstgccacaaactgatttttttttttaaattttatttttctggtggaggagttgaaacaaacctaccttttgtggcatcgcagctatgcagcttgaaattcaagtagcactaaattttattatttcctatttgtacaataagcttcccaggagacgtgtcaacatttttggtgaagaacttgaaagacttcttaaacagaaatatgaagggcattggtatcctgagaagccatacaaaggctcagggtttagatgcatacacgtagggkagaaggtggacccggtgatcgagcaagcgtccaaagagagtggtctggacattgacgatgttcgtggcaatctgccgcaggatctgagcgtgtggatcgacccgtttgaggtttcctaccaaatcggtgagaagggaccagtgaargtgctgtacgtagatgacagtaatgagaacgggtgtgagctggataaggagatcaagaacagctttaaccctgaggcccaggttttcatgcccataagcgacccagcctcctctgtgtccagctcgccgtcgcctccctttggccattctgctgccgtcagccccaccttcatgccccggtccactyagcctttaacctttaccactgccacttttgctgccaccaagtttggctccaccaaaatgaagaacagtggccgtagcagcaaggtagcacgcacttctcccatcagcctgggcgtgaatgtcaatgtgaacgacctcctgaagcagaaagccatctcttcctcaatgcactctctgtacgggctgggcctgggcagccagcagcagcctcagccgcagccgcagcagccgccatcccagccacccccgcccgaggcctttagcc

SEQ ID NO: 1305 - DNA, 835 bp, Rattus norvegicus
ttttttctattttttttttctggaaaaaaaattactgcatttacctattggttagaacaggaaggcaatctaccacaactccaaggtcttctatcctgtgagtacaagacagataccattgcttagtgtccttagtcattcacattataatctccatcctcctctcgaggcatttgatattcaacaaataacttcagcatttatcatgaggcaagtactgaggacacaaaggggaaacagagacagggcttgctttccagtgcctgagtgggtgtaggaggcatagaaaacgacatgggggatgaagcacatctttttcaagaaggtactcagtgaggcatggagtaggcatcactcagtaaggtagtacttcagaggcttaaatacgatgaggagggtgatgcttaagattcccagagaggatttttttcaaatggcaggtttcccatttttagttttacagataagaatagaattgtaaccagaaaaagcaacagcttgtttaatctgcaagttttctgtaccctcattacacttaaactggtgatggatgtgatttaaactatagagtctctatggacactaaatacaatgtttacatcttaaccaataaaaacttcctcaaaagacacttttcatatctcattaaaaaattacccatgttaaacagaaacaaaaacatcatactcacctcactaaataagctacaagttcactaacacttctctttctccagaaagtcaaagctacattcaatctcaaattcctgctgaatagaacttgggccattgtctcatggtcctgagaaacctgaaaggcaatcatctaatctgtt

SEQ ID NO: 1306 - DNA, 557 bp, Rattus norvegicus
ttttttttttttttttttgaatttcagaatttcctttattcaaagacgcccgcccatgtttaacaggtgaagccaractytcaccagtaatatgtttatgactacaaaaattgaattrtactcaragtcccgccrccagwtcatctgaacttgaaatcagttaatagccctmttgccttactccasaagagcctcctgggttcctgggtttttacccactccaattccttgcaaaccaraagccagaatggacctcascaccctsaagcagtttgttcctcaaaatcaacaaatgtatggaggggaaaacacctsaaacaatgctgttkggtcgggaggwacattasggagcattgggtgtarccgggctaawaraggtgtgcctastttttaattactgaaaacactacccgtsccagcatctytttytcttgcactgtyttctttcaggtggcattaacttagaaataaagccagcctagtcattgggcacagaaaaaaatattctcagggaaggggcagcaacccagggaagttgtactcctttttgttgctat

SEQ ID NO: 1307 - DNA, 587 bp, Rattus norvegicus
gagcatttttaaaaatttatttacaaaattgtgtacaacacgatggagtaacatttaraataccatatatattcattcatatataaacagacttttataatacaatgacacttcgcctttttgaaaaattttcttgtatttaaaatcwcsmrrcgtcttmatacattctttttctcarataaaactgcggagagtgaaccttcaaaaaaaatgaaagttcaragctctaaatctactgaattgctttttcttttcttaaaaaaataaaaaccccaaaaggaaagtcaatgatttttatacaaatatgtacaaagaatttccctcccacccccacagtactgaragcacaggcgccgtcggggkgcatttttggaaattcggttawcagttttacctgtacggaaagttattcccagcggaagcgagttgagtttgctccgccagtttaggtgagcgagggggatggaggccgctgttggtcgtggttggggagtcgggggcgggttgtagagtccaggattgggtagagggaccaggaacagggctgatggaccawsatcagaawggkmrsmcaacctggaagctca

SEQ ID NO: 1308 - DNA, 746 bp, Rattus norvegicus
ttttttttttttttttttgagaaatagaaagctattttattaacacgctttacatttacagttcattagctaatcaacatcaacatgcaaaaataagcgctagatacaaacctctacaatatggttttgtgtgaattacaatggttcatgtctggaaaacccgtcagtacttactttagctgaactatcagtttccgtaatgaaaagcatgtacactctaggactacggaaccacctggcaaggcctctgcagaaactcagtccagtggctttcccgtgaatacattstaragagagwtwmstttgagaggtgcaagaacctgcagaggcatcagtcgacttatgttacaaaatcctaccaaccaaacgctgttctcaagcacagacttagtaaatctcacttcctctttttctaagagtatttgtcgttgctcactgatctttggtcgcaagaaacaaatgccgaggcaggctggggtcaggggtcaagggtcagggcaggagggcatggctcccacccaccacagcctctggccaagggcgtgcacatggcaacgcaggcctacatgatgtacactttctcagcttgggagaagtggaagacttctttggttcttgggcaaacaactttatcatcttgacgaatagaaagcagagaattgtagccatagacatagccattaggcagcatcatgggtgggttgttctcgttcatcacgtcaccagagatcttgcagaccaggcgc

SEQ ID NO: 1309 - DNA, 933 bp, Rattus norvegicus
acattcggaaccacccatttaattcttccctggaagaccccagctcccgctactaccaagaactgaagaggaacatttccggattgtttctgcaggtttttaacggagactttctgggggtctctactatcaagttcargtcargctcggtggtggtagcatcgactatgattttccgggagggcactttcagwgcctctgaagtgaagtcacagctcgtacaacatamsaaggakgcagctgactataatctgactatctcggaagtyaatgtgaatgagatgcagttyccttcctctgcccagtcttggcctggggtaccasgtwggggcattgccctgctggtactggwctgtattttggtggctyyggwcatcgkctatctcattgccctggcaktgtgccagtgccgcmgaaagagctatgggcagctggacctctttmcaacccgggacacctaccatcctatgagtgaatatyctacctaccacactcacggacgctatgtgcccyctgccactaccaaacgtagcccctatgaagaggtttcgacaggcaatggcagtagcggtctctcttacaccaacccgsctgtggcaaccacttcggccaacttgtaggagcaagtcaccctacccactcgggcagtggcagttggctccagcagtccactccctcagtggtcgctgccagacccctgcactctgatctggrctggtgagccaggactcctgatmggctgatcacasccttcstcagaggctttgtcaccacgttagcmtsgtgaagcccagccctgccstgagggacactggggtagtgrtggytstcagaargactgrcmtagaaaacmtggagatgggacccaaatgtggmtgaataaaagatggcttcctrttarwwawrmmaaaaammaaaaaaaaaaaaaaaaaa

SEQ ID NO: 1310 - DNA, 599 bp, Rattus norvegicus
cacattaacaaaaatactaaaaattcattaaaaatggagcctgagggaaggaccccaaccactactggagctcgcccaagaaggggactgggaattaagcagaaaggctgggccacatccagtgtataagcagttcctccaggtgactcagtagcgtccaaatatgttggtactgggctgtggggctggaactggggctgggactggggttgaggttggggaggtgctgcctgctgctgctgctggtgtggctgctgctgttgtggttgttgctgctgttgttgctgctgctgttgctgctgttgttgctgctgctgctgctgttgctgctgttgccttaggatctgctgttgctgttgttgctgtcggatgtggtactgctgttgttgctgttgttgctgttrctgctgttgctgctgttgctgttgttgctrctgmtgttgctgctgctgstgttgttggctcatgctgcatcctttacytgsaatgcccttccttttccacatctctacaatacccaatcatagttatctcaaaggccagcttgaatccatgagtccttctccagtgactctgatctatactggtagtagcccacc

SEQ ID NO: 1311 - DNA, 800 bp, Rattus norvegicus
ggccattataaatgctttggagatacagtgcttttttgtccmcswgragaaactatacgttttatatctaaactgttaatttgtttgaagggttctttttttttttttaagtcctattgaatgtggattcagttctaaraataacaatgtgtacatttctgaaatgacctcaagatggcctccttgtcctactgatgatcttgtrgtttaagatgctatttctggagatagataaaagtgtctaaragtgctgkgagtgtgtacagctgctccagggaagtgaactaaattaacatytgagatttatgttccatatactgtcatttcatttctatctcttaatgcatatttaatcaaacatgaaaaactcaagggagtctatttttgtatccacgygggaaacaggactttgcaaatgggtttttgtctatgtaataratgaaaattwcwacctaatgctcttgatcatatcmctatatgctgtgaacctaaataattgtccttaaccaaatacamtgtatatttaaaatccatagaataaaaacaggggcatgaamcaatgtttgtactgaatacttatgtaggtaacctcataaagttttcttatggaattcaacattcatwagaaacatagcattgatatgcccacttyttatttttatgaccatctttgaatttcattaaagtgcatttatcttaaatgtcttaaatgttatttgcctttatcaagacataaccatgttgataaccataataaactttcagttactaccttccttgcttaaaaaaaaaaaaaaaaa

SEQ ID NO: 1312 - DNA, 895 bp, Rattus norvegicus
ataaggactatctatagttgttgaaggggkytggaaaacgyygygtatmswtagctkgtatctctacaagtttgagagtttccccattaaatgttatcagtatacagaggttttaatttaaaaaaaaacaagtaagggtaattatttgtatttgaaaaacaaactccarakvcamcccatytagaawtaratattatatatgtgywataaatatatctatatagtacaaatagacatgtgtgatgcatatataccatgttatatatgtawatctgtgtgtacactctgattctgtaatatgtgcacaactagatgtgtgtgatattgacatcttcagggtctgcactgtggacttccctggagatcgtgaccactttamaaacagaagttyttttgaaacttcacttactactctgctttaagaaagacccacttcgtagctgaattatatgttctttyctagagaaatagtyagcaactagtctgttcaagcctttcaaaacaaaagtwaagggaaaaaaattaccttcaagctggcgatgtwtttaaattgcggttttctgactgtgggtctmgsctgtgtgtttctcctttatgtagcgccttttacagaatactgttytgtttgtgytggtgaaagcacaagagttttagatgtacatagycaggagaagaaaagcaaaacagagtttacagatcgctttgctgcataggataattgctgtgtcyttcttctmccatccgtagaaaggaaggatgaagctcactctgtaggttcyttstggtcaacaatgtmttytgttgtttgtgcatagcaatgagytrttcctgstytatsmkttgyacaattgtaaaataaattaamttccttgkttttcaaaaaaaaaaaaaaara

SEQ ID NO: 1313 - DNA, 379 bp, Rattus norvegicus
gaactcgtaagacatttttttaataagtgctctgtaaggaattgtgtgaggacctaaggagaaagattgagacaagtatcaaacagcacaaaagatatytgtcccaaagtcctgcttgtastgaggcaactaagtccattaacccaatgtccaaaaaatactgacagttaatatgatggaccattagggatcccagaaagtttaagagacatttctaactactatgtgtgtgtgtgtgtgtgtgtgtgtgtgtgtgtratggtggyggctgykatggtgctraggctgtggctggcsgggcttctcctccattgaaagcggctgggactccctggctgaggctgcgggctgctgcaccgtcaggatctgagactgcttc

SEQ ID NO: 1314 - DNA, 600 bp, Rattus norvegicus
actttaraatttgcytgctaggcacaattgctgggctcarataacaacggcctggaaaggcgtgctcttaccagtttattatctccatctccctctgccytaaacttagtgacttgtatcagccagcccctgccaacatccttggctatccscctgttgcggaggccacaggccctagctgccggaagaccttacatgactgttaccttccgcccagcaattggctcccagccttytttattgacacatcaagaaccaattagggaactagacctgagtttgagaacctccccttacaraaaggctgggtagaaagcggagtcactaacacctttcagagaagaacggaggtgggaagactgatacagagatgcccggggacgcagatgggccccagaccatggaccgcaagcatagaggtaaatctcctcctggccctggtattacgggcgctctacttgttaccccacagcgctgtcttcaaatacacagggcctgaaaggaagcggctggacttcatgtaggcagagatcttctcaagggtctcaaatcgagccatgaagtccttcagatttggaaaggcgtccaggcacttgagcc

SEQ ID NO: 1315 - DNA, 678 bp, Rattus norvegicus
cttcaacaaatgttttattgtccttaaaatgatgattgtccttgtttcacaaaggaaaaaaatcacaaccaaaccagtctgatagtagcaacatagattgtttttaaactgcaaatccaaggacatctttcttaaaaccagtaaggcactgccactagtgataaagatgttattacatgaaacaatcatgcagttttccataatttaaggtgtactgtgacattatgttaaaaaatatcaaaggcagtggctaccaaatgataagtaactttagaaatactggtggaataaacatatcagaaaagaagatcttctaagagatgcaagttaattcaaaggtcagtagcccaaagcacaaaacctgtcttcccatgctctgagatatttgataagcaattctaagccttcccattcctcttggcatgagcaccctctgtctggtgagccttggttccyagtttcgtcttagtgatgctccagggctaaataagataaaatttatgggctatgctttaagctccattgaggtaaggcactaaataagctcagggataatttatgaattctcattttacagcagtcgtgtaccaatccatctcataaaagggagtgagtcaggaataggaggcctatgcttagtgaaaaactcagcaaactttggacaatggtagtaaggcc

SEQ ID NO: 1316 - DNA, 697 bp, Rattus norvegicus
gggaaggtgttcaaggcccgcgacctgaagaacggcggccgcttcgtggctctgaagcgcgtgcgagtgcagaccggagaggagggcatgccgctctccaccatccgcgaggtggcggtgctgaggcacctggagacctttgagcaccccaacgtggtcaggttgtttgacgtgtgcacagtgtcacggacagacagagaaactaaacttacgctagtgtttgagcatgttgatcaagacttgaccacttacttggataaagttccagaacccggtgtgcccacagagaccataaaggatatgatgtttcagcttctccgaggtctggacttyctccattctcacagagtagtgmatcgtgacctgaagccacagaacattctggtgaccagcagtggacaaataaaactggctgacttcggccttgcccgcatctacagttttcagatggcccttacctcggtggtcgtcacgctgtggtaccgagccccggaagtcctgctccagtccagctacsccamccccgtggacctctggagtgttggctgcatctttgcagaactgtttcgcagaaagcctctttttcgtggaagttcagacgtggatcaactagggaaaatcttggacgtcatcggactcccaggagaagaagactggcctagggatgttgctcttcccagacaggcttttcactcca

SEQ ID NO: 1317 - DNA, 475 bp, Rattus norvegicus
aggaaaaaaaaatattttaatggtcttttgcaacctcttttcaaggtgaggcccyttstaggtagaacccctttgtcaacgcttcttatcgctcaagatggtctcaatccagtggaagtccatcgccttgaaagctaccaggaccaagagcgtgtctgggttgttttctatcttagggtcgaagtgggccgactcaggatagaagagacgtatggtggtcttggagcccacgtctccctcataaccggctacaggagcattgtttaatctgatgaccacatcgtacttgttgataacacctcccagtgagctgttctttaaccggtgcccattccccaccacaacacacygacgacactcgakgctctgtatgctctcgggtatagagtagctggtgatggccaacacccggagaagaagatcttcacttcctttagtcccaaagggcaactcataggcggatggtgtctttacc

SEQ ID NO: 1318 - DNA, 873 bp, Rattus norvegicus
tttttttttttttttywgacagacaacaaatactttattgagagctattctgtgctcactacttgataggkgttaaatgaraatttctggaaccccacaagaaaggacataraagacacaaaaatgctaatcccttgkggcattgaaactggatatgctcttttcaaaacatgtggagcttcatagttgcaaggcacagaagacatttgagttcatttgagtaagtaacttatgtttctccttggtgcatgaagctcttggagtttggttccacttatccatgttttgagttaaatataaagctgccgccaactaacgataccttaaatttccataagctatataatgattcsaagtarycttgaagcacttacaatcctcaaatgttgctccataatatatttaaaagcaagaaaaatgttaacccgtcttagaagtggaaggcatagatgacagtaaaatcccagaagtctgggaatgggagctaagatcagtcttcctggtgaggagtttcctatattcatctcgtacctggcggttgagcagacagtgaatgaggaagatgaaggccccctgaaggctgttgatagtggtgaacaggtatgccattatgcttgccaagggaccaatctggaaaatgcccagcacccaggagcaacccaagatgaaaatctgggcaatggccttgaaggtcagcaacctggaagataatatttacaaattgaattgtcttgggagctggtatggtctccatgaagacatggcactgtctaaagatgatatcatatgggtgataaaaacagtaaaaattgctgtctcaactcctacaggcaattaaaatgctatccacaaatacacatgtattcaaagatc

SEQ ID NO: 1319 - DNA, 1025 bp, Rattus norvegicus
tttttttttttttttttaagycaaaaatgtttattgtaaaaaaagagacctcsaaagktttttttttaaaaaggacatkgatttcaaaagtattctggttgaatataggcatggctataaaccacacctcacttttatacagagkkcattcagtcwtataaaaataaacacaaatttacatcaattcatcaactacagaattcattaaaacaggcacttggaggggcattgttattgyatccgtcatatgaagtttcaaaagtctgagtacattactgaatgtctaagaaactcttttgaacattttcattactttgtcttataaaacactaagattctttttttwaaagaaagacatgggacacgcaccaggaatgtwtgaagywwgtccttccctcctcttccaaggcacacatggcaaaaatgaaacaaaataagaatactttaatacattctcttgtgttctgwtctttttcctgcttttttcctcktkataatatagttttaaagcattgtasgtaatccagaaaaggctttcattcaccggtgacaaccaggcatcagacaagtaaggaagtaaacttggagtactttgtaaggcacctgagatagtgtctggcagattctcttactcttggaaacactattacaattctattaagaagtaatactgttccttttggttgaaatggtttggcagcagtgtaaacctctgtattctttcttagtaagaaaagatgtgatgtgcttttcacttcatctttaaaaagaaagattcttatgtttcaatttagctgtcagtaaataaattttaaacttcacatagaatagattaactttaagtacatagattctgttctgtagggtgtgtgtgtgtatgtgtgtgtgtgtgtgtgtgtgtccagttcgctgtagttgggcttcttggaggcgttgaaatgtttcttgacgaggaaggagcgcggcatggtggcggcgggcgggcacggcggataacggtcccggcggcggtcctatcgcatcgc

SEQ ID NO: 1320 - DNA, 706 bp, Rattus norvegicus
tgtgtgaggtcggcaacacttaatgaaagactgaactgggcctgaaggaggctctcactggccctaatgaagcaacaggtgacagatgggaccatccaagactttgagtagaggttgagagaggggcccggaggacagtccccagctggatctctgcatcatctaccctacaggtggctgaccagatgacactgctgcagaactgctggagtgagctgctggtgctggaccacatctaccgccaggwcsagkacggcamggragacagcatcttgctggtcactggacaggaggtgactgaactggtctcaggcctctcgaggctggctcrggatmccccaawttccaaattcagggacatgcactagccagacttctctgtgtcctggggccttttgaggagccactgcgtggaacggccagtggaggttcttctaggagataacagtggaattggactccccaaaataaggcagagttggtcagctggtattaaaatggcgggtgacagtctatgctgtcacacacgtggaagctgcaggatcaaggactctgagaaggggttcagagtagggccaagggactgtggggtagcaagtgtgagagatgaaatgcgtgatcccaccaaggccagagacccacagccccaagacaagaagtgcccttataaacccctgcagccctgaaataaattttgcaattagtt

SEQ ID NO: 1321 - DNA, 1277 bp, Rattus norvegicus
cacgaggttgcctggcccaggtgctattctgtgacacagtagtgcctgggcccttttatggtaagagacaggtttcttggtgtgggtgcarctgagctggatagtgtatgtttcaaacacctttyctgtgttctctccccacctccagagtgtctktwyttattcagctgtgtgtttggggcagaacaaaaaaataatgggaccactatgcaagctgcgaagattctaaggtgcacacctgattcttaggcagatgccatagtgagatatgttgctttggttctctatccaatgctgtgaccgggaccygcagcgaggttttcggacaccgtggtttcttgcgtttctttcaaaccagcagtaaaaaatggttttttctgagagagactggagtgccaccaccaaagatagaggagagaagccaagcttggggrcagcaagcatgccagwgaacctgaccactgtcatgagtcatgtgggtggccacatgtccgtgaacctggccagttggcacactgatggtgagggtacaaggaggctagacctcktyccacaaaatttytggaaraattakggttgkctcagccaatgtttcctasctggaatmctgtscatgtatgtgttcctgaagcccaggaaatacacccctttagtgcctgcttttgatggtagttatagaaaagaccggctgatttggacctgagttgcccaatcttaagtacaaatagaaaactgagactatgctgggtgtgttggtgcacgcctttaatcccggcactcgggaggcagagacagtctcagatctctctgagttcaaagtcagcctggtatagtaagtgaattccaggacagccagggctacacagaaactctgtcttggaaaaccaaaaaagaaaactgagaatattagagattgwgcattttctcagaaagcargaagaaaacaccactctgatgggaaaagggaggcaaggcccttgagacttttcattgaaattgctgtactcacataattytggaagcaaatgatgactgcaatcaactgtgagaactgytggtttctctgtagtttaattgtctaatgttgatagcgtgccctttgtatgtagtttgagtgtatatgtgtgtgggtgctgatagcgtgccctttgtatgtagtttgagtgtatatgtgtgtgggtgctgataattttgtattttgtggggagtggaaaaggcaagcaatcggaactgttctctaagatgcatttttatgaattttattaaagagttttgtt

SEQ ID NO: 1322 - DNA, 745 bp, Rattus norvegicus
aaagctagaataggaatctattatataatatggggatctttaacagattttactggtaaggcatccgaaagagaatatatcattttaaataaataagaagtgtatataccatgattatcatacatagagatgaaatgacccagatcgattttaggaaattccccatttccctgctttttattgcggtcataaaccataacacagatctgtttcattgttatcactagaacgtccagctagtggcagccacatgaaccggactaccatatttctgtmctttttcaaaattacattggagctgtcatcaaagtacaggaccgagatggcatttagtttggttggagcacmacagggcttgggaacatggtcaggaaacatcaggtgtaccagagtatggactatggcatggttagtggcattcatgtgggcgttaagtggaaaagaacattctccatcgcaataaaatgcggcatatccttctggtgctatgatccagtcctgccatcccagatsgcggaaactcacatagagstcgtgcttcttgcaagcttgtttctgttcactggtattataatcwccagcactgggaatcctggaggggtcctsatgagagctggatttattgcggttttggttttkccgtktgctggckgctstcmcagatcgaagaagaacctcacttgccttgaagaaggccaccatgaacggctgctttgaatgaggcccgtgtcttcccacccttgtg

SEQ ID NO: 1323 - DNA, 595 bp, Rattus norvegicus
tttttttttttttttttaaagactcaaacatgctttaattatacaaaattgcgcattctggttcctagggttctgaactgaaagggctgggtcttcggggttgtccctgattgtccgtgccagttaaaggtgggttactggcatggaggcaccascaagggaagtattatatatatggagtgggagagcctggagatgggtagtgggggaaggagggtattasctccccttggarcctargatcactctgagggacagtacmcggtragggggcctccggtctgcawtgggaasaggtgtaactgccargcatgtaggctgtcgaatagttggggggctggtacccaaagcccctactcccttgggtagttgtgtaccccggcccccagtgkgggcctccacawaccgggccacctcctccctggmtraaatgraccgacccggtgcccgggtttttgctttttcgccggggtcggtacttgtagtcggggtagtcatgraggtggcgggcamgaaracgcttagcctcctccacgaagggtctyttctyttcatcgtccmscagcttccactgagcgcccaagcgctcctcgtg

SEQ ID NO: 1324 - DNA, 729 bp, Rattus norvegicus
tttttttttttttttttkyhbyyyyhybbyysmytttggccaaactttttatttagtattttgtagttgtttaacacacacttaaatggtcttactcggggagggggaagggaggttcttgtagattcccaaggaaaggtcagaaaagcaaaatatggccagcatccatttgctttttttgaggggggggggtttctgggtaaatagtacatgcctasgcatctgatctcagcttggwttgtytgtytgaatatatatatactgcgaacattgaratttcagttggaagacaccctgaaatcmtcacaccccaycaaccctctctaatggctagcttgtctgcacaggcagggtgattcaactctcaatggagaccaaaggacatctagatggctaaatgtttgtggaagatcttggggttgcttgcctcatttgctgggaaaaatcaggaagtggccttcagggacacttttacttggaaaattacaacactagtaacaagtcacggcttacacatctaacatttgcttgttgaaagcaactcataatagcaaataaaattaaacatgtcttactttttccctcacaagaacataaaaattattaaggggaacaggaaattttaaaaaggtaacacaatttttcctttagtagtccttgggtagtttatgacagaaagtttccatttttttgtttgtttctttgaatggggattgttggtccctcgtg

SEQ ID NO: 1325 - DNA, 560 bp, Rattus norvegicus
ttttttttttttttttttgagtgcaaagtcaagcttttatggcattttctgtccttggtattttttttttcaagcaagaccatgttttcctaaggggctacaatttcagtgagtctcttcttccggccccaacaaacacccctggctgctaacgttacaracttgttmcagcttattggtgctgatgtccaatagccttgggggacctgccttcggctctccacaaggctattttgtttcacaaagtaactcttcaacttacgctttactataaagaaaatgtatccgattctaggctaagtttccaagcgatcctggctcctaggagccaccaacaggagtacccgggaaggccacgcagcaraacttcctcaggcattttcacagccatttagaaagatgtcttcagcgaactcgtccaaattagctacaaacgcttggcaggatggacacgttgtgtctgtgggccaatattcaatccaggtggaggaatctagagggtatatatacttgaaactgaaattgtgtttgatctgcagagcctctttgcccatgattaa

SEQ ID NO: 1326 - DNA, 446 bp, Rattus norvegicus
tttttttttttttttttaaaatgtaaacgtggttttatttaatgcctttatccattgttgccgagcacccytcccttcccagggtccccccctctcctacaacacaaratggsggsrtrdggsacccacrstgkccgcatgacatcaradaggggcttggragasaaaaggtaagcaacaggcttccccawagccccacacsgcctcactcaccaaccaacgcctagagaatgattgtccctgaaacacawmactgggcattcactaccccacaggcagtttagaaccccaaaccacaccaryagccaagaaaccayarcacagggaccagtgggtwmtgggagtgttgggagcaktccataawttawgagggagaacawkacsaamcggcgtgccctcacgtgggtctctggaawtcatagcagagtctgactctctgtccccag

SEQ ID NO: 1327 - DNA, 483 bp, Rattus norvegicus
tttttttttttttttttktaaccaacttgggaacttttatttacacaaaggccasagtggtatasgcaaaagggactgggaaaccgatgccaaaacaagggagatggatgtttaaatactcggatgggagacagagaggcaatagcggggctggcctaaggactgacacctcakggtattctcccccagcagacccaataaaaataagtccagagggtaaaaatggggcaaggaccaccakaagcctcadccccgctgccctgagggtadgatggcccgtgctgaacagcatgggtaaragctagctggycctctgggaagaaaarccaccctcttcccttargwsgkgcmgttctctcttccccaayccctccctcactgaacttgttgmmcccwgggyyyctcgcttggcactcacagctacctctgcaagttgctcttgaatcatcttcagcaccacatccacaatgtgctggtcactgg

SEQ ID NO: 1328 - DNA, 582 bp, Rattus norvegicus
cctgattagagtaggcaactccgtggccaactggatccatgcccgtwccacaaggaagaagcgctgcccytacaccaagtaccagacgctggaactgragaaggagtttctswtcaatatgtatttaactagggaccgtcggtacgaggtggcccgtgttctcaatctcactgagcggcaggtcaaaatstggtttcagaaccggaggatgaaaatgaaaaagwtgawtaaagaaaaaaccgacaaagaacaatcytaaacyctgccccagcytgctgcctcggcacagccaagggaaacacaaaaaccccaccaaaaaatgccccaactcaggcgggagaaagcacgaaaaraaaarraaaraacaagwtagagaaaagcccaacgtcttaaaaaraaaaaaaaaaaaaaaggaaggggaaaatgcaaactctttcgatgttgggagggttaagtgttgagaaattggtgtttagagttagttctatccatcgaggaggaggcaggagagaaactgcgttctcttaccccagcgcaactgaaataaatgacacacacaagtgtgaaaaaaaaaaaaaaaaa

SEQ ID NO: 1329 - DNA, 480 bp, Rattus norvegicus
ttttttttttttttgttggttggtttccttttgtttgtttgtttgtttgtttttgtttttggttggatttttggtcttttcctccttcgtcactcctgctccgaggatccactgtatcccccaccagcctcctcacsctctcttgggcaggggaccaaggtcaggggactcagaggagtaggaggggaggcatggtgggctctcactcggscttggaccctgcctcgggtccccccgggcctccagaggtstgcgctgccacttcactgmaagtgkaggaggaggaggaggatgaagacgaggaggagaggccaggagacttgctggagatggtcgctgccacagctgcagccgctgctgagaccagacccacgcctggtggggcactgagcaggggcagcccggtgtggttcaagaagagaggcgaggttactargctggggctymswsrkkcykmwccksstgcccccagcaccaggt

SEQ ID NO: 1330 - DNA, 532 bp, Rattus norvegicus
  misc_feature (525)..(525): n is a, c, g, or t
cgcaatgttttttttttttttttttttttgcayccaaacagtttaatgactggtacaatcatgcagatgccaaaccagggatgcgggaggcaacaagggcctgaggggagggtactacaacattgtcatagggaaaatggggttgcmtaatattcatgggggagaggtgtgtggaggaaagacccactggcagtgcgggaccacgacgtgctcctcgtgggaacttgtatcctgccatgaaagcagaacaagctggccacctttactcccggacataaattcttgtgcacaccacatcatcggcgccaaatgtcaggattagctcatcgttggccagctctcgggtccagtaagttttggggccatccccctcaagaagcgtctgcgtgcagtgaatcttgttctcattctcccaagtgggtaaactcctgcacttgcgtccgtccaccgtctcctcctcgaagccctctccgaccttgaagttgatcyctcgtgsygcgcaccgtaatggatgtcttgatgtanaactgat

SEQ ID NO: 1331 - DNA, 622 bp, Rattus norvegicus
tttttttttttttttttagaccaggctgtcctcaaattaacagagggatcctgtctttcaaacaaaaacgttgttatcggaaatataaattcttttgttggcaagaattcttacttgctctttcaaacctttacaaactggggcatggtggcatacaccagtagtcccagctactagggagggtgaggaagagggctgttttgagttcaccagttcaagaccagcctggacamgrmmgyaagttcctgtctcawaaacaaaatatacawacaactccgctcctctaagggtcttcacatacttagcttcccaacacactagactgaagtaaaacaacactcagaaccaaacagactttcttggcattttagagaaattcatgtttagggcctttgtgacaggcaggcctttctcagagtcttttcacccactaycccaatcctgaayagagcacttcctgtctatgagtgttagcaggactagatgtgaaccaaggcctaccttcttcctcctcctcttcgtcgkcactggactcactgacatgcacactgacagcagygtttggagagtctgtccattcaaaataaaccccaatcccaatgtcataactgtcctcgtgccg

SEQ ID NO: 1332 - DNA, 503 bp, Rattus norvegicus
tttttttttttttttttaaagtataaaacaaacaattttattagatgaactcatttatttgacacattaagttatgcaaagaaaaatatatgcaactgcataaaaagaaccacgttttcatattattaaacacagcagtggccgaaaatgacgaattgtagaatggaccccaggatttaatgcaaaaaatcacgccgtagagaaaaacgtcaggcctctaacttcacagaatccagcactatgcgggcttctttgtactcctcagcttcttccaagtccttttcgctctctagtatctgccggagatcagtgtaagcagcctctaaccggcgctggcagtctgggatcatcatccgggactcttgcaggatctctgcctgcaatgagaacacttgtgagactcgttggatgacaggactaatgtgtatttattatacattggcatatgactaatgatgcagaggaaatggaaagtacagttatgttaaaagatgcaatgctgt

SEQ ID NO: 1333 - DNA, 545 bp, Rattus norvegicus
gcggccgcgatgcttttttttggagagtaggtataaggcgtctgtgaagtatagtaatttcagccgagtatcttttgatattcttaaggattgaatgtaaaaccatatacatttggttttctgttatgctaaacattggatattgacatcttaataataaagggttgttactttacaggctcaggtagctgtccaaggacctgttggtacagattttaagcccttaaatagtacccctgcagcaacgactacagaacccccgaagcctacattccctgcttatacacagtctacagcttcaaccactagtacaacaaacagtactgcagctaaaccagcagcttcaataacaagtaagcctgctacactgacaaccaccagtgcaaccagtaagttgatccatccagatgaggatatatcactggtaagttgtttgtagatttttgttagtgttgatctttactagtattgtttgatcaaaaatcatagcaacctgctcattggagaggtttttatttgtattcacgtggtcttcactgatttta

SEQ ID NO: 1334 - DNA, 529 bp, Rattus norvegicus
ttttttttttttttttttgagaawtahtcktadttaaytaggttttcgaaataaatcacatttaaagttcacaaagtcccgcactgatggaaggagaaagaagatccctacagttttggaaattaaggtctggakaggkcaagtgaattatccaatgcttcggwgcagcacagtacatgcgaagtcagaattcgaactcaggacaggccackcakscaccctcaagtagtcaacatcacggtctgatatcaaggatgcagtccctcttcagggsttctggggcgccctctctacttgcccagkgaggctccagtcacttggwttcccataatcggtgaggtcctgggctgacacctggatgcaatacttrgcayggggttgtgtgttcctgasggtgaaagtcstggmttcaataggtcccacctggcggaagtgagaggctcctcggcgccggtagcgaagtcggtacttgagagagaagatgtccgggaagggccaggaagcagggggatgcccctcgtgccgaatt

SEQ ID NO: 1335 - DNA, 472 bp, Rattus norvegicus
tttttttttttttttttwyttgwaaaacatgtaactttaytawtatttttttttccataagcaactgttgacttgtgcctcctacagagggtaagacatatctgaagtacttttatctggaacacaagcaataaatactctcccgatccaggcataaatacrtartcccaamcattacgaattgcarracctacaaratacatttcgaaccaaaacctttctgtgaacactgggcaccawttacaaaaatgtaagacagaaaccagcagaagagaatcccatcttcctaagcgggacactggagtaagcggtgcacacacgcccatcaaagcctccacacatttgaggttagagggccaagaccacggtatggtgggggagggcagtctcctagaccacaccacagacatctctcagttccagtgtttagcgtctaggttggatgtcccagaaaccgtctcttaattaaggg

SEQ ID NO: 1336 - DNA, 340 bp, Rattus norvegicus
tttttttttttttttttggaagaaaatgactttattctaattaactcacaaagaataaaatcataacataacagctagtttaaggaggccacacaaacatttgcccagtcccagattctacagagtagggacacccccacttccatttcaattctgaagcaaggaagctaggaatgacaggagaggtttaactgatggttacactttataccctcactatcaattctatttttatactaaattaacttagttatgagagctgattttccatctctccaggttgaacttcttcattaggccaatccgtttgcaagtcggyactgtttcagccctcgtgccg

SEQ ID NO: 1337 - DNA, 406 bp, Rattus norvegicus
tactgtgaatgtttactaacgcaccaatcagttcaatgacaatcattggaagaatggtttgttcgtctcatttattgttctcttcattctgtgagactaatgagcacacagataacagcacacgattcctgctttaaaatctgaacaaccgatctacaaagggactacgaagtaacgttcagcagccgaatctttcaaaattggtttgttacaatgatgcttcagaaaccatactattttcaatactcttctgccttttaagtccagaataatttaaccaaagttattgcatgcacagaaagaattcttggagaaataaggcgcccagcagctacagcaattatggcttaagatctttttattaaatatgcaacaaaawrmwaraawwcaaaaaaaaaaaaaaaaa

SEQ ID NO: 1338 - DNA, 429 bp, Rattus norvegicus
tttttttttttttttttaccatgcatagactctttaatttctctatgattcaaatttcatgcagatgggttcgagcttgggttcgagcttgggttcgagggacggaaaggacatggggaggacgtctcgtcggccacttgagctggaggttcactgagacaaacagtacagcctcttgttccggcgcttcttcatcccttcgatgtatccctgcagctctttagtcatgaagtggctcctgccaatcgtggactactgagggctttcttgaggatgtccagaacttccgtctccatgatatccatcagaggcaggggcagcctgttctgctgctctatccagtaggctcgatgcggctttgatagactgacttctgattctgaagatgttgctaagaaattctcttcgatctcacgctccaaggatctg

SEQ ID NO: 1339 - DNA, 487 bp, Rattus norvegicus
acccagcccagctggtctgggtgtttgggaaacctccagccccattgcccaccaccttacattcttctaccaccaggacccgcacatctccagagggggcagaaggaagatgctctgaaagggacgcccagctgggcctctgtgcacattccaatgaagctgtacctgctgctccaggtgaaggactgcatgtcagctacgccgttggtggactcctcagcgtcctgctgattttgttggtgactgcagctttgatgctatacagacacagaaaatccaaattcacggatcctggaaagggcaaggttcttattgcactcgggctgttcagaatgtagaaaggacgcatttgagggaatatctatttgagcactgatttactctgtaaagagggcaaaatctctctgtcctaaactaatggaagtgattttcccatgctcatgtgtaatgattttaacattactcactggaaaaaaaaaaaaaaaaa

SEQ ID NO: 1340 - DNA, 465 bp, Rattus norvegicus
gcggccgcccagcttgcactcaatgatatagcccatggtgcagtcatcaggcagccggatgagagcagatgtgtccatgaaacgggagccactggcccacggagccatcttcaaagccagtttgcgattgatgcagaagccagcacccccagtggcaaaccagaactgtaccagcctcgtgcggttgtggggctgtggctctgaggcatgratgggccggttcaggctgggccttcccacatagacgtcgcgggccagcgggaaggctctcagaagctgcagcagcgcccttgggttcacatagttgtcatcgtccacatggsagaaccacctaagcccactggscaagaaggkgtcgarctcagcagccatcttgcaggacagagctgggtggctgtgttccgcsgagcagttggtgaccwcrwgsygggaccccagtctctcctggaaggctttgtctggggc

SEQ ID NO: 1341 - DNA, 445 bp, Rattus norvegicus
tttttttttttttttttcaataagtgataatttattaaccacaaaaccaaatttgcatagtagtgccgtggaacacgttgtgttaaggggaggaatggggacgggtgaaatcacgccgagacgcaacgcaatccgcagcagactagcttgatgcgtgagcactgaagaacgagaatgggaaaggaccgtaagtacggcgctgtgcttcaggaagagcaaagcagtgcggtttagaacaggcgacgacgctggccctgagcggagagacttcaggcagcgcccgtgggccctgtgtgtggcgactgtgacatgtaagggttcacaccgtgtgttctgaggaaggctacagtgaggtcacacaggtgcggcatgggtaagagctgscagaagcccctcggatttcttacctgatgaattctgaggttttggtcactggatgtgcaga

SEQ ID NO: 1342 - DNA, 579 bp, Rattus norvegicus
tttttttttttttttttagagttgcaacaattcatctttatttcttattttcctctggagatgcagaatttggtatatttcaccccaggtatatttgggatagttggctcctcgctgggtcaggatggctgggtgccttctcccctggcatggttctcttctctgcagggcgaggggcagggagctagtakaacctcgcaatgacagccgcaatggcagacccaatggagcccaggatgaacttggtcaatccggagagtccagttgctcccagtgactgcagagtagccacaaggctgcccgaggcaactccacccccattggcaatggccgccgcggacatcatcttggctgctatggaggacgaggcgattcccgccgcagtgaagcccatggcactgagcaccatgggcacagccgccatggccacaactcctccaatcacaactgtagcaatcctggccaggggcaaaactacggcagagccagaggccaccctgaccactttggccacactggtcactgctgatgaggtgagagcagaggctccatgcctgctcgggttaattccgtggccca

SEQ ID NO: 1343 - DNA, 638 bp, Rattus norvegicus
tttttttttttttttttggcaatttctctttttatcttctttgttactttkttyttyywytytttwwwtaaktaatataattatttttttaawtwywwwwtwywywktktcctttctctcccacgtatttsgggtgacagggaagtgttttaaataaagrtctcagctctctaawgggtcataagtgggagagctggaggcccaggtaccacccttcccctgggctgtcctggcaccccccgcccygctcaccccacacctrggtgctgcccctgacttgaggcttgaggtgccctgacccaaggscccctagacaawgagggatccttaggagaggtggsatggaatccacactgkgtgactccaggtggacctggttttggtcgacagggtcagagacaggcctagcccatgaagcagacaggccccagaagcacccctccccgtcttgtaggggcccccaggtctgagaaggaagcatccagcacgggcagctgctccagcacaggcgtgcgcacctctaacaccgtccggccttgctgggtctgacagccatctctgaactccttgacgtaagggctggtctcagggctcagctcatcctcattggcccctcggagtttcagggggacgtcctg

SEQ ID NO: 1344 - DNA, 974 bp, Rattus norvegicus
  misc_feature (16)..(16): n is a, c, g, or t
agatgcgcagagttcntgcccagcaattccctcaacccagagccagagcccccacagtgccagcccgtccctcactcaggcagaatgggcaaggagaagacacacatcaacattgtggtcattggccacgtggactcaggcaagtctaccacgacaggccatctcatctacaaatgtggcggcatcgacaagcggaccatcgagaagtttgagaaggaggcagcagagatggggaagggctcctttgtggggacagcaaagctgacccccctcaggaggccgcccagttcacctctcaggttatcatcctgaaccaccctgggcaaatcagcgctggstactcgccagtcatcgactgtcacacagcccacatcgcctgcaagtttsccgagctaaaggagaagattgaccgtcgctctggcwagaagctggaggacaatcccaagtccctgaagtctggggatsccsccattgttgagatggtcccaggaaaacccatgtgtgtggagagcttytcacagtacccmcccctcgsccgcttcvccgtgcgsgacatgcggcagactgtgsccgtgggcgtcatcaaraamrwrraraarargmrcggsggcsccggcaaggtcaccaagtccgcacagaaggcgcagaaagcgggcaagtgaagcgcgggcgcccgcggsgtggccctccccaamggsgcmgckccgcscccccarcyssrccccmgvcahtgkccccktcccytmmccsrccccaggsgcggcccmkscgmmscgccccyccgccaggbgsatgtytkcacytccgvttgtaagaggcthtacgtcagsgaytggatgctcsccatcaaagtccagtggaaattyttcaagaggaaaagcssccscaccccaggctyccgcgccagtgctgaccacgctcagtgcccgttttcccaataaabtgrgcgmccccmraaaaaaaaaaaaaaaaaa

SEQ ID NO: 1345 - DNA, 591 bp, Rattus norvegicus
ttttttttttttttttttwagcaawaaacatraactttattaaacactcatctgtgtctctcctaagcagtttaaatggdacccatcatcagctctatgaggtakaaaggstgaccatccccatggctgagatgagcccabagaggtcaagacattttcctgaggttacacaggaaggaaagggtaaaattggcagtcctacatatgtgacaaatggscttcctgtgtgaatgcatatgtatgtgsaggtgtgtatgcacatgtttgtacagaggtcasaggacaactctgggtattcttcctgaagcactgctccaccattttrttttgctttttggcctgagcaccactgaatggactaggcttcttgmcagtgaggtccacaaggctgcctgtctccatttccccagcactgggamarcaagcatgtcctacyacacagagcywacgtggrttctkggaattgaactcacggscttgtgcttacttgcaaggsaagcacttttgaatgcccctcactgaccaagccatctcsccagcttctaacaagcagctactgagtgccttctgtataccaggaactgatctagt

SEQ ID NO: 1346 - DNA, 511 bp, Rattus norvegicus
  misc_feature (482)..(482): n is a, c, g, or t
tttttttttttttttttcaaggaggaagctttatttgggaagagtgcggttctgctcggccctgatcagctctgccctgcccaccccatctcagccaggcggctttacttcttcctgatcttcaggtctttcttcttcctgatttccttggccagctccccaatcaatctccagtactcattgaacttgagctccgagtcctgattcacatccaagctcttcatcttctcatcaagagagcccacatccttgagcagatggggcaactgctgggtaaccagctctttgaactcgttgacgctgaggctatccttccggccctcctgccttgcaaaggtgaagaaggtggtgaccacggtctcaatggactcctctagctctgtcagtggttctgctgscattaggaccctgaggscaaagctgatgtcctcaaggggctagctgacctttgtcagggctgacccggcaaggagatggggtanagtgagctggagcctcaggcctcgtgccg

SEQ ID NO: 1347 - DNA, 628 bp, Rattus norvegicus
ttttttttttttttttttgggagagacagttttgawttattgatgttgctttgtgasaacaaatttatagcctggggaagcatcttccaaggggaatatcrcatggstggaaaggtcacacgccarctttgatgtcsggtggyakgaatgtgggcaggaggcavcgctgccarctgctgtttgtcaaacacacaggctacctgctggmcargmctttcccakcacctgcctgtadgacmccgggtggcatgcacactattgtcccarggaggakaggcagggactccccargtgctgccccttcccacaccartgtccccactggacactccaaggcccgcagtgcactgcagtcctgccccttctgcacargctggagactcccagagatcttgtttgaatcaactccaaatccttcaggtccttccctgcctcttatcagaggccgctggaaacacaaggcctgcttctgtggaccaggggctcctctgggggtggcctcagccacggctgagatccctagaagtccaggagcagctgcggaagcaccttctccagctggtccacgtccacacggagcgcgtcttctgcctgggcctgccgcacgccgcggactgctgcttccaca

SEQ ID NO: 1348 - DNA, 640 bp, Rattus norvegicus
tttttttttttttatttacaaatacatttattttttacttattaatataaatataaagtttgatttgggaacctttgatttctagcagctgcccagcagttactaatgctgtccagtgaattatataaagtcttgtctgagctatgctcacaataaatactgagtccagttaaagacaagaggaaagtcctggaggaaggactgcctaggccccatgaaatatagcagcttggggtcttagcgtccaggggtcacaagaagggtggctasagcacccatgtgcaatgtcacgtgggtaagaactcatccctgaggggggtcaggtttcacaaggaagagtccaaagctggtggtgttggsatgagacagctcccagtctctgtatgcatcctgggctccatgcagataggccctcagatccacactgaggcggtgaccagccttcaggcgcaacagacgattccaggaacgatccactaatttgtcctccatggagcaagggaacaattccactgtcagggccaagctgtcaaggtgatctacctgaggctttgcttgcaaaacaagggagacccagccctgcaccttgcggcctgtgtttatggacgttggactgagcttcagttccaagaacacgtag

SEQ ID NO: 1349 - DNA, 443 bp, Rattus norvegicus
taagcttgcggscaggagcaccatctttgagctacatttgtacaatgggtgactgatagaatcgacataatggtgcctcatgcagcgttgagagtccatcaggaacgagctgtctgttttgctgtctgtatctcccattatggccagcagggagagcatagaaatggatgcagctagtacatgatttctcattgttgtaaggggaaacttctccagaagaacagcagagggcgacagaggacaatagatctgaaatgctgccacctcctaggatccaatccctttcaaggccagggcaggatggggctgccgttttctggttgtcattgtcctttgtatgcaggagtttgtcttgcttctttcacttgcaaccgatcaccatcaccgcagtgcctgctacacagcttgggggaaacgcagggctcctttcttccctcgtgccg

SEQ ID NO: 1350 - DNA, 670 bp, Rattus norvegicus
ccctatttcttgctaattattacaatctaaatggatacatgtagttcatgactttaaaagtacaaatgtgcacaywtwkwkwwkkywwwkttacagataaattcacagcatattawywkkyttttttttttttaacaaatcgatggggctgaattaatttctttccctttttgaccttttcaaaatggcaatrctaatttctattttaagaaaccaagatgggccctgtctggcatakacagagccaaggccattgaagctgtgtgattggacttgccccaatgacttcagaaggsctccatgcctgttctccctggctagtgaagttcttttctgagcacatgcgtcaggcctaccaataatgtgacccgggtcctgctgtgggtgctcagcaraaggaaggacaaaggtggcagatgctatacaactgacaggggttgactgaaccagcctctgctggagctgaggtggcttccggagctcttgctcaaagatycacacacaacacctcatggtatcttctacaaggtttgcaaaccagagggtgctggacaggttcctaggaacccaagcatctcactgattctggggaactttccgacaccttgagtctggtcaattgtgagaggacagaaccctctcccaccacttccagcttcccctaactcac

SEQ ID NO: 1351 - DNA, 535 bp, Rattus norvegicus
  misc_feature (507)..(507): n is a, c, g, or t
ttttttttttttttttttggtwaagattttaataaaggtggggcaaagggttgaattggtcgaaaagtcctcaacgtcctgacgggactcccctgaagccaaggcagtttgagtccattcattattctgtcttggatcttaggcaaagccccgggccccttggagcagcaccagggttcccgacacccccaccgacagggtcgaacgtgcacaggctgggaccacgccggagttcattgagccctcgtgggggagggcagttccagggaccaggaagggattcccgtccagtgtcaggttatccacctcgggcagctcgtcaggctgcggcgccctgttcagtctgttgcarctgagatcgagcactctgagcttggctggcagtcctttaggcacctgttccagcccagcgaacgacagattgagggagttcagggcgctggaccacatgcatctcggagcgctagggtttacggtggcgcgcagcgagttgtggctgaggtctangctgtggggctggacacctgccgccgcc

SEQ ID NO: 1352 - DNA, 502 bp, Rattus norvegicus
ccctttcggcaatgttgagggctgcgctcctttctctgccgtgcggtcagccatgagcggatgggtgtgatgcctgctagcataaagggtgagtgaaagtgggtgactattctctgaaaagtcacaagccaagaaaagaaaaaaaggaaggttgtttagtttggcaacactgcccattcaattgaatccgaaggagacaaaattaaggattgccttcagtttgtgttgtgtatatttcgatgtatgtggtcactaacaggtcacttttattttttctaaatgtagtgaaatgttaatacctattgtacttataggtaaaccttgcaaatatgtaacctgtgttgcgcaaatgccgcatcaatttgagtgattgttaatgttgtcttaaaatttcttgattgtgatactgtggtcatatgcccgtgtttgtcacttacaaaaatgtttactatgaacacacagaaataaaaaataggctaaattcaaaaaaaaaaaaaaaaaa

SEQ ID NO: 1353 - DNA, 575 bp, Rattus norvegicus
tttttttttttttttttkkwtagtwcaaaacattttactctgcatcactatactttgttaaaaaggcataaatgtgtttggtcacaccagttcacaggaagaccccggaaaactagttctcagtctttgctctcaggtagctggtcacgtggcttttctcatggcggcttgtgtcacgctgaagagataggcttcgtagattatgcttaagaagttgtcgtcattctggatgaggttcagcagtgcctcctggagctgcagcctggtgaggggcctgctggccatggtggaggattcccagttctgcaggggcagaaggaggctggaggaggcagcaggaagttctgggcctcctagggccatgagcccattatcagtctccctcagtggggcacaggtagactgtgtgaaaaccacagggggtgtgagcagagaagccactgcagcagggacacamtgagatgacacggtctgctcacagcaaagacacacacaaggcagggttaggaagcacccacaaagtgtagctccagagaggaaaggcatgttcacaatggtggtagtgggatactcag

SEQ ID NO: 1354 - DNA, 604 bp, Rattus norvegicus
tttttttttttttttttcawaaaaaacagtcatgattttattagttgtgaatatttctacaacatcagaatggacttttcgctttatgtgaaaatagctatctgttcccggggcctcctagggccttataactcaggacacgttaggatacacacatgcaaaaggcagggcaagctgctccaagctgagactstagctctcccgacagtacttgggaaaccggaaatgaggtcgcagagtggaagtggtccacggagcccagggcctggtcggcgagaagccactccactaggaaactagcattgcagcttgcggatgctgcgggagatgcgcttgaactctctctggcccttctgccaccgtttcacggaggtgatcaccagctctccaccctgtttctgtcccatgaccagatagggagcgttgatgtcgttcatctcctcacaggtgcactgcaggctgtctttgagccacagcactgatttcttcaggtccctatcggacaccccgttcagcttgtaaatggtcttgctctttgtctccaggatgattttggtgtctctgttgatgtaggttatctccttcaccctcgtgccgaattctt

SEQ ID NO: 1355 - DNA, 567 bp, Rattus norvegicus
tttttttttttttttttaccaatctttyykkkttttwttwyyktwacaggttaaacttttatgcgaaattctgtaaaggtatagagtgaccccagggagggccactgctctccagctcttgcctgtggggcccgccccttagcacttgctgtagatggctgcacagccccgctcctcaaactcttctttgctgamccaaagctgctggaaggcctgcaacgaggccaggatggagccgccggtccacactgacgtcttcctctccggagcagctgccactgtarggctgtcccctgggcacaggagactcagctccctctggaaacgctcrgggaagccatccagcatggtgcagccaccacacagcagcacgttagcagccatctcctccttgaagccagtgccctggcagcggtcgaggcargtcgcggtgagctcagggaggccaggctgggtgctgcccaccaaagagggcttgaagagcatctcggagcagcggaagcgctcctggccaatggtgatcswcgtkycgmatccgggagctcgtagtcgacctcgtgccgaatt

SEQ ID NO: 1356 - DNA, 685 bp, Rattus norvegicus
  misc_feature (628)..(628): n is a, c, g, or t
tttttttttttttttttkkkttttttttttaaaatcttgcccttggtgtattgcctaagtcagtaagcagaaagcaccttcttcctggagaaggwtywwktyytywwwwkktargaaatgtcaaagtgtctcttcattgkcatttaaaaaaacccaacaaacaaaccctcccagaccaaaaccacccctgatcaaaatacccccaagtccacgaattgctgtaaacaaacccaratgcaagagaatgcttctcartggcagtcgaggctcaagacagtcacctgcagcagggcargagcgggcacccgtgcagggcarggccttgtggggctgcagacctgggtggctgtcctcargaagatctggcctgttcartgtgatccggaaggscargagctcctctgtgtgtcgcctcctgaaccattarcagaagaaaagtccctcggagtttttgaaaccggctcccaagacagaactgttckgtytscysgtggcgactggaatggacttccccagagcttatttggggcgactgcctgtctctctgccccttgtgcctgggactgggccattagtgatgctccaagaaacagccaaggccaggcaaggagggtggcccacctcttcnctccatgttaatgttcctggaagcattttttttccccttggctctgacagctcaact

SEQ ID NO: 1357 - DNA, 593 bp, Rattus norvegicus
tttttttttttttttttkkkwywwtawtttttgagttttwttttywttttttttacaagaatataacatgctcaaacagaaaaacagggatttcgtacaccactgataaaggaacccagctccctttgttaacaataaataaatattaacacagtggggagtccccccacccccacccaccgacagccctcagtggttcgmaaggcttgctgaggtagagtctggtagggaggaggcgcggtcgggcarcakctcycgttgagtttcttcagtacgggcaaacaaatcacartaaataagaacagcaacaacagcagctgagacaatcagcacaacagaacramatagtatacttaaaagrattttctcccggagaagcctcaagtgcagagaraacaatgctggcaacctacrtctccacagccatcttrgtctctggtgctggaagtcccaacttggaatgtttgttcggtaagactcaraggtgataggcagattgattcccccccaamcccatccttccaggcaccccccacatccgcaatactcccttggctgyactaaccytctgtkccrgagctgtcttgacccct

SEQ ID NO: 1358 - DNA, 648 bp, Rattus norvegicus
tttttttttttgtttttcaagtcacccacagatttacttagaagatgaaggtgcagaaatgtgaaacatattacatgtwytttttttytttytttcaaacatcccaagcatggcatagtaacctgaaattaaaaaatacttaactgggctttagttatctatacagactgctggaattaggtccccaaattagcaatcaaataacaaaaccagccataaagcaggctgaaagcattaaacatttcatatatgagtttttaaatcatttaatttctatagaaaaattgtattcacaatataatgtgacagaaattgccacaggaatgatatactgattgcaataaggttgcatgcagcagcagctttgcatttttataactattttttgtttataaaaattaaacctctccggtcatgcttatcacatgttttttagattcgtaatgtaactgaatagggaataccatatagttcaaagagaaaatgtctcatcattttcatgtggattatctgtatgaaacatgaaatacactactaacccctgaaacatgcatgtctagatttgtttttgtccaatttcargccatctgcaatcacattctatttaaataataccaagaggatctgtctgcaactgtggttgaatta

SEQ ID NO: 1359 - DNA, 490 bp, Rattus norvegicus
tttttttttttttttttcctaaaataaaccatttattgaaaaagaaccttttcttcagtttcacttatgaacctttgcataacaaacctgcagcttgccaamaargaggctccacagtckgagccacagtcagagccarcaaacakgaggcrgaaacaaggtcctgsacacctgattaacactacattttcttctgaacccakaagctcaagaacactatgctgatgtcacacggggaacggwggakacagasgckgtggtccgtgtacagtartaatggcacttaacatgcagcttctttaaccttgtcaacactgtcactcgggggtcctgtgctattgcagacaccaggagcagcaggagtgaggcttgtcaccgtgtagtcttcagtcttggaaggttaagaggccgcctgcactgcagtctttatgtgaatattacatacagtagtgaccacgggattctgtccacacactgctaggcctcgtgc

SEQ ID NO: 1360 - DNA, 637 bp, Rattus norvegicus
cggccgccgcaaatcatcctgtcagacgaaggcaagatgtatggtcggaatgagctgatcgcacgctacatcaagctcagaacagggaagacacgtacaaggaagcaggtctccagccacatccaggtgcttgcccgtcgaaaagcccgggagatccaggccaagctcaaggaccaggcagctaagaacaaggccctgcagagcatggctgccatgtcgtccgcccagatcgtctcggccacaaccttccacagtaaaatggctcttgcccggggccctggctacccagcaatctcagggttttggcaaggagctttgccaggccaacccggaccctcccatgatgtgaaacctttctctcaaaacacctacgctgtccagcctccactgcctctgtcaggctttgagtctcctgtaggacccaccccatcaccctctgcaccgccagctcctccatggcaaggccgcagcatagccagctccaagctctggatgttggagttctccgctttcctggagcgccagcaagatcctgacacatatagcaaacacctgttcgtgcacatcagccagtcaaacccgagctacagtgacccctacctcgaaaccgtggacatccgccagatctatgacaagt

SEQ ID NO: 1361 - DNA, 610 bp, Rattus norvegicus
  misc_feature (602)..(602): n is a, c, g, or t
cggccgccgagaggcgctgcgcacaamctgggaagaaccctaagggtatctatccctcctgcctccatccctgttcatcccgagcttggtttagagaccccggaaatagagaacccagaatgggggactcaaactccccagcccagagatactgacagggggaggccacagtctccctaccgagtgacactttccggattcattcgcatggtctttgtaacccattcgtaggtctcaaaactgttataaaattctgcaagtttttcctgagaaaaggacgaaaacagacgagtctcctcaccccaccctaccctactttagactccagtagtcataatgctggacctagcttatcagggctagaagaagagcccccatctcagatatgcagggtccagggaaaagatatgggccttctcttgtctgtcacggatgctcctccctcggggtgagctagaacttctaggcctagactccctgctgttgactattcaagaatctaacactttgtcttcatatttcccacttgccctggggaaaaaamccrwrcmraacaaaaatcaactaaacaagacaaaaaaaaaaaaaaggatgccctcgtngcgaattc

SEQ ID NO: 1362 - DNA, 749 bp, Rattus norvegicus
tttttttttttttttttaagttawttagctttcttttaaaattttgattgtatgtgtaktctacctaatataattcttccaaagccaatccaatatgttaaagctaaatttatttttttctgttttccttttgtatttaaaacattttccttytytttwwttttttttcatttcctgtgtttctcctccttgtcgccagttttactacctgggccttccccagacgtgtgcctgttagtggtgttgttcaagaacatcttgtccatgcctttgagagcctcggtgagatagttctgcarggcggtgagcgcagcgcaaatggccggggcaccgaagccgtgcgtkatgagactgaagtgcgtgagacagctttggatgcccggctccaggatggggctgggccggctgtttccgatcggtgtccggtcctgagccagcagatccgtaaattctttacaaagttgcttggtggccagcagcatattctttctggagtgcagatcactggggtccgtgtgctgtctgttcaaatactcagatacggctttagcagggaactctgtttcacaaatatacccaaaatcccgagctaagtgaaccgcttccccttctaccagggaggtgagtaacgtgacatttgctgctttgcgcctgcccgcgggtaaattcaaaccgattttttctagcctttctctcaaggatctccccacatttttcgatttggctcttctgaggacgccgccaggaga

SEQ ID NO: 1363 - DNA, 670 bp, Rattus norvegicus
ttttttttyyytttttttwwagagtctgaacagcaccagctgcaatgcagccttggtttatttttttgagaaaggaggaggagagaatgggaataaactggcagaaagtgtaggagkgaggggagaggacccgacccgacacgccacgccacaagaggcstgcatagacagctgtcatggctgcaccggcacagytctgagctccagttgcaaggaattccaagttcttggggtcttgccgactccagaggtcagtgatcccggctcmcactgcctytaccagctyagaagggaagtcctgcctaaggtcatgaagtakacctggctgctgccgccagagcggacggaagcaaagaacaccttgtcattacgttcacacaggaactttagtctctgagcccttttgtgcataaacacaccgtccaaatgaccagtttccacagagcgtatctctattgccttctctccccagcccattgtctgmytcgrccgratkywtgctacagatgttggcatctctccccactgcagaaccacgtccttggtgattcttccgtacgtgtttcacataaaccccttcatcttcgtagcacaccagaagctccattccatccgtgttggggaggataatgattgcatggggkttgatggtacactgaatgtgtgttgg

SEQ ID NO: 1364 - DNA, 392 bp, Rattus norvegicus
tttttttttttttttttkcacagtgagacttttattagaaatcaccctccaaacacaccacgaggtactgtgggtccaacgtgtttcctgaggaaggagggtcacagtattggggtatcaagatcctgggcaggttggccagtgagtccattgcctagaactgaccatggccagcactccctcacagcaacatgaatcatccataagaacctccacaaatgcaacacaagaaacaccagagcacacacatctgcactacacttaaataataataaatacagaattccatttgctgttattggcctgacaaaaggaacccaatgggaaaaagaaaaccaaacacctttctctctggtggaccaatgggmmkmrwrmcscaaattatcaaaatt

SEQ ID NO: 1365 - DNA, 440 bp, Rattus norvegicus
cggcctttgcctcaaaggccaggggcagaggccttgccaggcactgtgttctggggccctggcctcatgctgtgctcagcgggttggccacgcggcccaggaagtrcagggcagtggcgctttgatcatacacagcaaacaggaatgggcggttcagggtcacctccaagacctcaggcttgttaagctgttgggtagactctgtgggctctctctcatccgcttcaagctcaaaaaaaatgctgttcagcacctcccccaccctgatgcggtcattgctcaatttttgcaggttcagctcggtgtgcagaatggcgggcagctcagcctgggcgagcaggtcctgcaggtcataagatccttgcagcaccagttggggcatggtcaggtggatggtccggggagacagtttcttcatccagttgagggagcctcgtgcc

SEQ ID NO: 1366 - DNA, 608 bp, Rattus norvegicus
tttttttttttttttttaacaaagtttccacattattcagttttcacaaaaggtttttttgtttgacattgactgcacacacctatgctcgccataatgtgtgtgaaggtgagagggtggcttaaatcctgagatctaactcaggtcatcgggcttggtggcaagtgtcttcagatgagccattctgccagccaaatccccagttgtaagaaaaccacaaggtggtttcctctgttggtattcagagtagaaccgagagagcctcatcaatccacaggaagctgagactaagtccaatgatccagtcagaggtgatttagttgactcaaattgataggacgagctttagctaactaagggcaggctctccaccactgtgcttgggaacttgggagcaatggactgactggtccacagaatctttgacaggtctttcttttcttctgtgacagtctcttacagctccaggctggcctcaaacatcctagatagtaatcaaaggtgaccccaaacttcccatcctcctgcctctactaggatgacatccctggaccatgtgcctagtttgtgtggtgctgggccttcaagacaggaccctgtgcaaaata

SEQ ID NO: 1367 - DNA, 686 bp, Rattus norvegicus
  misc_feature (575)..(575): n is a, c, g, or t
tttttttttttttttttcacggctcctgttttattgccttcgggtgtccggagcacctgactgccccggggtctaataatttaaggtgccgagaacaggtcaggacaaggggtcgcaaaagaggggctgggggcccagtggttacaaaatatacccccaccccacaacaaacaggctagaggagaccagcctggctggtgtgggagggggcgggcagagggcgcccgacccacctcagagagacagagccacggccagcgccgccagagggagtggcggagacaggagaaagggcccagaggccacccagggcccgaggggctcctcgctcctcggacacaagtgcacggaggtgtcggggaggaaaaggcgatgtggggccagccaaggcctggagcccctgctgggctgggcaaagcagggctgggcagggcctccaggtccagccaaggtcctgacctacatgacgaccaggcccagccaaggtcctgagctacataacgcaacaccgggtcttgtgcgtgtgtgggtctttgaaccgcagcctctgtttgggccggtatttctccaagtangtgagctgcttgctgttgatggctccgcggcgcttctggcggatgaactggatggcgtcctcgtacttcatcccgctctcaataagggcagcgcacaaggactcgtgccga

SEQ ID NO: 1368 - DNA, 552 bp, Rattus norvegicus
atggctgatgaaattgctaaagctcaggtcgcccggcctggcggcgacacgatcttygggaagatcatycgcaaggaaatmccmsccaaaatcatttwtgaggatgaccrgtgycttgctttccatgacatttcccctcaagcaccaacacattttctggtgatacccaagaaayatatatcycagatttctgyrgcagaagatgatgatgaaagtcttcttggrcayttratgattgttggcaagaaatgtgctgctgatctgggcctgaakaagggytatcgaatggtggtgaatgaaggttcagatggkggmcagtctgtctatcaygttcatctccatgttcttggaggtcggcaaatgmaytggccyccyggwtaagcacgttttggggataattttctcttctttaggcaatgattaagttaggcaatttccagtatgttaagtaacacacttatttttgcctgtgtatggagagattcaagaaataattttaaaaccgcatacataataaaagacattgttgcatggcaaaaaaaaaaaaaaaaa

SEQ ID NO: 1369 - DNA, 542 bp, Rattus norvegicus
ttttttttttttttttttwwkytcaagtagcagccagtttatgtgcagagcctagatgagctaacacaagcatctgactcaatgctggctgccatgtggtggcccaggccagccagctcctgaacttcaggggtacaaacatgatgttgtttcccatagggtgaccctacgtctgcccagcctgagtggctctgatgggatcccttatcgaagtgtctctgagtggcttgaatccatacgcatgamgcgctacatcctgcacttccgctcggcaggcctggacaccatggagtgtgtgctggagctgacagccgagtgagaacgctggggccaggcagcaccaacatgggcatgggagggtggctgaggttgagcttctagactcacagcctccttctctcttccacagggacctgacgcakatgggaatcacattgccagggcaccagaagcgcattctctgcagtattcarggatttaaggactgagcatccactgaaawgatgttccagccctctgtccactcactgggcctttcctca

SEQ ID NO: 1370 - DNA, 1356 bp, Rattus norvegicus
  misc_feature (1294)..(1294): n is a, c, g, or t
ttttttttttttttttttaacagcaggaactataatttaatcacattatatcatattacactatgtaacattatgtattttacctactgatgtaacacagtttattacaagcattatttcctaagacttggtacaggtactcctttcaaggaattactgcttatttaatagtgtctatcwacattggaacattaaatcagtgataggtatatataatgcaaggcattgtgcaacrtctccctaccccagattaaggtattattaacaaaaagcaattaagaaaaccaacacaactrtaaactgaaccaaggstgtcagcatcacakatgcacacctgagcaggtcaacagtgctttagcattagtgtggacaagtgtggacagcagctggtcttttggacaagtagatcaacagtttcaaatgaagagttactcgaggaggaaacacaaatccatgctactaacaaaagcagcaaatgctggtgttattccaactcaaaccacactgtccctctgagtgtcattttgatcatttatgtgatgacaagactggattccttatggcgcatcagtgagatgttctaggatgtcagaacctcccgtttgttttaatatttaagtgatagcattagggaactagaaaagggtcagtgctggtggctctaaaccacattatcttcagattgttttcacaacaataatgcagttaaccctgcctctgcaacaaaagagcaatgcagtatcctgtycctgcacacagaagctgagggctatgcaagtagaagctgtggctacagtgggtggttgccgagtacatagcagtcctgcatactgacacaaagtatgtaaggagagctcaaactgatttgtacgtctatattcagctaaagcttcacagcagcaatggacatcaatatgcactcaatatagacacttttcgaaactactccaaaaaaywwwtkwywwwktwkttaggaacaactgaacatatgttgtgtgtaccaggcataaggatggacggaccctgtggttaacccctgctgaattacatggcgcctagtccacttccatctctccagagtcggtgtgctgggagcctcctttgggtgggtctgggctgctctctgcaccattctgtccatccatcggtccattgtgctcactactagcttttgttttatcttcgggagcttctacttttggtttgggcttataaacgatggggttacagaaattatccagttcctttgactttgtaactatttctgacacctttaccacgggatcttgagtangacttaatttattctgcgcgttcatcttactgtttagccagttcatggagtcactgatgtac

SEQ ID NO: 1371 - DNA, 2129 bp, Rattus norvegicus
ggcacgaggacttagacgaagttcggagtcccrmytcsgccgwsstgcgacctgccgccccckaskmdkvstgmcaadtyggmsmgsyygtcscgwgcrccatgtckggytyytcyagcgtcgccgyyatgaagaargtggttcarcarctccggytgdagsccggrytcaaccgsgtraargtttcccaggcagctgcagacttgawacagttctgtctgcaraatgctcaacatgacccthkgcygaskgragtrtcttcaagtacaaatcccttcagaccccagaaagtctgytcctttttgtagtmawatatctcraggtttcycaaacyactyytyatgawccagtgaatattcmmgwsawstaagttsgaagtcactaagtttgaagyctgtacaraagcttyyctktaacacgtgccatayayayaawyttctactsgtcagtccttaacatctacctctctgrattttcatgratytctrtttcacaaggkttaaytgktttatatacactggcwgyagcatmcamtaaarcmsymtvcaawmwwwwrdmmwwrwwawwrawawraaatgtgctgtatactaattttttcaacatcaggactcactgccttattggcaaggcttctaggaatttacagaacaactgcaaatctttgttcaaaggccggaagacttaagagtttctaatccttcagtcagttatgggaattatcttaaatatcccaaatataggtagggagatggctcggtggctaagagcacttgctctgcagttagttatgctgagttcagatcctgccacccatgtaaaaagctgggcgtggctgtacatgcccgtggccacagcttcggggagatggtttgttggctgccagcgagggtaaggttgtaattagctccgtgagaacgaggcagaaagggatacaggtgcctgacactgccatgtgggctcacacaggcaacaaacaactctagtggcgtcagcagttagtgctaccaagaaggtggctgcttccatctggaaaaagagttaaagattcacagaatcaagaccttgaggacttacgacaatgcctcaagtaggcaagtggaggtaattaggtagaaaggaacaagaaaacaggttaacctctgtgacctgtaactttgctccaagtcccaataacctgtcctttagaactggtatattaaatcagggtcatacactatctaccaacaagccttttttctagcctacaagttctttgggaatgaaaattataaagtttgaatcgtcattcctaakwwwttwttwywwytwwtccaaawtkwywwywkyttttatgaytttywtwywtwwtttttcagacaaraataaaattatatttatttatatttactatatgcagtggaaactcatagcacttggtcatttcttcaaacacaggatttataaaataaaatcccattttgaaaagtamattttgttcaattaccaagttttttaagacaggcctgcccgcaaaattgttctttataaatggaattttcttctacttgtatccatttcccgtggcttatggacccattcatactctccatacttggaatcaaaggttcccttctgcagagatcgtaattttaaggtaaaacgtggtccaagttcctgaattcccaccttcttttcactcttgaatatgtatctgtgaaacctgaagaagatgtaatcccgctgattgtggaacgtggmaacttgtcttccaataaattgagggttatgaggaaagagagaagcaaacatacgtccgatagagtgacctagccgtgtggtaaagttgtttagaattatctcaggtacatgttctgtggggtctttgcctcgtcgcttaatttctttacgaagacgaacactactcattttaaaatgagcagttggaccatttggcaaatgactcaaaataagtccatttggtgttttacgatcttcattaataacgattaggtctgtgaaatctcttgcaatgcactgtgggataatttttttcagagccagtcctcttctgtaataaacatgtgaatccggtataactgttgagagctgctcacagagtcgtactgttctcccatgaggtctgcctcgtg

SEQ ID NO: 1372 - DNA, 539 bp, Rattus norvegicus
tttttttttttttttttwhttgcartttcccgagacagaacaaaataasaataagttttgtacacctacaaggctcggaaagaaaagacaatggaactcagcaaaaagagaakagaggagggtcaccagtactgcaggcagtgacacgctccagcactggccacagtcgasgccaccacctgygaacacctarccagtagagcagacgtgtcctgctctttagagggtcatgcaaaagaattgtcccccaraaaaaaaatccccaaattatcccagacaggcagctttgtggagataamaaggtgggtgggagaggaaaggagaccccargatgtcagggtggcaggccacagggcctcacgctgtctgtgacaagccctgcctctattccatggccttgggccactcatggagcctggcagatgtttaccctgtgtccatgggtagggggcagctgtcctgggcacagtgtggatcaaaggtggtatccactgartgtctgtaggtggacagtccccttggagtttaggatcctcgtg

SEQ ID NO: 1373 - DNA, 571 bp, Rattus norvegicus
  misc_feature (495)..(495): n is a, c, g, or t
tttttttttttttttttamgtaacaggcattttattgggtggcatctgagcaaatcccattgccacctcacagtgtakaaccagtagaactaagaatactccagcctgtgcccccacccagccacctgccccggcccctcatgggaaatgacasagatcctggaaggacacagaacccacacccagcccaggtggcaccagcacccacccccatccatgggccagtggcactcggggaatggccacaccagctccgggtggggtcccatgcaggcatcctggaggaagacccaacactttcacagtcccctaagaaccatccttgaaagtcatgctttacagatctctgaccactcagaatccaagcaggaggcatctgtgggaggaatcgtggtcacagattggctgcgtcaaaaaaagaatgggccagtgagggactggtccacacagagccactcycaggcagaggaggattctacaggcaacgtcctcggnccatgctgacaaactcaaggccaggcctctgggggctgggagaagggagggcaatgtctgccttgggctgtgtcac

SEQ ID NO: 1374 - DNA, 432 bp, Rattus norvegicus
tttttttttttttttttaaaggggagcatagtctttaattgtggtacttaagcaagtaggacagcaaacagaggaaagattacctccgtgctgtggatgtaactaagacatctgcaatgctggggtgttttttacaatccctttcgtaagtatgaaaatcggtaacgtgagtcctcagtggagttattgtaggaaagcccttctagtcagtattgcttttctcctcaagaggagcattatttccatcgctgcttttgtctcgttttcatgttcactgactttgcctgagcagctccacctcttaccttggtgccagtgtgtctaagaaagcccccctcccctccattccttgtaatcaaacactgagggcaggaggatatggtgcctaggtgacagaacactgcaatttgaagtggggcagtcctcgtgccg

SEQ ID NO: 1375 - DNA, 815 bp, Rattus norvegicus
ccacagctcagaatgctggaatgttggaagcagatgggcgatggatcaagctaagtacaacctggttaatgagtacttcctggtgggggttactgaagagttggaagacttcatcatgctcctggaggcggctctgccccggttcttcaggggcgcgacggacctctatcgtacagtaggaaagaaatctcaccttaggaaaactacagagaagaaactgcccactaaacagaccgtcgcgaagctacagcagtccgacatwtggaaaatsgagaatgagttctatgagtttgccctggagcagttccagttcatgagagcccacgcggtccgtgagaaagatggagacctctacatcctggcccagaactttttctatgaaaagatttaccmtaagtcgaactgagcgcaggtgtgkccagagcactcttgatytggaactkgactctgtgmccaccttctcagccccactgcgcgkccgatgcgtgtgtgagctgcccgcgaagctaagagatgtcttagatgtcttgatgtcaagagaggagatgctgrcgsccgtcagaggtcaaggagagttcggctctcaggcagttcactctctcgwtktgttcccattttcwtgatagttacactctcctsccggkgcagkgaggggcctcgaattgcvtacaacatacccmcggkgcagggaggrgmswsgsawkgssyrtrmsvcmsccgtggaggttagagggaaggcgagtaccattccagaagaggctctgctgctcttgcttttgatgaggctttcctcacctctccttgaatgaagatga

SEQ ID NO: 1376 - DNA, 658 bp, Rattus norvegicus
tttttttttttttttttyccattttggaaaggtttattgtaagaaagccaatgcgggggtggggagtggaascgggcacctcactgggcagtcagagtctcgctggccttgtcgatcacactctggacttgggtcttaagcgtctccagcatgggcatcagactatggcgcaggtcctccagcgcaggtctggctttctcgccaagtgtcttcaggtgggttttggccctggtgtggtactcgttcaaggtagggttgctcttgagctcagccaggcgctggggccaggctctcgcgcatctgtkcgctgtggggcgctakctgtgtgcgcagagagtctacgtgtgtgcgcatgcggtcgcgaaattcctcagccacaggggacagtctcccttgcagctcctgcagcttctggcgcgcgctctcctgcagctcggcgcccagaggcgccaccttctggcggtagagctccacatcctctttccatttcttctggaattcgtccaggtagggctgcaccttctgtttcacttcctctaggtccttgttcatctcctgtctcacccaatctgtttctttctccaggttatcccagaagtcccgagtcaatgggcccagccgttcctgcagctgactaacggcctcgtgccgaattctt

SEQ ID NO: 1377 - DNA, 309 bp, Rattus norvegicus
tttttttttttttttatcaatgaatggtgtaagaatcaagtctcttgtttttttgaagaaaaaaagcaatattccttgaagagcaaggaggattgaaggattttgtttgagtgaggaacagagttcataactagtttgttgatacttgtaaggttggtatctttgtgggccttatatactctaaaatgaaccttggtgcttgtgggccattacttgacctatgaatctttaaggcacaatcagttatcttttacatataaagatcgcttgagtgatggccaccgctccttccctccctccctcgtgccg

SEQ ID NO: 1378 - DNA, 672 bp, Rattus norvegicus
ttttttttttttttttttycaacacttgatattttgaagaaatgasgccagttatcttctataacgcttcacattccagatctgtctgatcgtttctttagtggtgtcatttagtgctgctctatgccagcatttcctgcaaatgagaaattagaaccagaggcttgacgaattccagttaaaccatgtcctctgtggacaccagttaaacttgactagagcacttcatatgtcagagtgtacagtgcagtatgcctaggttatcccatatcacaataaaaaaaagtctgctggtctgcctactagtgatataaaatggcatcatatcctaaagctctttattgtgaaagtatgtttcttccacacaaccaaccagttaagtatgagaattctagtagggatgtagattaaccttttatctaatagttttggcatcaaaattctttaatattgattgttttacattaacctttcaactttctaacatctgaactttttaaatgttcaaaaacatttgttttccacaaaccataaagttttacaaaagtaagattcactttcataatgctggcagacttactccttaatttaaggaatgtgagcaccttccttctttttgattttgtctaaaaccctgtaaggaaaataaaggaagtcctcgtgccgaattct

SEQ ID NO: 1379 - DNA, 612 bp, Rattus norvegicus
  misc_feature (497)..(497): n is a, c, g, or t
ttttttttttttttttgtgcwgccataggtatctgccattggttgccaaaaaacactctgttccctcttcgggcgatttcactggggcgattggttgagttttttctgtgtggatgaggtgaagtgagagcccaagagagcctgttgcactgtggattcccatgtcagtcatgaagcacccaccatgagctcgcattgatgctatttcttaggtctgttgatctgcgcatagagaggctctggctcccagacctgcgctatctagctaccgtcttgtggacttatattatcaccactgggctcaccactgggctccccaaatggatcactggtggaggaggcctgtgatccatcargagcttcttgttcttcactcttgctgggactttcaaagccttcttcaaagatgtcatctgcggtcggatcactgacgtgggaagctgatgatttggatggagagctctgcctaggggccggggttggaggtgagttggtanatggtgtggtacaagtcacaggggtcaagttcaattgggagatgtcaaagtcatcacagtcgtctgtatcctgtgccaccccgactttgttgaagtaactggagaaggctctgag

SEQ ID NO: 1380 - DNA, 511 bp, Rattus norvegicus
ttttttttttttttttttaacgttgaactctttattcaaaaattacagacgacggttctgcgcacagtggggtgcgaggtcacgtggggtcacaggatgtcatgggagtgtcgaggttgtcctcagtcgattgaactcaccgccgccgaggaggtagtcctcagttgcgtgatcctgtgtgaccccgggcagggtgcacagtatgtcccacgaccctgcccacgcacgtcacagcggatctagggtgtcatctgcgaagtcgtagggatccggggagctgggcggggactcagacccctcctcccacgcgtcatcatcctgtgcctcctcagcaagcaggaagtcgtactccgctgcagcgaacctatcccagtcggagagggtggggtcggcatccggggcaggccccgctggctcccgccgttcgtgctccaggaatttgtcagcattgaaaaaggcatcaaagaactcgcccgccaggccgcagcgcttcaggtcgcccagcgtgatc

SEQ ID NO: 1381 - DNA, 776 bp, Rattus norvegicus
ttttttttttttttttttaaactgccgagagagtttattgagcagtgagcagcgctacggtgccagtcatatccagggaggaagagatggtatttcctgatcagtgtttcctgcacatctgttccctctgtggggtgcacaggctgggaaactgcatgaagcaccagaacggtaggagaaactttagaaacgtaaagtcgtttttttacagtagtcacagacagcagcagttctgtgatgaccgccggtacctgaagatctctctctgccckggacttcttyctctttagcactccttaaaaattcctcattaattgacaatttcatagactagaattggacatgattcttaaagcttaakktkwywktwywkywttggatgctaaaattaacagcatgatttttatgatttttagaagagttgtgcctcatataagacattggagcagaactttactgtactcgcagtacatgaagtgggaagctagctgattttacatcctttaaatgtttttygcttgtttgtttcccccttacccactgaaagcacaggaaactgagcaaatcacctaagtggagactatgacacaagcgcaacaaaggccatctttctcccccaacatctcctctccctttcaaaacccaatagaccattccttttaattttttccttaactggtcctggaccgctcagcagtctgcatgcttgtactttcagaagaatcgctgtgggcttcagatctctcttcccattcacactgtgtgctcagatgcag

SEQ ID NO: 1382 - DNA, 696 bp, Rattus norvegicus
ttttttttttttttttttgaaattctcaggagactgtttgggaaaaagaggtcccacatacagagtgaacatgctaggaggattctgtaggccaccttacttcatactccaccatgcgcttgttggcaaggtcagctttgttccctgccaaggcaatgacgatgctagggctggcttgccgctgtagttcctttacccatgtctttgcccgggcaaacgtttcctgattagtgatatcatagaccacgatggcagcctgggcacccctgtagtacatgggggctaaactgtggtatcgttcctgcccagctgtgtcccagwtytmaaacktsmcwgwtgtsycwtcwagmcayacyrastgsgtragsamksmcctccaatggtactttcctgsyattcrtggaactgtcctttgacaaaacgtaacaccaggctcgacttccccacygcagattctcccagcaggaccaatttgaactggcatattttgctggcctggggctgcccattgggcctggctgtacttctgctagtcatagccaggttatcaaagtaggagaaggtagagggaggggaatgccacaaattggcaaaggggggaggggaaagggagggacttccaggcctcaacagtcctggggctccgtctcccccgtcgggcccaagcctgtgtggaacagacaaacagccctcgtg

SEQ ID NO: 1383 - DNA, 456 bp, Rattus norvegicus
ttttttttttttttttttgaggtttcagaatgcatacatttattaggttaaaattttcattttcaactgctcttggatgaaamccaaastacatataccatttttccatastaaagagagaawggaataattggaggttacccacaaattccagaatttcccasttattgagaatgagagatgttgttaatggaagaaatmacasaaagcawgaggkggtagcaagaaacawtgsctgccgggcatacagacttttamtawtatattgcstgaaggaagagggaggcttakccattgaatccatagagaatattaccacaggtttcatagtatggttggcagatactavcagccaggtgggttggstarcakaatctgtwmccataactcagtwaagggaagccagagactccataattcagaawkycmaagccactgatycctcgtgccgaattc

SEQ ID NO: 1384 - DNA, 1415 bp, Rattus norvegicus
gcggctgggttctccctcttctcgccgcggatacgtctaactccggtccgccgttcgtggcttgtgcgcggggtggcggggcgaggggacgaccggccggaagagcgcggagccacaaacgtgtcctcagtagttttagtcctgctccatgctcgggcccccgccccgacactgactgcgcccgggcttatgcgcggcgcgccccgggagtcgtagtgcatccgcgcctggctcccggagcgacgggggcgcggggcgtcaatggatcgccactccagctacatcttcatctggctgcagttggagctctgcgccatggctgtgctgctcaccaaaggcgagatcakatgctactgtgatgccgmtcactgtgtggcaactggttacatgtgtaagtccgagcttagtgcctgcttctccagactccttgatcctcagaacaccaattccccactaacccacggctgcctggactcactcgcaagcacagcagacatctgccgagccaaacaggcccaaaaccactctggtmccaccatgcccactttggaatgctgtcatgaagacatgtgcaattaccgaggactgcatgatgtcctctctcctcccaagagtgaagcctcaggacaaggaaacagataccagcatgacagcagcagaaacctcatcactaaggtgcaggagctgacttcctccaaagaactgtggttccgtgcagccgtgatcgcggttcccattgctggcggactgatcttggtgctgctcattatgttggccttgcgaatgctgcgaagtgagaacaagaggctgcaggatcagcggcagcagatgctctctcgtttgcactacagyttccatggacaccactccaagaagggacaggttgcaaagttggacttagagtgcatggtgcccgtcagtgggcaggaraactgctgtctgacctgcgacaaaatgaggcaagcagatctcagcaacgagaagatcctctcccttgtgcactggggcatgtacagtggtcatgggaagctggaattcgtatgacagtcgtgtytgaactgtaaatggaacccttgaagsccytytgagttctgctgacaggagcacttttatctggagacaactaacttgcttagtcatcctggagaaacaaaatgacctytgaaaagagaaccttgggtatttcttctgaaggattatttgcacagactctacagtcaaatggattaatktgcyttaaaattataataagcagagagaggactytgcacactttcccakggttyttagtgtcccagggaggcmcaactgactgaaataaaagcactgtgctctctgtaagctcctacatattcatttattgtaamgattttttaaaatatatatatttttgtccgaaaaaaaaaaaaaaaaaa

SEQ ID NO: 1385 - DNA, 899 bp, Rattus norvegicus
gcggccgcsrkracagcccggcttcggcgcgatgaaccgcggtggcagcakcgcgtcggcctcggycaactamctgctctgcaccaactgccggaaagtgctgcsgaaggacawaakaatcasaatgtctcawcscctgacaagaggaccaagtgcctttattccakagaaggaagttgtccaagcaaacacggcagatgaacgaacaaactttcttgtggaagagtactctacatccggtcgcctggacaacatcacacaggtgatgagcttgcacacgcagtacctggaatctttcttacggagccagttctacatgctgcgcatggatggcccccttcccctcccggacaggcactacatcgccatcatggctgcagccagacaccagtgttcctacctaataaacatgcatgtggatgaatttttaaagaccggagggattgctgagtggctcaatggcttggaatatgtaccacaaagactgagaaatcttaatgaaattaacaagctgctggcacaccggccctsgctgatcacgaaagagcacattcagaaacttgtcaaaactggagaaaataattggtccttgcctgagctagtgcatgctgtggtcctcttggctcactatcacgctctggccagctttgtttatggtagtggcatcaatccagagagagaccccggaatcgccaatgggttcagactgatctcagtgagcagcttctgtgtgtgcgacctggccaatgacaacagcattggaaatgcctccctggcaggcggcaactttgggattgtggactctctaggtgagctagaagccttaatggagaggatgaaaaggctccaggaagacagggaagatgaagagactactccggaagaaatgagcacgcgtt

SEQ ID NO: 1386 - DNA, 635 bp, Rattus norvegicus
ttttttttttttttttttgagtttgaggtacamgwkkatttttttcaaaaggcatatagacagggaacamagtaaacatttacaggtggtaactgtcctasacctgctccgtgggtctgtctaagsacgtcctctttagtaawcakcatcttcatcygagtccattacwtttcktctgttgaatttcactgttgttttcttttctgtctgttggctgactttctcgagtatttctawtmmcmcttgttcwgacaccytmccastcagcyvtcyayamcstgccatctgtataaggtagttctccactgctttcgttttctcaggcttcacaagtgctaagttacttaacctggcccgggctgactgatccagaacttgggctaagatactgtttctcatttctgcttccctttgttttgcttcctgttgggctgcatcaccaggatctccgtgcttggcctgcagctcggccagcctctgctttctcagcgcctcgagttcttcgtccgccatggcgcggctgtccaacgtcgcgcargcgcagcggccgtcgggtggtcgcgcagccgcaccggccctccggtacactcggyyggaatcgcttcagcctgagactcgagcackcstsgtgccga

SEQ ID NO: 1387 - DNA, 432 bp, Rattus norvegicus
ttttttttttttttttttaagtwactcatcattatcttattattaacaaaataaagcactatctatgtttacagtcataaaaaaagaaacagcctggagagaagtgggggctttgaggatggagagaagacgggggcagacacagactccacatctggscctgtgggatttggggttcccgtactgatccaagggctatttagatcttcagagttaggtgacaatgggatttgatttccttasggaacaaactttgtgaaactgatcasaggctgagatccagtccctagtatagagtgggggaggggagggcaggcaggtgaggggcacggctgggtgggagaggctgaagcccaggagtcttctcaacctcttccaagaatggggacccccccgaccctgtgctcatgagggaggaataaagaccagctg

SEQ ID NO: 1388 - DNA, 592 bp, Rattus norvegicus
  misc_feature (579)..(579): n is a, c, g, or t
tttttttttttttttttycaaaaaactaatttttattgggaaaactgaacaaacaacctacccccttcttcaggattggggaaraaractggggatctgctccctatcccctatgtacaatctctgagattctgtcctgagaaggggtccacctgcaggagccccttttcctctccggactccgcattctgttwaatgrgctcaaagagaacargcgctcrccccatcttctcaacagcactgcagacgtccgactcargatgaggaagctggaakactgatcaaggttggcttcggggatggagtgctggaccacmmkcstsmcccactgcctcctggtcaactcagaggctacgtggcttcaggccctggggacaggaggccacccccgaaggctgcctctcggtactggttagggaacatgttgctgcccacaaggctagcagtaccaacatccccagggcccggagctgcaaaagagtccagcgacaggggctctgggccaggagactccacgaccgtggcccctgcacccccattacccaccacagcactggcaagtggtggtgctgggggtancaggtccaacata

SEQ ID NO: 1389 - DNA, 568 bp, Rattus norvegicus
ttttttttttttttttttkywytagaattttcccagtgtatattaaaaacatatatctttacaaagaagcttagtcttttctggaaatcatttctactagagattcataatctgaatagtccttcagtgactgtatcaggtcatccagaagacagtctccttgcatgaagctctcaaggtcatgtagtgatttgtttattctgtgatctgtgaccctattttgtggaaagttgtatgttcttattttctctgatcttcctttagwtccaacctggatctttcgagcrctgtatcttttagcagtttcttcctctagacgcatgctgtataaccttgcacgtaactttttcatagccagctccctsytctkcmgctgagatctttcttgctggcattcagaaataatacctgwrkrawgttatgaacwatkaasagwytrwmtryrrwawtctwcktkmtkatcmagswcyaytccttttctttctcaatctttttcttctttgacgaagcaataaaaaatgagaatcgaagagaagactttaattttctgtttgtttgttttctgaga

SEQ ID NO: 1390 - DNA, 637 bp, Rattus norvegicus
  misc_feature (629)..(629): n is a, c, g, or t
gctcgagcctgggccggattccggctgtctgaggggcgcggagacctgcaggagggagacggccgcagcatggcggcccgcagcgcaccgccctgccatccgccttcctgtcgcagccgcccggaccccgtggtccgcgagtgcttgctgtgagcccgccgcgcgtcagcccgccatccgcccgccctccttcccttgtcgmctctgccagcccgggggggggggggcggycgggcgcgccagcakccacccgccggggcccttggaccatggaggacgtgaaactggagwtcccctcgctcccgcagtgcaaagacgacgccgaggagtggacttaccctatgagacgagagatgcaggaagttttgcctggattgttcttaggcccctactcttctgctatgaaaagcaagctacctatactgcagaaacatggcataactcatataatttgcatacggcaaaatattgaagcaaactttattaaaccaaactttcaacaattatttaggtatctaatcttggatattgctgataatccagttgaaaacataatacgttttttccctatgactaaagagtttattgatggtagcttacaaaatggaggaaaagttctcgtccatggnaatgcagg

SEQ ID NO: 1391 - DNA, 429 bp, Rattus norvegicus
ttttttttttttttttgtcacaattcatttttattaatagaaaataaacacttattccagtttcaaagttgttatacttgaagttgctaatttaaaaaaacgaattttaaataatcacttaataatcctgctttgactaagacaatgaaatgtggctttaaaaaaaaagtattcagcaccatttgctcataggtctttcagagtttgttcttaaagtttctggaactttcctgtctgtaaagtaacaggaattactgagctacattggaaagcctctctgggacaggcagtggggagttaagcagtcatcataaaggaatcagtgtacattcagcatggtgacttgactacacaacaatcccttcccctctactgtagctcaagagagacatgcttctaaccactgaggtatgcctcgtgccgaattct

SEQ ID NO: 1392 - DNA, 546 bp, Rattus norvegicus
gcggccgctgttgctgccgggacacggygtccgggacgctcacagtcccgggcctctcgtcaagcccttcgagaccgcctcggtcaagtcggaaaattccgaaracggagcgccgtggatacaggagcccggcagatactccccgccgcccagacacatgagccccaccacctgcaccctgaggaaacacaagaccaacaggaagccacgcacaccgttcaccacgtcccagcttctagccttggagcgcaagttccgccagaaacagtacctctccatcgcagagcgggccgagttctccagctctctgaaccttacagaaacccaggtcaaaatctggttccagaascgaagggctaaggcaaaaagactgcaggaggcggaactggaaaagctgaaaatggctgccaaacctatgctgccctcgggcttcagtctgcccttscckatcaactcccccttgcaagcggcatccatatacagcgcctcctaccccttccatagacctgtgcttcccatcccgcctgtgggactctatgccacgcc

SEQ ID NO: 1393 - DNA, 523 bp, Rattus norvegicus
gcggccgctggccgggaggctttggtgggagagacgcgatcgccgatttcggtctggcgccccttctgcggccgggacccargcctttcacatcagctctccctccatcttcattcataggtctgcgctggggccgggacgaagcacttggtaacaggcacatcttcctcccgagtgactgcctcctakgaggacatttaggggagggcagaggcctgcagtttggcttcacggctggctatgtggacagcaagagtcgttttcgcggaagccgactggcagccaggcctgtcgggccccccgacgccgccccatttcccttccagcaaactcaactcggcaatccaagcacctagataccagcacaagtcggttaatccctgtctggactgagcctccgttggcttctgaactggaattctgcagctaacccttccacgactagaaccttaggcattggggagttttagatggactaattttattaaaggattgttttttttcctcgtrmmraaacctcgtg

SEQ ID NO: 1394 - DNA, 950 bp, Rattus norvegicus
ttttttttttttttttttkkwkwkwywtgaggggaaagactttattcacactgggggaggccagttcccaaggstgccatcagaaatgcaccatcaccacagtwasagtgacccaccacactcaagcccacagcagtgtgcctctgttctgacagagtgccagatgtwgacacaatccctaagaacttacttcatcagcttccaactcggsctcgcttctgctctcttttagcaccactacgacattctctggscttcttccttgaaatcatttcctaawgtatttttttactaywkwwwttktwkwttwwwaacccttaaattgtcctttattggtgcctataggagtaagagatttgatggtttcctcctaagtcagcacaaagcagggagacaccaggaggatctcctcatctctaaccgaatcattttcacaacagcagcgcggtgggtggccagctggccctggctctcctcataactcccccagtctccgctcacttggacttctggttgccctttgggggctctgatgctcccttccttgcctcctcctcggggatgaacacactgacggtgaagtcactggtctccgagccgtatttgttcttcaccamcagcccgtacttgccggagtctgccgtgctcaygcctgagatggtgaagaaggctgtcttcccagcctcaaacttgaggctgcagtggtcgtcggaggtcagcggcttctcatttttcagccaggacacctcaggggttgggtcaccccacacattgcaggtgagattgagtgccttgccctcctgaatggtgacaacatccgggagaccgcccagcacccgagcccgatttttctcggcaatggcagcttgttttaacctctggaattcagcaaaggcttcatcaaatgcttgtccagagagatccaccgacttctggtgtccagcctcgtg

SEQ ID NO: 1395 - DNA, 491 bp, Rattus norvegicus
ttttttttttttttttttgccttttaaacaaaaggtatgccatatatttttattaaatcatagaaaacatttgcatacaaaattttccattttggggaaactagaatgttaaacatctcagtaacaaaaaagcttgaaagatacatctctccttaagcagagacgacttttaagtaattttttaaattgaaataattgctaacaggttgttggctctctctatctttaagccagggggataatatctcttataaccgtcaatttcctttaaggatttttaaattaagtcaacatgagtcaaacagttaacttgaactctgaatatgaaatcaacttcttttaaagctgcatagatagccctttgactactgtaaatgcccaattccaagagacattctcacttcccagggctgattacaaatcctttctaccatgggaaacatgtttaatggtggagaacagatcttcggataagttaaatattaagacat

SEQ ID NO: 1396 - DNA, 577 bp, Rattus norvegicus
tttttttttttttttttyaakgtgtgtytgaaggttcccyagctgwcgasactggactcagggaggtggagctgrgacacctawgtgaasgctgtcctgtcaytccgatamtttgctttgactrctggggtggggacggtttaatttccagtgckawcgattttttgttctaaatcttcaggccccgatgaattgagaataaagagccctgggcacagaggataggactcaagcttgttgggattctgaacgattctctctgatgtcattaagaatgatgaaggtgggtggccacatggcttcagacccgagtcagctgccaaaatctgtgtgcaagagtgcgacctaagaggacattctcgtggacggmacaggagggtgggcaragtgagggtggggccggcatcgtatctacacacattctctaaagggacaagaaagtcatatctctgtgttcagtttcctggagggggcaaagtcttcgcgcctaacccaraatgactcctcgctcgsactctccaggcctccgttgatgcccgaaagggccgcttgcttcttgagctgtgtcatgcgggag

SEQ ID NO: 1397 - DNA, 455 bp, Rattus norvegicus
tctctgcgcgacacagtgagatccagcagttggagcgcagcatccgtgaactccatgagatcttcacttttctagctaccgaggtggagatgcagggagagatgatcaatcgtatcgaaaagaacattctgagctcagcagactatgtggaacgtgggcaagaacatgtcaagatagcgctagagaatcagaagaaggcgaggaaggcactgggagaaacagagacccagcatttgtggaggcagggcagscctccagmtggacccaccctcacactgscccttgtgcagaagggcatatggctcttctgggttggcagctgctcgttcatggagtccttcccttcaggccacaatgcctgggagaaagttkccaatgtcctgtttgtctgggacatatggttttataaaaaattaaaaaarcaaaaaagcaaaggccagaaaaaaaaaaaaaaa

SEQ ID NO: 1398 - DNA, 535 bp, Rattus norvegicus
tttttttttttttttttyyyttwaackgtaatcttttaatttatgtccttgctcgcatggacaagaaaatctgcaaaatccagtgagtagcattagatggcgtgtctagtgtgggtggtatggagggaactttagggctctgtgcggcagggaggggctgagagggcagggactcggcccactgcaggaacaccgggtgggccccaatcacaggtttgccatcagccagtccagcagctgcagccgcgtgacatttcccactgcctcatccagctgtcgctccttctcatacctaagcaccgactgcagaacctccccgacgcttcggtctttctccacagcagtggctgagagctgaagcagcttctcctggattccttcatcgtcaccagcgaagtacaaaatagggacattgagctctgaggcagccacccactgaaggacagcttgcagctgcttgttctgaacagtgtcagccagattgtggttgctgacgatcaccttggggatttcacagccctcgggtggctgtcct

SEQ ID NO: 1399 - DNA, 535 bp, Rattus norvegicus
acaatctatatggctatcccgagggtaaggacaccctgcgggagactatcaagttcatgtatacagactgggcagaccgagacaaccctgagacccgccgtaaaacactggtggcactcttcactgaccaccagtgggtggagccttcgstggtgacagctgatctgcatgcccgctatggctcacccacttacttctacgccttstaccatcactgccagagcctcatgaagcctgcatggtcagatgcagcacacggggatgaagtaccctatgtttttggtgtccctatggtaggtcccactgaccttttcccctgcaacttctccaagaatgatgttatgctcagtgctgttgttatgacctattggaccaactttgccaagaccgggtaaggagaaaatgggtgtcttcttctctgggaccccagcatgctcttacctttgctcttctatctagcctcttctattagcttcctctctgtgcattttcctaaagcttgcctgttaacacctttwaaaaaaaaaaaaaaaaa

SEQ ID NO: 1400 - DNA, 1070 bp, Rattus norvegicus
  misc_feature (40)..(40): n is a, c, g, or t
  misc_feature (92)..(92): n is a, c, g, or t
  misc_feature (164)..(164): n is a, c, g, or t
  misc_feature (236)..(236): n is a, c, g, or t
ggcacgagctgacctgtgggagagatggaggattacagantatggagttgcatggcatgatcatgcttaggatctcagatgacaagtttggncggattcgtcttcatgtagaaaatgaagataagaaaggggtgcagctgcagacccatccaaatgtggataantttctttttactgcagagtctctcattggcttgaaaaacccagagaagtcatttccagtcaacagcgatgtnggggtgctaaaswggagactacaaacaacagaggaatcttttattcctttgacaattaattgctggccttctgaaaagtggaaacggctgtgatgtcaacataggaatatgaactacaggaagataatttagagctcaatgatgtggtcatcaccaycccactcccatcgggtgttggtgmacctgtgatcggtgagatcgatggggaatatcgacacgacagtcggagaaataccttggagtggtgcctgccagtgattgatgccaaaaataagagtggcagcctggagttcagcattcctgggcagcccaatgacttcttccctgttcaagtttctttcatctccaaaaagaattactgcaacatacaggttaccaaagtgamccaggtagatggaaacagccctgttaggttttccacagagaccactttcttagtggacaaatatgaaatcctgtagtaccaagaagagaaagctgaaaagcaaggatttcagattaataaagaagaagccaaaagtggctgaagagtttttccaaatttacaagccattggagatcccctcccccccttttttctgatacagtgcacgttctctgcgcgcaaggaccctcaactcacacccagtgttgtggtgtcacagagacatttttgacaaagacatgacgctgacataaagggaaaggctgctgatttctttggcagatcttactggccagcaggaagccatctctccagggaatgccccagtaaatagctcttctgccttcacctaagtctccctttattttaagccctaaatacaggtatatttcataaaaaaaaaaaaaaaa

SEQ ID NO: 1401 - DNA, 603 bp, Rattus norvegicus
ttttttttttttttttttcakcacttaataratttaataaattaagaggaagtctcacaaaactcagaagaatgtamcacacsggaataaggaatawgacascagtttgcaaccattcacaaaaagtaccgtttgacaaaggaggaaaatcacaggaaataataatataaggcagtcttaaagagtatacatacataatagcacatcaaaatgatttgacagtaaattcaccacgtttacagttgtcacatgaactgttttaaaacatttataaaagtttgtagatttaacactgaactgtaagatttatttccaaatggttgtttttatatagatatacttcataccaaactgcacggaacttacgaatagcacacaagttgagaataattgctgtgttgggtactattacgtactactacttgatgacataagaattattaacaartgtgctataagcgattatcattcamcttattgctagtgctttaggaactccatggtttatagtctatgtctctgtaaaacatatgctatgagcttgccctgatacttaagaaagaaatcagatgtttccaattttctctaagacaatacttcaga

SEQ ID NO: 1402 - DNA, 484 bp, Rattus norvegicus
ttttttttttttttttttkykyktttwacaccgatggackttymytttcctagctgacattgtaaaactccaggtagttgggagttaaacacaacccaccgtgggaaaagtaaacagactttcttaaattcgctggtaaaaaattctatcttgcccgaagaggtcgtgtctaaracagcaaatgagaccacccacccaccctttccgcggtagtccacgccaggcgatcagtctaggctgaccartcccggggtctccagccacytcrwkcmrctctgatcgcagcaagatttgatttgttcagttctggatctcagccgaaggccggctcgsccacagcagcctgtgggggcgaggtgactcaagtcacttcccagtccctagggcgggtccacaccctggcctcstsccrggccccacacccacgcaaggcaacaggaagcacccgcgtctgtcccatgacgcaactcctgaccgcttgcac

SEQ ID NO: 1403 - DNA, 499 bp, Rattus norvegicus
gcrgmcgctagcgccgcctctcmgaccctgtcggaggacgaggagccggaggaagaggaggaggaggcggctacagcasaggagggcgaagaggagacggtggcatcgggggaggakccgctgggctttctgtccargatgcccccgggccccaccggcstgswmtgcagtgccmtggaccgcsacccagacstgctgcccccttcgggcacgtcasatttcgaattcccggwctactgcacccctgakgttaccgasatgatcgcargggactggckcccgtctagtatcgccgacctggttttcacctactgagcccaccgtcagcggggcgcgcacgcccccaaaccagctgtttacatacaggaatcagrwawwrrrrmccctcggmggccgarkytggcaccccatctcccgcgcagcctcccccctcctagtcgtgcccatccccccacaaatccagacatacccctcccccgcagacacaccccaaggcctc

SEQ ID NO: 1404 - DNA, 534 bp, Rattus norvegicus
gcggccgcctgtcacccatcttggcgagcacggagctggatgacgtccaggacgatgacgggcccctctcccccatgctctacagcagctctgccagcctgtcgcyttccgtaagcaagccgtgtaccgtggagctgccgcggctgactgacatggcgggcaccatgaatctgaacgatgggctggccgagaacctcatggatgacctgmtagataacatcgcgctcccgccctcccaggcgtcgcctcctggcgggcttatgcagcggagctccagcttcccgtacaccgccaagagctccggcctgggctccccaaccagctcctttaacagtaccgtgttcggacmtgcgtcactcaactccctgcgccagtcgcccatgcagaccatccaggagaacagaccagccaccttttcttccgtgtcgcactacggcaamcagacactccaagacctgckcacywyggacycsctcwgccrcmkcgatgtcatgatgacccagtcagaccccttgatgtctcaggctagcaccg

SEQ ID NO: 1405 - DNA, 552 bp, Rattus norvegicus
tttttttttttttttttywtkwwwwtawagttgtccaatttattttcattaggcggccattttatgaagaactcctaagatttgtgtttgccgacatgcagagttagcagtaatagttcagctactgtaaacactgtgctcagaagcaccaccacgttaagttaagactacagacgcgattactccaatccttctccatctacatgaaatcagaaggttctgaacagctggytgggaaggtagccaaggtgtakgaaagatgtctgtgcttccttttcaagggcagccaactcttgaacggtargtgccaggatgtccacatggsctttatagttcccaccgccagcagcycttttctgaccatatgtaactttcccatcaaactcatccactggaacctttatatctggctcaacctgggaaatggkacagttcargtgttcttctatctcagaaagtagctgcawttcatbgtrccagatagtacagccgccatcttccttgagtctagystyrtrscatcccttcccacggttgctgcatacgtgatac

SEQ ID NO: 1406 - DNA, 484 bp, Rattus norvegicus
  misc_feature (471)..(471): n is a, c, g, or t
ttttttttttttttttttaaacaaacaaaaaagccaagctttaatacttcaaacctgtgaatacagtgtcaaaaagcaaattaaaaagataattggggattctgccctcttcttctgggtttccttctgattatttaatttcgtctaaccaagtaaagctgatccagagagagctctgttgggtccactcactcccatcctcactgtccagcacaatattgctcctgtggtggccgcgcctcatggacgagaagcagcgtttgagaacgtctggatttgggtgcaccttggyctccgggcttctgtcaccacaagggcgagggsccctccgacgccccgtagagttctgccagtttccggaagcgaggtccccagtccgtgaggaaatcaaagctctgctctgagtccgaggtggctgactgaagcgagctgagcgagccgggcacggagccgtccccctcaaacatgtangtctgcaaggaat

SEQ ID NO: 1407 - DNA, 726 bp, Rattus norvegicus
tttttttttttttttttgacatttcttaawtttwttkwwtwattcttggctgggagaggaaagatcacaggcttgaacaagagtaaagacaaaagaacaattaattgcaaatgattacaaaagtaatttctgaaacagtttgaaccactgctaaacaaaactttagtgcactttgaagttccgagtttgataaatgaacattaaattactcaagagcagaaagagagrttactactacgcacagtatacgaccttagtgtgctaaatgagcaaacccaaataagtggccacagttactcaaagttacttytacyaaatattcattaagtgaacaagaatgcagattacttgaaacacagcacaagtaactgaaggcagcaaatccmsccacacagaacctggcatttaaatagcatccaaaccgtacaacagattgagataggagcctgcagaactgcggctcttaactataggaaaggaatgtacagatgtcaaaataaataaatagagaggcaggagtgaccagcaccgcgcctgcgtgtgcagagcaggcgcaccgtaaacaaggggtgcctacagggcttgcgctgaagagcaaagcgcacttgacttgagtccgccccttccgactcccagacgctcccacagttctccgtgctgctgacaggcagacacggttttaaacggagagtattttccctacccgtgtgtggacccaacctcgtg

SEQ ID NO: 1408 - DNA, 539 bp, Rattus norvegicus
tttttttttttttttttgataaracacatggtttatgctctcagttggtcagggaagttttagcagacacccagcacataactgtcccatacagaagtgacccagttagaatcaggagactttgtccagactcaggaggtaktctagggggctccctggagcagatgatattgaaggggtcctccaaggagtccagtggtagtgcataagggagagaccastactgaggaccctgaacccaktcagggtttcagagtatcagttcartgcacaaatagcttggttgttccaagtatggagagagctaaactgtscttcactcccctgttscatccatgtrcagaaactyaaaagacattgcttgacggagctgttctgaatcakgggaggtgagcaaggagcacaggctcttacaccaggaaggccacaacgaagtagggtgacagcaagcccagattccataagtggatgcagaaaagtctggactccatgacaggcaggtcagaagcccaatggatatggtcggtccagccctcgtg

SEQ ID NO: 1409 - DNA, 520 bp, Rattus norvegicus
tttttttttttttttwtaaaagagatagcttggttttatgaagacagatgttcacttttatgttaggaaaatgtcagagctctatatcacaaaattaaacttctttccagaagacatcgcacgactcccattatcactctgccctctacaaaccccaagggccaggcttctcaccgctgtcaccagcacccagaacctagggaaacactgaactccacgtctggccagtgatctgaagacgtcatacagcaggggccaatacaagggtctgcggctgctgtggctgctccctcaactgcaacgactcctgacagacataaatggtcagccttggacgcaccatccggcctttcaatgcgttaaagagccggattccatctgcatggccacagatttggatcacgtcatctcyagttagtttcagtaagtctgcccctgagaagttggtgaaaagcctcgtgaacgtggaaaaccggtttcgatgcagccactgctgggcttcctgaggcgtggcctcgtg

SEQ ID NO: 1410 - DNA, 423 bp, Rattus norvegicus
cccccaaacccacacagggctgctgatgcaaggcggggagctggcacccctgggtgctcagtagctggcttcctcctggcagtaggacaggtattcaggggcctcgccttggccatcacccccggtaggagccccgtcaactgcagagccctgtgggcaatacttggggtcatatatctgccgccccagtccgaagacctggccgctctggttggcgccctgtgtgtagcccatctgcagggacatggaggagttgtcgcacttgtcggtgcccagcttggtgtcatagatgtgcctccgggtccctcgtgctgtcatgcccacctggctggcacacttattggtgcccatctggaggctgatggtgcagtggtccatggggggcaggatgtggttcttggggtcgtagagatgtccctcgtg

SEQ ID NO: 1411 - DNA, 584 bp, Rattus norvegicus
  misc_feature (516)..(516): n is a, c, g, or t
aaaaagggactttctccagcccatccatggctgtcagtctgtctccctctctcccaataaataaactgcttgggcctcagctccttgagtaggggaccctgcccttgcttcagagaacagggatttggggtatcggcccccacatctccccactctttgcttatwccccaggtttgccagaggcctcgataaataaataawykttyywttwwwkyttcgatcggaaaacctttaagcagtgctcttgctgccctgcaaacccagtcagccaagctgcaccacccggcctggctgacacaggattctggaagcaggcagccaccctgggcctcacagggcccctgcagcaaggacaccaaaagtgctgttagagcccaccccaccccaatgcgcacacatggactcatgcacacatgtggacacaccaggatgtgtctgcagcacacatacagatgtgttcaccttcattccccggcacryrcacatacacacacataaacacacacacaccccaangtacacagtgcgcagtatggggtgcatgcacatacactgtacaacatccctcccctttggtctgctca

SEQ ID NO: 1412 - DNA, 1008 bp, Rattus norvegicus
tttttttttttttttttccatagttatcccgtgcagaccagccagggtacagctgcatgtgaagctgtcgttccttccgggctagctcgtagtactttgcctgttcttccctggacagggcgtgccacctgcgcccgaggatctggttgatggctgcactctctttcaatgtgcactcagccaccaccttcgctctcatctccttcatatacaacatgaatgcattaaggggcttctttatgtggggctttttyttytyttyttycytcytggagtcctgatgctttgagctatggagtgagccgacgtcactctgtgaggactcctgcttgactgtcggtgtgacaatggccgggtgggggattccggtcgtgtgcaragtgtgatggggagggaccatgtggggagggaacctakacatagacgcgttgactgtcagcgctgtggggtaggggtgtctgaatcctcctgtcgtgattgggtacacaggctgaccttgctgtggtactaaccatcctakcggatgggggatttgtcctacggtgccgggcgacagcgggtaatatggagagatatctggagggtgcggagrccgtggaattcctgttttggggtcyacgtcagctggtaagtgcggaggtggatttcccggggtgaagtgttcattgctgtacgtgatgagaggtgtgagtgggtggacatggtgggggtgctgcaccaccggcactttgttcgaaacgatgtgtgctggcgaaggtgagcgggcatccttgagggcttgtctgctctggaggcttcctgcttggacatcgagcagaggccatttcatctgaagatactgaattgcaatctggtgttcaatcgttttgtacgcagagtaatgagtgctgccggattgaaaatggagggttcgggcggtgggcgagagcgatccgttggggaggtaggggctcgtcaggtcggggatcatgatgaaggggtagccgggatacggtggcccccctcgtg

SEQ ID NO: 1413 - DNA, 706 bp, Rattus norvegicus
ttttttttttttttttttcaattttaactctttatttgaaacaattccagagacaagttagttgtgacaacagtttctcactacaacacaagggtaggcatggctcamtgaaggaacaggccaggcacctcagtacaatatatacattttaacagtggctaaactgatgacagttataaaaacaccaaaaagaaggctagggaacagcaaagccaacagggaaagaactgggtgctccctctgccagacactaacttttctgggcccacaaaggtaagatgggrargagaagacgtadgcagtaggacaggaccstggcccacagctcctcacstatcttttgaccacaaaccccatcctggatggcctaggacccatagggtgggcctggctctgatgataggggtagaacatcggggaacccagccccaatccaagtgagaaggtcatttttgccttgggagctctgttcmtagaactaaagggaggcagttacagaggggctaagcatgttgacaccatggttcatgccatcctaagatggctgagagggacaaacacataaaccaaggggacaggaatcatctgcacaattggagtctgctccccatactgagtcattctctgcctttggggaaaagaaagcatttggaactcttgagaaactgtagcaccaacaagtggtgctccaacggtcggcctcgtg

SEQ ID NO: 1414 - DNA, 968 bp, Rattus norvegicus
actctgaacctcaagtttatggctgaggtggggaccagccggggactgctaccagaacacttcctgttcctggcccagaagatcttcaatgacaacagccttagcatagaggcctttcagcaccgctgtgtgtcttggtcacagttcaacaaggagattctactgggccgasrctksactttttggcagtggtttgatggygycctggacctcactaaacrctgtcttcggagctactggtcagatcggctgatcatcggctttatcagtaagcaatatgtcactagccttctcctcaacgagccagatggaaccttcctcctccgctttagcgactctgagattgggggcatcaccattgcccatgtcatccggggtcaggatggctcctcacwgatasagracmtccascmrkyttctsctagagggccaaggggaaggtggaggatccatagggactcagcccctcctgcaaccatcttcttatgggcaatcggggatctcaatgtcccacctggacytaaggaccaaccccagttggtgatcccaactggagaagcccagagacagagcctcttctgtctytatggacccgctctggacacctgctcatgcaggtgcctccgtctccagctgttccttggtcaagagaaaagaactggctgggagaacgtgtggmawawrraamwrmwrwrctctgtccttcctatcccgccaggccccccctttgccagcaccgggtgcaaagggatgaggggggatattcgggctctgtgatacaggctcstgcacaacacacacacacacacacacacacacacacacacacacacacaccccagaactgtgttgagccagggcctgggactcacacgcaaaacatagacactgtgccaaagacagagggcataggcttagggattggagctgggttcaggtgactctgggagaaaaaaaaaaaaaaaaaa

SEQ ID NO: 1415 - DNA, 709 bp, Rattus norvegicus
tttttccttttttttttaaagagaagtggagtttattccgatgaatgacagtgacccctggaggactctgagctcccacagaaatagcggaagtagatttgggagcacatacactctcggcccamtggtgatgtttacyagtgtcccatcagccccagccatgaggcggggagaatcacatgggacggtcgattgggctcctgaatacagcccatcctgtgcagagagagtaaggctaactaagcaaggctgagggtagggaggcttggggctcagccacatgcagcctcggscacctgttcacactgtgggggtccctctgcccggctagccatgctgtagtaataggtcctcattcgttgttccacagccacgaaatcgggacgatcctcccacttgtatatccagcagtcactcataagcgcgtacatttcgggcggacactctggagggcattccatcctcttaccctgcttgatgaaatccaggacctcagggcccttcatcttcttgtagggcttctggccataggagaaggcctcccacatggtgaccccatagctccagacatcactgcggctggagaacttccggaagttgatgcattctggtgcgtaccacttcagaggccacttccctgcagaacgggctgtgtaatagctgtcatcagcacccagtgccttggacaggccaaagtcgctgcctcgtg

SEQ ID NO: 1416 - DNA, 466 bp, Rattus norvegicus
tttttttttttttttttgtacgccaaacggccttttacaaaccgtagtaaacattttatttacaagttaaaggcctcctaagtgcagcttgtccttacgccaagacccctggtgctcagaggaacagttccactgaacacttcacagtgtgagctgcttgggtagggagaacagtcgaattctttctttggccagggaccttaaaactctccactctttgtggggaarggggttgtgggccttarggagccttggcagcaagagaaaaggcatgaaccccaaagaggctgcccacggcgtccggatcccatctcggcgacccttgccaccaacttaaagtaggcacaatctccagccagtgttggggaagctacacgccatgccctcggtccagtgtataaacctgcaagcggaacctgggcaatctcagggctttgaggaccgctggtgactgagggccctcgtg

SEQ ID NO: 1417 - DNA, 866 bp, Rattus norvegicus
tctgtgaggatgtcccagcggaggcggctggagattaaacggacagtttataaagtgttccggaggccgaagaggaactggtggaggagtatcaggaagagggtctctgggaggaggtggaggtggactgggcacaggcccttcaaatgtacccgtgaggacaggagctcttggctttacctttggaggagggggttgtcttggtggaatagcaggagggtcatcatccgatttcatagctcccttggagttcggagcatcgtgatcaaactttttccgagggggaagcggaggaggaactagtggctcttcactcagtttgtgtagacttccacmykmgctgaagaaagactctgagagaagacaagactggttaccgttcacagtgctgttacaggacaaaattccaatacaactcacgactacttctgctactgtatttgtcagatgtgttacttctctctgcctgctcttctgtcctctccaccaattctaagcttcagggggacactgtgggcatgtgtttgtaaccctagcatctaccagggcaattggcgcatggcagttgtaatatttaaatgaaggcacattattaagattactaatggaattctgatatggcttgatgaggcaggcctataatcacagcaggatcacaaaagttcaaggttagcctgggcaactcagtgactctgtctcaaaaaagtatatatttatttaaaaaaaaaaaagagtggaggatatacctcagtggtggaatgcctacctagcgtttagttcgattttaggccttaggttttatgatcagtaccttaaaaacaagacagaaaccctcccctaaaagccttttaaaaaaaaaaaaaaaa

SEQ ID NO: 1418 - DNA, 549 bp, Rattus norvegicus
tttttttttttttttttyarayygagtttttattggtgattctatgtatatgtgtttataacattaawktktkwtkwktkwwtttaacatattaaaagtttatagcatcttttcaggaaagatcatatactatacaagctattcaagtgatacaaaaccagttttcagtgtcttttcaactgagaagaatcctattcagcacgcttctcctcctgaggtggttcatactgaacaagctttgctttcagttttttattttcttctacagtagcttcatatttctctttcatttctgccaattctaggcgaagcagctctatttctgggttctccggggtggcagctcctaagtgatgctttaaaaagtccagagcactggtgggcttctctggttcttcatataaggctaccaacactttcgtcagcgtgtccagcacccccgasttctccaagtacctccggaactgctcgcgcttcgagtcggcggctttgtaatgggccatagtgacagccacagcggcgtagctggcgccggagacactcctcgtg

SEQ ID NO: 1419 - DNA, 499 bp, Rattus norvegicus
  misc_feature (353)..(353): n is a, c, g, or t
tttttttttttttkkytgaaaaaaaaaagatgttttaataaatacaaaaatctctaataatgactctgctcarctcaggggcagcaggaatggtgtgagggaacccttagtgctgaktgaggatwaattaaagaatcccaataagccggtggtgttttgtacagaagaaaagagttaarcttctgggacakaggccaaaagaaaacagggcaggagttcgcgtggatatggccttggtctgacccagcagtctttccccttgtagaatcgtggttcccaraggtagtgggggaggakaagaascrgaacakargcacggaaggcactgggttcccscakgaraatcagggtcntcagcaccactccttctcccagttcaggcccatcctcttggtcatgtgcttctggatgcttcctaggagcgttgagcttctttctccagctcgggaagggttctagtctcagaggacctttgggctgtacagtgggaaccctcgtg

SEQ ID NO: 1420 - DNA, 803 bp, Rattus norvegicus
tttttttttttttttttywktktccatatttcaaaaatttatttatctcaaactgtgcataatggagtaaaaacttaagttggaaacgtaactgttataaggatggtattagttcaaatatatacatggattctcggcagcctggttccaataacagccgaatcttttaaaatacaactacggaaaataaaagggggaaaaaaccttaaaatatcacaatttacagaaatattacaaaccataagaaaatatttcaaacacagtaatttccatatttttatgtgaacaaaatgaaaagggtgggattgaacaaaagctattataaattaccaacgatatcaacctgcatggacatttttttttgcctttaacagtaagttaaaaatttagtacaatctagaacgtttgccctaaacaagaccacgaaaatggtcttgccagtacttgctctcatgttttccttttgtacaattttaaaactaaaacgttcaaatccgaataaattccttccttgtctgtaacggtccttaatttaagctgcagaatcaaaacccagcaagaaccctttcctcgaaaaatattggcaaattctcagcttataaacaatggacatttgattgccatgtttatctcgataaatactgtacaaaagttgcttgcaaatattaaaacttttttcatcgcccggagtctagttctaaatattactggtaaagacttttgagaactccctgcgaagcgcctaacgtaccactagaactttaaaaaaaagttttgcgtagtttttttcctccagcctcgtg

SEQ ID NO: 1421 - DNA, 852 bp, Rattus norvegicus
cacgaggcctcgtgccgcagccttccaggagcagccaggaagatgtctcaaacttaaccctctgcaagctgccaggctaaagggctggtagagcctggagaagccgccctgaggttgcttggagtctgggaaagsccatcgggagcaggcttgggcaggaagctgagcccccggggagctgagagctgcggttcgagccagtcacgtcctgcgcacggagggcgggtagcctcggcccgccggtatttgggraagcgtcccagttmtaggcrckwssagtggctgcctkgcacaagtgacttctgggcccagytmtggggcaaagatgcccgcccttcacattgagratctscsggaaaaggaaaarstgaagatggaggttgagcaacttcgcaaagaagtgaagttgcagagacaacaggtgtmtaaatgttctgaggraatwaagaactacattgaagaacgttctggagaggatcytctggtaaagggaattccagaagacaagaatcccttcaaagaaaagggcagctgtgtcatttcmtaaggaactctggagggaaattgttttcagttgggtcagattgttcttttgtttaatttttcccccaaatgaagccaaagtgtgtstgaagaattgrgraaaaatgaaatcgagaaaaagactgtcawahaarmamwmwmmaarcactttgtgcatagaacaaacctgcttctcacccacacaccctctytcagaggagagcacctgagtgcagttatkggatgaaggcctggctctccctttcaatatactgcttgctgtctccaataaagttttmcctygaaaaaaaaaaaaaaaaaaaaaaaaaa

SEQ ID NO: 1422 - DNA, 472 bp, Rattus norvegicus
  misc_feature (448)..(448): n is a, c, g, or t
cacgaggccaccatcccactggagaaacaaatatggtatcacggagccatcagcagaagtgatgccgagaaccttctgcgactctgtaaggagtgcagctaccttgtccggaacagccagaccagcaaacacgactactccctctccctgaagagcaaccagggcttcatgcacatgaaactggccaagaccaaagacaagtatgttctgggtcagaacagcccccctttcgacagtgtcccggaagtcatccactactacaccaccaggaagctacccatcaagggggccgagcacttgtccctcctctacccagtggctgtgcggactctgtgaaaagaccagcctcaccctgctctgtgaccaaccaccgaccagccctctgtgctgccagccgtgtccagtgtgtgtcgtgtgtatggtacaagcacaccactgcatgtcttangatgctgtcgccacttacagggtt

SEQ ID NO: 1423 - DNA, 369 bp, Rattus norvegicus
tttttywykwkkgttktaaaaactgctgtattcaaagtcaataataaactttaaggtaaataagctttaaaacaaaagcttasgagcaaaaataaataatttacataactcactaacccagtttttttttggagtaaatccattctcagccatagaactataagcctaggccagacccgtgggaaactctcatagttgattatcataaamwacagtagcaaaaaatcagaaggctgaatagaatctttaacaacccaaacaacagatatactttgtttttgagaaagtatttactctgtagctcagattagcctgaaattcacaacatagtccaggccagtctcaaatttatgtatgcctcctgcctca

SEQ ID NO: 1424 - DNA, 656 bp, Rattus norvegicus
ttttttttttttttttttggagkttaaagtaattatttaatgggcaaacatgcatttttttcccacagaaaatcccatagagttccacttcagatgaacttccagtacccaaagagtgttcaaggaactaagatggtctgcttaactcwgaggctctggatacattttagagggtatggagaagacctaacagcatgcgatttttaagttacaaatagaaactgtagcaaaatattgttacatggtctccagaaaatgggaacaccgaagcagacagaaaagacttcagcagcaggtgatcagctcttcaagggcctggctgcatatggactatattacttctgcttggtcttctgctgagctaatcctggggtgacagttgtggggcacacctcaggagttctggactggcatggctctggtacctttgagtatccctggtcaggtatcttggtgtatccctgatcaggaaccttggcmytcgtgssctctgaggcattaaggtagccaggttcacggacattggtagaacatggctctgaacytsgykcmgagatattggtagagcatggcccaggaaccatggcacagccagggtcagggatgttggtagtgcatggcccaggaattgtggtataatttggctcagcctcgtg

SEQ ID NO: 1425 - DNA, 438 bp, Rattus norvegicus
tttttttttttttttttggaaatcattgatttttattaatwtcataactgggaaattctgtgtgaaagcaaaaggagcacgggccatccacgctagagmgacacttgcttctcgrgagggcacagtggttctggcacaaccytggggattcstagcttttgtctctgcgttmcaggatttatgtacctgggagcaagaacactcagagmtacgaaatgcgcaggaaccttctgctgtgacagaagttctgtctcatggtctttacaggtamtacctggggatctccgcagagccatgttggcccccactgtgcaaggaaggcagatgggcctggcgtggctggacattttcactctctgagacagcttcagcagggcaatgtcatcagcgtagaactccgagatgccctggctctgctttgcgtggaccctcgtgccg

SEQ ID NO: 1426 - DNA, 933 bp, Rattus norvegicus
cggccgcaaaggttttttaatgactgaaatgaatggtgcattgtgtaaaggtaacgaacaaaataatctataaaatgttttcaggtttcacttaagaatagttcttacctcatatgcatatgttttttcagtgtatcttgttaagaaatcaaataatgaattgaggcttttgagctggcattaagataaagataagtacaattcacttccctccatacagtaagttgtttgtgtgatagaacctttgctaccaagatggctaatctgtcactccgccgaatgtagttctcaaattgcttaaagaaaaaaaaaaatgccagtgtctgtcattgtctttgtcatcgctgagattaatgtatgaagggcatggacctggatctgtttttcatatattgtataaaaacctgatgaaatcccaaactgagatgtatgaaaatatagcattggttctcaacctgtgagtcatgactccctttggagagagaatggccctttcacaggggttacctaagtccattggagagcacagatgtttatatcacagtttataacagtagtaaaattacagttttgaagtaacaatgaaaataattttatggttgaaagagtcacagaattaggaaggttgagagccactgaaatgcaggcctttttatttttttagaaaattattgtatgtaaacatgccatcaggtaaaaaaaaaagtctcttacttctatgcattttaagtcaaaattttgaaactttaggattaagcattgaaaaacaactgtctaaaacatttcacaatttgctttcagcatgagatatcaccagtggtctgaactaatatcctgtttttctatgtaaactttacattaaaagttgccagaaaccattttgtcastctcktstgcatgttaccaaatgttcagttaaaaaaaaacctcgtg

SEQ ID NO: 1427 - DNA, 1583 bp, Rattus norvegicus
aagggaataagcttgcggccgcaaaggttykkywykwkktttwwagtagcaatcgkywcwkktttattttaatatrctttaggaaacactatacaragctgagctttcctgttgtttctgttaacagcaggaaattcaatgacacaaactgtttgtgatgctaagaacaacagtcagcaccagacttgaaaagttaggtacaacacagacatccttcaaaawraagtrtcwbawkmrsmmgmcwrbtaaaccaakttgaacaaatgacaccacttgggaagtgactcctcattcytgttgaatttcacaktcaytgagtatsttttacacaatttattgttagtgctttaaacaaaacctccayataaggaattawtacttgtaataagatataaatattcaacaagaatagttttgataaagaacctcatgtagttcaaattctaatatgtactgaccgaaaraaawwwwwdwwwywwhytktkykksbtyrwrcatgtttattacaacagatacaattcacatctgactagctttgtttctcctttcccctcccacaaccatgttcattgggccacttccttgtatttgagcagtcaatgtacttccagcacacttgcccarcagtactttaagtccattcttasagggtgaaaatggatttcaataatttatacaaacgtgggttatgctcaatcactgsaamtccagctacyrwdcwywgkwrtgwsaarsttwtagaaaartgccacagcaacagtgccccaagaaaggaaakagggcacctttwaaaaaatggataaaatcaggccaagggacttcakagggaatggaacatacasgaaatgamaacatttctttgcaaaacaaatggagcagcactgctcttgatcargtgcamgtgcygatcagttgtctcatgatattygyacactgctcataaggttcaaaatcgtatcctyacacacagatcacctkgcgcttgcastggatttttgaaaawgcaagatttctgaatgataaatymwcsysccwwwttttttytttttttaaaaaaagctaattttgcagacaggtttccatgkaaaaggctargtatttagccacctcagcattgattaswttcagatgtytaagctctgttacacatggcttcccatggmttcactctacaaaacatatttacwacgtgaagatacatctacaagaaatctacatttcaagggttttacaaatcaatcttgtatctttcccctgaattgactctyacagaccccgtccccttgtcatttcatttgcccagcttaacrgtccatggtctactgaaatgcagctcaaaatgttatgactgggcawcagmtttacagttcctctakgagatcatgtgcamttawtcacatcttcaaaccatgaasgaattctgatttttwascttthcgagktccttaahttgktgtctcamaaagagtatcctcygctctcgcaaagttgcttgaawttcacatactcgaactaatgatcycaaattttttaactcagtacatatttctgacatatgaacacttcccatattatgggcttct

SEQ ID NO: 1428 - DNA, 307 bp, Rattus norvegicus
cacgaggttttttttttttttttttgagcattcagatttttcttactctcctcttttgcacccctcccaattcccttgtatctttttgaaaaatctctccccttctccagttcgcggtccggccctcacatgtgcgacaggggcagtgtgccgttaatggccgtgccgggcaccgggccgctctggtagtgctgggccatgtgcagtctactgggcgcagcgggctccggcacctcggcgccggggaggtacatgctgatcatgtcycggaggtccccggcctggcagggcgccctggagtgggagg

SEQ ID NO: 1429 - DNA, 863 bp, Rattus norvegicus
ttttttttttttttttttacttcatgcattttattgawagtctawatttwaagtctgcagtatgacatcatacatagagggaaaaagcttsttcctaaaagatagctrtyamwaatcawmmcabawtkgatgactgacctttcaaggkcttcttctgcattaacaagttaagttttakcargtgtaaagcactgtacaaaaagtcgggtasattctcaaaattcaacacagggcttsccaaccaagagtttgctggatcagataccggagaagggtgtttcgttcaggtttamatggtaaggaamtgmgaamgcagacawwwcaagscaagcawattcccttcccttggtgctcctctgtcgcctttccaaagtgtttcctggaggtcaggaagcctgggatgacaatcactgcagtcttttgacagcatgcacacaagtgyttcatgttcahagamttaagggcagccctcttcawatcsttccttacgggctttacagagctttccagrawtgctgcccagttctgcacaggaacccawgwrracatyyawtccaaagcagcttttccattamcaggccaamtgmgtacstactccactggacacttcacagggccctatacctttaaaagcagcaccagggacaaacggaactatcaaraggtaaaatccaactgytggacagtttaaacmtgtagaaaccaacccgttaaaaacaytmrtracagggcactgaacagagwtaaggmtgggtagctggcttgactmtaacttgcaacwggaaacmatcttcagaatgagaactgagaaaatcmdtgaaacaaggayyttctcagttctcattctgatgttggagcgscck

SEQ ID NO: 1430 - DNA, 927 bp, Rattus norvegicus
ttttttttttttttttttaacagcctaaaaagaggaaatgtttattttggctcagtttcagccaagtcagctccagggtgcttggccctttgctttggggctgggaaagaagcactatgtcatggcggaggagagctgctcatttcacagcaactggcagtggagaggcaaggaaggacctggggtcctgatacaccccagtaacataacttcctccgacaaagacccacttcagttcctaccttctttaagctaagggccaagccttcaacatagatttggggtacatttaagatccaaataggaccagccacyacgaagaaggattttataggagcaattatatggagaatgttaagagctaactacaccctttctacactagagaggcaggtaatgccgcagaaaagggggtgggttgataaagtcccacgcacaggcagcaagctcagaggattcaaaagcactttagagggacttgccctcaaagcctgctgctccctctcatccagtgtccacacagagctgaccgcatttccgggtagcctggctgtccaggagccccacctctgtcaggtttcaccagagctcctctggagaactactttggccatcatggagatgacttgctgaagagacgggctgattaggagatgacatcttcaatctgagctgaagctgtagacgtgaagtgccccagagagccgggctccccaagaactccttccagcagcaacgaccacttggttcctttccttagaccgcacagacaccagtgagctcccaaaccttgaacttgcctctggagaaattagcacatactgggccttctcctctggacatggagtcatccaggacttgcatttgcctgtcacatcacctaaggtggtatgcatgccattataaatgtacactcgccccctcgtg

SEQ ID NO: 1431 - DNA, 910 bp, Rattus norvegicus
tttttttttttttttttwwwttwaaatcttgtggttttatttttttttcccccaatgctggggactgggccgagggcaagacaggcattgtatttggagctgtcccccagcccctagttttaaattctgtccttgacagtggattgcggtgacaaaagaacagtywkkwywkwdwkykyttcaccagccacccgtcactttamytcktkssgcacacatcctgtttgctgtccagggagctgtggcagcacagcagcacggctcactgcactgcttgattgacacggagtatttgcatcacmykmggtrccvmctgrgctatcagggccactggctccctcccaragctgccttgtctgctgtcagagggaactgctgtgggacaagagagagacagggagaggaagcatccaggccaaaagtaaacctaaagtwtgtctaaaaatgaggaatttgtggaaaacccagaarttwcttamgkwtkwywkkkkwytgttgagaaatagttccatcatttcaagagaagtacagactttggaacctgaggttacaactctcaggataaagccaccccaaattcatccagactggccttgggaagaaatggcaaccacagataatagtgtcagtgcttgagagcaaaaatggtcaaagtcactgatgtgacaggggttggggcttgtgtarggtggcatccttatttaaacttacgagtgggcagcaaaggagactgcggggacctgggtccagtgccacctctgcacagaaccccctggacagtgcaggattcagctmgkgcatgttttatttccaacatggcatggaagacggcagctctgcttggctcacttcacttcatttaacctcttgagagttcccagttatggtcaatctccatgtccaagggtca

SEQ ID NO: 1432 - DNA, 537 bp, Rattus norvegicus
tttttttttttttttttgagagcaaacctcacaaaaatgtttatttttttcttggagacattataaaatctttaagaacgcaagtttatgcttcagtgaaaaactatctagtatacacatttcctagtatcaaattcatcaactttttagggagaaggcaagaattatgttagtgattgctwywtwtwkkywwkttwtccagaggccaaagatcctttaataagcagttttttttttcagttaagatgaaagtgacataaaaccaatcactttcaagtgaataattcagtggacccagaacaatttctacccacacattgatcagtctgaggaagctacaaatagatccccagcaatatggaaattcacacaggaaatatgggtggcattaatggacaatcttasaaggcagcaaggcaggtcayactaggaaacagaggcacattccagtcgcacgtttgtaaggaaacgactaaagaattgattgttaactgcaaaatagtatgtcctaaaaagatgaaatacattctcctcgtg

SEQ ID NO: 1433 - DNA, 417 bp, Rattus norvegicus
ttttttttttttttttttwwmccccacacagggctgcttctcccgtttattgtgccccttasaggacagatgacagtggctgatgaggtggatactcccagctcaaagcttctgccctgcccaacggccctccccatatgttgctgaactggagggctgggttaccatggcaactgtgagacctggaggacakctacagacaggcctakctggggccactgctgctcctgggtttcggttgtggtastggcggtggtgggtggtaaggctccatctggacctccatctccacctcctccaatccactttcattggccttctagaactgagatgtacaccgctcggctccaaaaagggtctctctctgcacagattaggcaagcaatctaccgctgagctacaasagccctcgtgccg

SEQ ID NO: 1434 - DNA, 448 bp, Rattus norvegicus
tttttttttttttttttaaccacatgactgagcaatgtttaaacagcacagtacgtcagctggacttaaatgacgtggctcagcttaatgtatgtggccttacaaaccaacatgaaacaccaakgaacgcccgaggggtacasacaagcacctgscagkcactgggagcaakggcgtggccagkcggaggggtacactcctgkccstgctgcaaaccggtcctcakaaccagtactcagagacgaagatatgcacattgackacgttccggtgggaaaccacscctcccaacacgtagttcatctccagcttcaggacggcataaaatgggcccacgatgggccgcacttggcgcacgacacccacagtcatgccgtcctcatagcgcttgatgatatcaaaggagtctcgaaggttcccttctgtgatgtcgaagatgatcctcgtg

SEQ ID NO: 1435 - DNA, 426 bp, Rattus norvegicus
tttttttttttttttctgaggtccttttatttttttcaaaggacccttttaaaaatttataactacaaaacagtcgccatacattctgccataaataaaaacaaacagtaaggcaggactacataagcaaactgagaacaaatgtttttcagaaagtgtgaaaatgttttacaatcataaagccatccagtttttaaaataaaactgtggaaaacgttcaagtggcacatacaagtcaccctggaaaaggaacaagatgtggcattgttgttttgtactgttatttaaaacctaatcttgcttagaggataggtctgctccatatttaaaatccacacaggctgggtttttctcaagaaccatatgacagaggcaccaatgacaatacaactttgtttccaaaaccttgtaacaaagcgcctcgtg

SEQ ID NO: 1436 - DNA, 659 bp, Rattus norvegicus
ttttttttttttttttttgctgcacactgtacttttattttttcttcagacagacacggggagttcatggcaatgcaatgttttctaacaacacaaacgaagtgccattatatgtaacggtagccaactggagacctacttaaccttaactatgccaagtacacgtwtatawttcytgtatgtacagtgcggtggggatcagycwcacctsaaaamktakcaryctgamavacasyccatggacaaaagtatgaaaaatctcataacaaaaactttcaatacaaaacactcatttgtacattactttacttagaaataaccccaatacaactgaagccaaagcaaagcttagctgaaaacctaagaagatattttagtaaagaacctccctctccaaagaaaagtgtctcctaaaggaaactggatctgccgtcaatccttcagacgttatcttggaggggaggttttcaagaagggagccagctggagggcccactgcaggttcccaagcaggaaggtacaggcactacggcatagccacgtggccagcacatttaacattcccaggatttccgattagatagtttttccatcttctatgactgtttctgttttctgtgttagacttggtgcatggaaccctggctttcagcctcgtg

SEQ ID NO: 1437 - DNA, 426 bp, Rattus norvegicus
  misc_feature (89)..(89): n is a, c, g, or t
gaaactattatttattcaagacccagtattttgtataccgtgctaagtgtcttacattcactctcccatttcaatcctcacaacaaccntatgaggtaggtattatcaccatttacagacaagaacacggctcatgaaaaaataggtcattttcccaagttccatggctattcacagtggagctgagatctgtctcttgctgaaagcctgcatcttttattgtacccatctaaataagccttgagcaaaagataatttcattgctcaactcagcacagatcacctgactctcgttcttctttgctgattttctctaagaggtttgagcacattttattcaagctctggatctgcttctgagctgcatcagcaccaatcctggcagcatctgttgtcagctgcttctcctgctcttcgaccctcgtg

SEQ ID NO: 1438 - DNA, 819 bp, Rattus norvegicus
tttttttttttttgtttgtctgttcttttattttcacatacatagaaacagcttaaacttatggtaggttttaaaatacaatcacatacataaacactttattgcacatgggaaatactttggataaaggactgcaaaagacacaaacaggttatgggacaagatgggagttattccagggtccaaccacaaggtgtatgtcctgacagagatctgccacgacacatattgcacttttctttgtaacactttgaaatctgctctacaaatattcctcatgtgctgggctttttttttcttccttgaaacacactacagagatttttagatactaagaaatatgtaccaatgaaaattaactgtytactctgaggcagttaaagaaaagktcacccttattctttggggggaaacaattgacaaaataatgaggcaaaggtctgttaataggatggagctactgcaaagcttgttttcataagcattggtctacttgtgaatgctttaggagtttaagaaaatcattagtcagtcatcaataatttcytgtatctacattcatcttttaccaccacggaatccccttcaaatagtgcaaatgcatgaaggcgctggcttttgcagtcatttagcaataaatagtgactttaaaactagtcatttgtattcatcctaggtttaaaatataaagtgcatttatgaggcttcatagccatcttctcatctttgatgtgatttccagtcagtcagtgacatttttagttcctggtcaagggaccttcctgggtcttcttccttgtgttccatagtcccctcgtg

SEQ ID NO: 1439 - DNA, 730 bp, Rattus norvegicus
tttttttttttttttttgctatgccaagagaacactttattgggaatatttccaggggaacctggctttgcatggcgggaaaaagcacagttaagaccaaaaacaatagatgaattttagtagaaaaacctgctaagcaaggagggccctagggaagtgtgagatcatttagctgccaagagccacaaggcgtcctccttcctgtggcctcggccccactggtggatgttcacactgcacggggcaccacgtgctccctggaggagatcactcttccatccctgatctcctcagtgatggtgcggatctgggtgctgacttgagaagctggggtgcagggcccagctggggtgcagggtacagccggggtgcaggatgtagaagggacgaaaggaactcttacaggaggcttgcaatcggtggaacaagggtgggcaggaagcttgcagtcctcgccctccagcaggcggcggtaggtagcaatctctgactcaagccgggccttaacatccagtaacacctgatattcatggttctgccgttccaggtcacaacgaatctcagccagctgggactccacgtttgtgatcaggcactgcatctggcccagctgggagctatagcgagcctctgtctcagccaaggtagattccagagaattcctcatgctatgttgagcctgcagctcgatctccagggcgttgactgtgcgtctcagctcaacctcgtg

SEQ ID NO: 1440 - DNA, 576 bp, Rattus norvegicus
cacgaggtgttccttaagatccgagtycakccgttcgacatctgyrccatcgctttamcccaggtccggtttcsgagtcccgcgggcctatagacccctgccgagtcaccatggtgcgaatgaatgttctggcagatgctctcaagagcatcaacaacgcggagaagaggggcaaacgccaggtcctcatcargccgtgttccaarrtcatcgttcggttcctaactgtgatgatgaagcatggmtacattggtgaattcgagatcattgatgatcacagagctgggaagattgttgtgaacctcacaggaaggttgaacaagtgtggagttataagccytagatttgatgttcaactcaaagacctagagaagtggcagaacmatctgctcccatcacggcagtttggtttcawtgtgctgacgaccycggctggcatcatggmccrtgaaraggcaagrcgaaaacmtmcaggagsgaaaatcctgggrttytttttttaaatgtaaagcataaataaaaagcctctgtggrctgtgraaaaaaaaaaaaaaaaaaaaaacaattgcggccgca

SEQ ID NO: 1441 - DNA, 770 bp, Rattus norvegicus
tttttttttttttttttwwaaaaaaaaaaaacaamccaaaaacgatcctttaawaaaattascccattgaaycyccccacttcttaaggttcwaaacttgtaawagctgcaaaagttccagttcaraagccaraggctcaktccaracagggattcaccgacttgkgytggwayckgggtgtttgggttgtaktttgagttaagggaragggawasctwggcccggcycctywagtcttctgcggmaggtwwamaatksttctgtccamaggccaawasgsgttccctgacccttwmcartttatcttggraraaytggcttcackttawaamatgccggcctacaaatgacracagggkcaactggtttgaraggccadtaagggggacacaragtgaaacagtatgatccgcttcycaccaaagtccggmratcaactmacttctgaaaggtccavswvrkgsctaagcaccaagctgaaaacgctggggttgtagctgcggggggggggggtggtggtggtggttaactaaccttcaagcccacctcggccgtacgtcatagcaaagggccgagatttctggaaggtggaaggtgccgcaacctctccgcacagcccgtcgacgactgagaacggcgaagcgatgtcacgagctccgggatgggtaggtgccccggcgcccgcgtcctgtggcagacccggaggccgcacagggaagggtaaagacgcgaggactgagaggagagaatgggatggggacgcctcgtg

SEQ ID NO: 1442 - DNA, 905 bp, Rattus norvegicus
ttttttttttkwwwywtaaactgaagtacaaactttattggcagttcccaataaaagagaaggaatatgaaaatacatgattgctggaagtttccacacactgcttccctcttcattgacaatatgtcgtcattacagatgtcgtcattacagatattattctagcagtattccagtagctttatttgcaggcacaattttagcaaatattcttataaatccggaggttgttaaatattccaagttgatggtgggttccttggtcctttgggttttgaaaaacgagttccaaaaccaaaattcakaaaggagctggaattttttggctgaacacattctgtaggcttgcttggtgagggagaattacaaacactttttytcatatttcggaaaatcttcaaactcttgctccttgtgaaactttttcctggggtcttcaatgtttgcttagaagatgtggagatctctgtggtttcaggatagctaatagaggaaggtttcatgggttgggcctgtatacagtcctcgtcagcaagaaagaaggactccagagttctttctgggagtggaggtggaggagaaccatcctgatgttgatctgatttgggacttccgagttccacattcttgcttgacgtaaacgccaccaagtcatgggtctgtgactcagatgttcccccgcattccagtgtcactccagattttcctgccagaggtaaggactcagtaatgcttggcgagggctctccggctgcttcggccacaatgaaggactcaggtgtccgttcagggagtggcggggggatttcatcatctgtccttgcagaagtggcttctatagctgtctcttggtttattggcgggggaaagctggttagagtgctctccattaaggaatcctcgtg

SEQ ID NO: 1443 - DNA, 418 bp, Rattus norvegicus
cacgaggcagagaaggtgtgatgtgtggctaaccatgtgacactttgagtttatcagtgagcctgtgggccactgtgcatggcatcggacctgagagaggaactacctggagactgttcgtaaccatgtccaacaacatggccaagatcgctgaggcccgcaagacggtggagcaactgaagctggaggtgaacatcratcgcatgaaggtgtcgcaggcgrcagcggarmtaattggctttytgcgaaacgcacgctaaggatgacccactggtgamtcctgtccctgccgccgagaatcccttccgcgacaaacgactcttttgcaccctgctctgagcccccaagatagttttatcctcccgcgcagaaatatgaatccaataaacttggtgacttggaaaaaaaaaaaaaaaaa

SEQ ID NO: 1444 - DNA, 537 bp, Rattus norvegicus
gactgtctgaccaagtggaaccgggccatagagaccatgtacaaccagtgtatggaagttggctataagamaygmrtgttggtccactatgaacagctggtcttacaccctgaacggtggatgaggacgctcttaaagttcctccatattccatggaaccattcagttttacaccacgaagagatgatcgggaaagctgggggcgtttctctgtcaaaagtggaaagatcaacagaccaagtcatcaagcccgtcaatgtgggggcactatcgaagtgggttgggaagatacccccagatgtcttacaagacatggcagtgatcgcgcccatgcttgccaaactgggatatgatccatacgccaatccccctaactacggaaaacctgaccccaagatccttgaaaacaccaggagggtccataaaggagagtttcagctacctgactttctgaaagaaaaaccccagaccgagcaagtggagtagctgagcccgtaacttcccacgagtgagggacaactgctgccctgtctacag

SEQ ID NO: 1445 - DNA, 890 bp, Rattus norvegicus
tttttttttttttttttkktcttataaaaatgtactttattttaaaatcagtctataaaagtaaaaatcacatacaaaaatacagattgctgcgacatgttggcaaaatagctcccagctggacttgsgtaaggaagagcaggtactgactgagggcacctggagggcagggtccaaccagagtccgccatcagcccatcactaatgtgtaaacamtagtwtcaagtagtagttagcactcttaactactagggaaywsragsrtkaccattcttgtgtgacacttaaaacgttctgtaggtctgagcagatgaggcacttcacgtggttaactaacagtttytgaagaagaggttaatagaaatggattacagctctgaaatactctagaggtaactgccttaattttttctttcattttctaagaaacacaatttgatccttttgcttctgkgtatcaagtgctaaaaagacacatctgttatccaaaggtttaatgcccagtgattcttcaggrmccgtgtgaagtgtaagccgtgstacccgctctgaggctgcacctgcccacgcttcctgtgcgtttctgatggacagaaatctgctctacctaacaactttaggtccagtaacctaatgggcagtttcaagcaatcactgtaaaagatcactgaaaagaatttcaagtccttgatttcagaktaatataaaaataactgcagcacccaacgaacgatcagcatgcccgatcagctcagaattctayccggcttctcagagtgctgactagaatgtcgcaytcstraaacaaagcaagtcattttaaaaagctaaacaacccacatagattgtaacatacattgattataaagtttaaaaaacctttgcggccg

SEQ ID NO: 1446 - DNA, 799 bp, Rattus norvegicus
tcactattttttttttttttttttttttttttttttttttttttttttttkyywywaaaagaaacgkgtcttttattactgktagttgcatgtctaagttacaataacagtctaagttctytttacagccaatttcctataaatattacattaccaaaaagagkggtactttgtaactttccaaaatgtcccttacatttttgtttcatttgatagaaaaataaaccaagcarccacatkaatwtaggcaatgtttcccgataaaawggtakaaatatttaaattacatattmcagkgtaccaacatgaagtcaaatatccacaattacacactcataaaaaaatctagacatcactctgagcataagaagtctctgtacaggattwacagacgtctcctgcacactaagctcycagtgtgmtacggagttcaraggttctgctcggatgttccccaagtcgagtgcagaatmtgkctcttcatctatttccccaatgactgctacattatctcctctcacaatgyataaccccaataccacytgttctactccctgagaagagctgaacacccgctcgtggcyytcrtccagaatcaagttaatggtctggtcaaaacctttyagggttcccacgatcattctgccatcagaagttattactgcaacagttcggttgatgtagttctccaaggcagacgtcatgctgctgggcccggaggttccgggaatctgagaggaatcagcaacaaggagacaaaacaccgcccgctagaaacacgtacagattcgccctcgtg

SEQ ID NO: 1447 - DNA, 420 bp, Rattus norvegicus
gtgccaagctaaaattaaccctcactaaagggaataagcttgcggccgggcgaagtatactcattatgttggaatkwwwtktwywtkttttkwwwkytaagccacagtcttgctttattttcagttktargactaaacagaagggcagtyccaatttgtatcttaagagaagaaaaatgagcaaaagcagagcatgggcgaatcaggcagcccagtgagagcctcccctmtaggctggcactcagggtcggggtgagggaatcccaacactctagagagaggtcagcagagctggggtgtggytgararaggcagggctgcragatgattccatgagttactccagggaggagmbbvddsmgagggacagagggaaacctcaaccccacccctcaaccccacccctcagccccacccctg

SEQ ID NO: 1448 - DNA, 1045 bp, Rattus norvegicus
acagaactttccaaactttacttctgggccaaagtctacaaccgtaagattcaagctgcactgaaaggcctacgacagcaggttccaaaggatctaaagtctggcccttccttcccagacacaatgtcagacacataaaatctcctgtcatgtyrsmckykaymtyttgwwwtwtkkwdkywkwtwttkwwwdacwcttaaggcatttatttattaaaacrttctctgccagaatttcacattarcktaraattcaattcagtctttacacttctgaggttgtcacctcgtgtattataaccccctcccttctcmatcrgtcaktgtgascagcatccacattgaarggccccatggytggcctctcgttcccctggtggaccaactaratgttaacacwgstctgctacaargcaaaggctcctaactcaaactcakcggaaaaggtgagacttctgcaaagtgcactttgagaagaggtactttytgcttatgaaargaaaccagtgaatcctctaagattaataaargggagtatttaacmskyrwgcmcatgatwtggagtgaagacgtcggatgttgctctgctggtccagactgcttaatactcttcttgttcctcctgtgggcccccctcgtcaggtatcacaaagccttcatctgtggsataaagaatatctacaatcctctgcagtacagggtcattttccccctcattctcctggcaaatcaattcaatgttccttagcttgccgaagtagaaatctctctccttctccaagtcttcaacagtaagcttcaatactttgacctgctgcatcaattcagcagcttcgtcatctccattgcccatgccaggattctttcgcaccatcccggggccagccttaggagctgcagtagtcctctgtgttgcaatgggtctctgtggggctgcactaccggagccgagaggtttcttcggtttactcaaagctggagcgacaagagaaggagccactgccgtttcttgaccttgtctggcagcgacaggatcatcctcgtg

SEQ ID NO: 1449 - DNA, 502 bp, Rattus norvegicus
tttttttttttttttttacaaggatttttcctttaatataaaaaagtgtaactacagcagtccaatgtacaaatacaaaaaagttatcatactaaaaaaaaatgtaccataatactgtacatacaaaactgttcaacaagaatgatttaaatatatctgttcttctccggatctggaagacacagcttagagttctgcaactgcattattgctgagaacctgtgcctgggaacactgtgtttcccgctccggactcatcccagatccactttcagtcccctgagtttggatcacgagccaacagcatccctgaagataaccagagccagatgtttactcaatgggagtcatcattcagcaagttgctgcttaccataaactatggaaacccaagctttaagcccaaccaagattaaatccagacggaggtcttcccatctcctgatttgctactaatactgcttttgttggacccagatttggaccccactttggccccgtg

SEQ ID NO: 1450 - DNA, 702 bp, Rattus norvegicus
ttttttttttttttttttgatccaacaaacatttattgagmaactgttgtgtgctatgcaccacgcctaatgctgtgatggatacagatgaataaaacagtgcctgcccttggcagggttacagtctacgaacagacataggacaagtgcacaagtagctataatacaaggcagaatatggtaagtgccgtgagaaagggagaaataaagtgctgtggtggtwctgtggggggagasgtcccakcattgatggactggggagggcttcatggmggatgtggtctctgcatgcgccttggaagaaactcaagaatgatmcakaagatgcaaactgcaaggccaaaggcacggkgccaggaaacacggtgctttyccaatactgacaactcttctggattgaccattgcasggtatgaaggracctgattgggtgtaatgtcaggataaagacaggcacatttttgtgggccaggagatcttagcaaagttcacgaagagctggagttacataccattgagcatgctcagggaggtctgggagaggagaccactactcaggtggtccaacggacaagtakaggtgaggttgggactagttggaaagagtaatgagggaatacatggatgagtcagtggctatcttagggacccagactgtgttgaaagaatcattggtattccaaccagaaaataggcctcgtg

SEQ ID NO: 1451 - DNA, 539 bp, Rattus norvegicus
cgcaaaggttttttttttttttttttagtgtaaacaattttattctgaggatagcaccccatttttggctgctccaacaatggggggacaaaggggcatttggaatgcatgaatagaaaaatcagtcctgggaacaagaacatcagtcctcttcatcctcctcagccaagtccaaggcctgtgtgcatggggcccgagcagggcttgcacgctkgatggaaacaatgccactgagcaaggcatagcccaccatggytgccagccctgccaacacagatagaatytgggtccgccgccggtatggttcctcctcggtctcagggcctgytggtgtctggcatggaggcggtggcacgtcagttgcatcccggggaaagtagaggttgaggatgtgggtgcagtagacacagaggttctgcagcccccgaaggtgggcctgcagcttcccactgggcagctttgcctgcagcagcaggamcaaatggctaaaaacaaaggcgtccagggaggcaggggcatctccaamgatcagcctcgtg

SEQ ID NO: 1452 - DNA, 587 bp, Rattus norvegicus
ttttttttttttttttttagaatgaaataattggtttaataatcataagcttgaaagagaacttgagttaaaattcaatctgtggtcygrattatcaccatctgacacaatgsagagagaattttgtgtatatgcgcacattagtttttattaatatggtgggagtgtatactgtttaacttgatatacttgtcttggtgaattcttctccggattgaacttatctttattaggtagttgggcatgatacaggttgaayacccctcagttccagagccttggsaaaattaacctccagcggcttgcctgtccctttggtgagcttcagagatcggatgcagcctcggaacctaacgttggtggtcaggccaaactgattgaggccatctgggaaaccgccaacaaaaacagggtcgtttgtatctgctgatgtggaggctgcatttgggctctgggcatccacctggttcccatctaccaccagctcaaggcgggtttttgatcttcttggcagtgactttatgccatcgtccatcgcacatatggcctgggctcccagcatcgtagaccgcagtgaatccctcgtg

SEQ ID NO: 1453 - DNA, 802 bp, Rattus norvegicus
tttttttttttttttttccctttgtaaaacttttatttagaaatcttcccatataaccttatatatatatacacacactattgtcaccacactggtatttttttttgttttgtttttgtctttttttttyccaataaagagtcacacgcccgcagtgttggtctctaggctgtacaaatatcaaggtacccggagtagttactcctcttctgcagaaacacacagakaccaacacagttcatcacatacagtacgacactgacggaaagtgctgggcwtgcccacaracacsgcgtgmtacrtacacaggctgaggcaagccttargcaragggtcatgtaccactgggatcccaagtactgctagacccacccaaaaggccaaaatagctgttggctcactacagttgctgtgctctttatttttgtttctggaaaaggataaaggttgtaccatcttgtcacttgccaccacaaataaacatggattattcttgaaggacgsgaatctctctgtacttatattcctcactggttttgtttgtcaatgttttctcatgcttacattttcccccctttgtacagatattgttcttgggatgctgctatttctcaagggcagggaggaagtaaaggaaaaaagatgggatgtggagtatgagaacggaattcggggtcttccttagatcttacctgcccagccccattagagactgtagcaatctctctccctttcttactcccgtctcttgccttggaatcaggaagaaattgatattaatcttgagaaatgggccctcgtg

SEQ ID NO: 1454 - DNA, 630 bp, Rattus norvegicus
tttttttttttttttttcacacagcaagttgtttattctttwaaaatacctgtctatatctatataaattataaactaccgacgtctaaaagaacctaacactcatatgttgaaggtgacatctacaactgacattagttggcccgacccgcagaaaactgtaacaggtcagagtaagcctgctggtgtggctgttgagctgacccgttcactgcaggggaagaactacgggcggctccatgagggacacgtgcaggtacccagaagtgtctgttcacaatatagtttgccagacagtaagctgctgctgctaccaaggaaggaagatacttcaagaatgggtcagcttccagaaggctcagttctgcaacatacttggccaaattctcagtcctgatgcacaccccttgccgccttaagtactgaaggaggaactggttggtggttggaacggtcagatcgaatgccaggactttcagcagcagatgctccatcctcagtagctgtcgctttgtgtacgtgtcgttggtgatgtagacaaactcatcgacatcgggcgggtatatctcttcgtatttcgaagccaggagaatagctgctgtcccgacaagctgcaatttccccctcgtg

SEQ ID NO: 1455 - DNA, 715 bp, Rattus norvegicus
atcaaagagagcgaagtcaaggccmygwgcgytaaggccagagtagatcttggtagaagagagcaacgtgcagagggtggactcgccagtcacagtatgcggtgacatccacggacaattctatgacctcaaggagctgttcagagtaggtggcgatgtccctgagaccaactacctcttcatgggagactttgtggaccgtggtttctacagtswygarrccttcctcctcctgctggytcttaaggttcgatatcctgaccgaatcactttgatccggggcaatcatgagagtcgscagattacccaggtctatgggttctatgatgagtgcttacggaaatatggttcagtgactgtatggcgctactgtrctgagatctttgactacctcagcctgtctgccatcattgatggcaagatcttctgtgtgcatggaggtctttccccttctatccagaccttggaccagatccggacaattgaccgaaagcaagaggtaccccatgatggacccatgtgtgacctcctgtggtctgaccctgaagacacaacaggctggggagtgagcccccgtggggcaggctacctgtttggcagtgatgtggtcgcccagttcaatgcagccaacgacattgatatgatctgccgtgcccaccaattggtgatggaaggttacaagtggcacttcaatgagacggtgcttactgtgtgg

SEQ ID NO: 1456 - DNA, 667 bp, Rattus norvegicus
tttttttttttttttctatagtagaaagtttatttccgtccataaaatatatcactaagcagatgaaaaagttacatattattttaaaacatagattttttttaaaaaatcatatttagcttckccttagcaaaaatgagtttgtttttgttttatgtatttacaggaatatactgtatttccgatacatggctttcccctcaagccagcctggaaaggtctccakggcagghaggctcaccagtcagcctcattattgkctcttctgcctgggckaggagcggtttggtcttatagaagtcactctggagtaatggcagacagyatctagagaaaagtccagcraagaagcagcagccggcrgggtgcttcctstgaggtgaagctaaccttggctctgcgatctacagcctgtctaggggtggcggrgtccaaggcctcactaacttctttctctgtgagtcttctcctgaacctgtggtgatggcggctctgagcctgcctctctgctggcaggccgcctgttttggtagatggctgggtgctccagtgggacatcgccgcccatgttctgatacatcgctgcttctgcctctgcgagctgacagcctaaaaatgacgtcagattggggaaggatggccgcttccttgagtcaaaagcctcgtg

SEQ ID NO: 1457 - DNA, 525 bp, Rattus norvegicus
cacgatggctgcgctgatccccggtccgcgcgaggcgcccgccaccgtcgccgccttcgagtcgggactgggcttctcggaagcagagccggacgggggcgaggtcaagttgtttgaaattacagtgcctctctctcaaggccccaaaccagtcacaatcagttttgccaatcacacttcctgccggtgcatgtctaaactggatgtttacagacaagttcattcaattattagacgttctctgccagcaacattaccacagtgtcaggcagctaacaagacttgtccagcaaactacgtgtggaataactacatgtgtcaatgcctggctcagcaggattttatcttttattcaaatgttgaggatgactcatccaatggattccatgatgtctgtggacccaacaaggagttggatgaagacacctgccagtgtgtctgcaagggggggcttcgaccatccagctgtggaccccacaaagagctagatagagactcatgccagtgtgtctgtaaaaacaaact

SEQ ID NO: 1458 - DNA, 1012 bp, Rattus norvegicus
tttttttttttttttttaaaccaagaggacatacgatgatatgaggggcttggaggccccagcaggtctctggcttcccggcgtgatacattcttgtgtaattcaggaacaagggcacaagggccctctggggaatagagtaaaaaaatatggagattacagtctccctgtggactccaagcaggacagggatggacccaatctcacagttcttttttywtktttttttggttccatatcttgtccctcactgttgccccattcaaggcctgaaccagtgctgcccctgaggcccacttcctccamttctaaaaactggtgagaccaacagagcagtccaccaggcakagaggcggcaggctgcatggaargccagcagtttccagacsctggctctgtgarctctgatccccgacgcagggggtctcagcccagatcttcagcccttgaggggcttctcarctccgccactggggctgttggcactgtcacttttcttcctgcgcaggctctcsatccagctggagctggagcgtgtgctgaagctggagagggccaaggagctgagccgcatgttcttgccrgacataatgagctccccaaaaccttcctggtgcgagaacgcatagccagagcggcgagagccggtgcggcccactcgccgcatgcagcggtgctgagccttmtgcttcttccttaccagctgagtgtagcggaccgtgtcggagagatccggcttcaggctaagcctgaggaagcggaaggcaaccacaggcatgatgcagacagccgtggtgagcacgatggtgagccacacggtgggctgggccagggtgttctgggcattccctgagggacaggagtcaggaagttgacagaggggatcttctcacttccccgttgctatttctgatggttccatgtcctcaaactcaaaacccaagcgccttcaacgtctttctttctgcctgccacccaaacgctcatctccaaacctggtccccgcctcgtg

SEQ ID NO: 1459 - DNA, 803 bp, Rattus norvegicus
tttttttttttttttttkktttcawtaattaatatattttctgcattgtagttaacatatatgtactttgtgtactgtctttgagtcaccttgtttttcttgaagtagtgatatgttatattcagacatgagtacatttcaacagtcttttgcaataaatatcataaaataatagagattcgcataataaatattctttacawtaaaaaaaagtttaacagacttttgtcttaamrrymgcmargrttywwytttgtgttttatacataaaatakacaaaaagcaccacaatttgtggttaaggsaatgaaaacacaggaagggttkgragtgctcasctgttaaagagtcaaaaggccagccaggagccaaaggcaccttarggagctgcggctgagacaccggggcagatcagataggaatgtcaactacggtgtccaagcgccccctcagtgaagtggggggtgcgaagggaaggccttcacggatactgggtgctggaggaggagaaaggagggttgccaacatcatctctgatgtgaagaccaacaccgcacagtgaatccagagctgtgtgcggggatgacccatctgcacagtgcattgtggggagattgcggagggctgtaaggacaaggcagtgagtagatgccaagaaaactgtgttctaaggagtagaacctcccatccggctaggagtaggacgctaagatagctctcatcagaggcagattaatatatagcttatttaagcacttacatggttactttttttataaaccaaactaaatccatgcctcgtg

SEQ ID NO: 1460 - DNA, 725 bp, Rattus norvegicus
tttttttttttttttttgagagataaataaggcctttatatacacagaagcacaaggtggcagtgggggattgacaggtggtggcagcagtgggcttggcagggcagggcagaactgaggtcctgttagtgggaaaagatgccccggaagcgggctttgtcctcctcatccttctgccggatccgtgcctccagggcccgcagctctctgcttaccacaggcgccakggyagggycgrgctcymacaccttcagcatctcgatgtggaagatgaggggttgagggttctgctgcagggcgtccaggtccgcatgacccarggagctatgctcatgcatttgagcaattccacagcaatgccgctggccctccaaggggtccttgccctcagcgatgttgcggaggctcttggccaccagaggatacaggactgtgtgcttgacatcgcagaggaactgggccgtctccccctcacgcatggtacgcacgatggtctcccacacaggcagcttgaacttcttgccgatgatgagctccatgggcttgccgcgtgctcggctgtcatctatgacggagccctccgggtcactatgcagcgtccggaagtggaaggtggccttagtgccatcctgaaattccggcaactctcctcggccctcctgtatcacacgcttttggatcccgtcctctcgaagtcttgcgatgagatccgccatcccctcgtg

SEQ ID NO: 1461 - DNA, 694 bp, Rattus norvegicus
ttttttttttttttttttwarrawaratatatttattctttgccaggagactccatggwaaaaggtaaacagtatatgaacatagaaagcactgttaaaccgtctcaatgtacaaacagccagtggtatagcacagacctttgctaatatatcaaaaacaatgaaagttccactagtgcttacatgagaactcagaacycgacacttgagtctgtcaaccactcagtctcccactgctgtcagtctgcatcatagtgattgaacaaggccakaggaggccactgcccacaccctcaagcttcaagtctggkgaatccaggatcaggcctgagtcargaaggacactgggctgctagagtccagatggcagacaaggctgctgattatcctgtgatatctctccaatggcttgtgaacaggtaaacacatttactaacactggacagtgcttttgccttggaggctatcatgactgcagattttttccttcggtagttgtgtcatcaaggaacaaaccacttttagtttaaagtgacattagcaattgaacaatgacattggattaactgaactggcagttacactgacacagaattcctttctgtagtgcagtgaagtggtatactcymtctgggcaacataagagaaaggatgcagcttgagagcatcaaaaagcaaggagaagctcctcgtg

SEQ ID NO: 1462 - DNA, 708 bp, Rattus norvegicus
tttttttttttttttgtggttgttatatttttattttccaagtaatactgattaaaaatatttacacaactacttttaagtccacagtttagcactcttatttgtatggctttaaaagttatagcacaaaatctttacattaaggattggggggaaaagagtccactcaaaacaaagcctgatatattatatacatacgtttcctctgtactttatttaaatacattaattttaaaatgatgctcagctaatcttttcccatctggtggtaaaatactagtgcaagttctcatcaaaataaagtttaccacagatggaaatgaattttttccattgaaaatggccctttagccgccgttaaatgaaaaattttcaatgtaacttaaaggaaaatgaattggtaattgtcattttaagcaaaaataccaagtaccagagcactttatgctgctctttaaaacacaaactttgaaagaaccagagatgtttttctgaagttttgttggtttttgaaaaggcacagggtggtttttttttttttttttttttaacattctagaaattctgccaccaccgtttctgttgtggggacagcatttgtagccactagttagacaagaatgttgttcgaattaaagctagcccccaactattaactgcacagtaacaatgcacttccctcatgcagccttgtgttgcctcctcgtg

SEQ ID NO: 1463 - DNA, 443 bp, Rattus norvegicus
tttttttttttttcaggaaaagaatattttaatggtgttgttatatagcgtgttggctaattccagtggatcttcttctcttactgctgacattatctccaatatttgaactatgtggcagggctcgttcctgtcttttaaacagcacccggcttcccacttctttttggtaggaaatgcagtttttatatattttgatccagcatgtgtacttttaactccacaccaaggtgcatctgtctcaatcattagtttttcactgggtattgacttcagaacttccaaattagcttcagttttcagagagctttttaacaccaatctggacagctctccctattacatcttgtaagtcatcttgatgcttctgcatgcccctataaattcctctgaacataggatctgtcaggttgattccaatatccacgaacttgaacctcgtg

SEQ ID NO: 1464 - DNA, 420 bp, Rattus norvegicus
ttttttttttttttattaaaactgatttttctaggcaaagctgtttaattagggtactgcttttggaagaaaaaataaargacacatttgaagtcccctcccccccaaacgaacaaactagacttgtcacatttacaggaatcgcaaacctttgtatcccatgctcataggtagttggatgcacatggtaaacagcttcggtattcaggaagagcatgtgcggctgacggggacagaggactcttcatgcttctgagatctctgatttgctaagtgcaatggccagttccaagtcttcttgttcctgctgatttagtctggcgagcctctgctcttcttctcgctcactctccctcttggcccactcaatcatgtcttcttcagagggatacagggggtggtgggcagggtctcctcgtg

SEQ ID NO: 1465 - DNA, 485 bp, Rattus norvegicus
actaaagggaataagcttgcggccgcaaaggttttttttttttttatgaaatagaaattttgtatattagattrtgtttaaaagttaaggatatcmyaagtcagctgccaaagtcagcatgtgatggttagcgttatctctccataatgactttaaatatcctttgcattgactggcactatttcagtgttcacatgtttgtttgaagtagaaaatggcactttgctgttttaaagtaattatattaatgttttagtttgccccgggtgttgcttatgtcttcaggttgatattgtcgtcggtactccaggaagattagatgatttggtgtcaactggaaagctcaacttgtctcaagttagattcctggtcctggatgaagcagtaggttgaraaactttcatattttctttagagaagatgcttttgttaagacctataaagcaaaaaaaacaaaaaaaaaaaaaaaaaacctttgcctcgtg

SEQ ID NO: 1466 - DNA, 721 bp, Rattus norvegicus
tttttttttttttttgtaaatacaaggaattttattttatttcttgctgacatactatgcggcaaaacaaatcgacaccatacaaaataactttataaaatatcattcacatcatatatcagatttacagcattctgtgcatgttaaggggctacatgaggtgggaggaaaaaaaaaacactattccaaacctttagtgttagtttatacacacagtaagaacaacaacataagtagctgttaggtttcccatggatttattgcaaaaatagtgcaaactatttaacctaggaagctgtgaatacatgcacaaaccagctggggtctgggatgtgacatttgctytaggacacatttccccggttcccagagagggcaggttagratcccagcgcactgtagcagttggatggaatacttgtgtggtcagttgggctccccatttgcaagagaaaatgactattctgaatcttggaaatgcattagggttaacagaaaaggcacaaaataaataaaaattattaaagaaacggaaatgatgttttcaagtttcatgtggagttagttatgtcccactgtttggttactttttccaatttaatttgacagacttacttaatagcacccaactatttaactgaggtagatccacattgtaaagaaagctgggtcccctctattttacctcaagattgaagatgcttttacccaaaccctcgtg

SEQ ID NO: 1467 - DNA, 444 bp, Rattus norvegicus
tttttttttttttttttgttttaaaaaattaagtttataaatattttctccactgtacaaagttttcccagccctgcccaccccttcaccgctcacatttctcacttcttaaaaatcccaattatatttattttttaaatcataaaatatatttttcctttgttcatatttaaaaatatttacagggaggcagcgaggccggggtggacggccgaggtcaggacgagtccgtgcaggtagtacttgctggtcttccagcgactggtgctgtagtcgctgtcacacacgtctgtgctgcaaggtgttgttgggggtgccatacctcgaatgatgtagggcytgtatggtmtggcagtggatgggatgtttgamgaataaaacatgtccatgttgtacagggaggggtctgtggccggggacggtgatgggttcaggatcctcgtg

SEQ ID NO: 1468 - DNA, 599 bp, Rattus norvegicus
tttttttttttttttttgaagggttagaagatcgctttattggtagtctgtcataggctttatataaatgtgtaaacaagtctcttgagtgtttttatctcatggaattgtacaaaactcttcaataacaccaatcctcccagatgctgggtttaaagtctccatccctaaggtctgtgtctgaggtatgctgtcacagatgaatgggctgccataaatcctgaagatgggacagtgacagtggcgccaatagatgctcttggggccaagcagcaggccaggaaggactagctgactgtagccagccactgtccattcctgtccatagccatcacactgctcatccctgctgcctgctggagtgctctgtcatttcctactttagttcttgcttatgagctccgaggacctgacttttccccacctccccctaacacagctccttggcaggctgaggtgtcgcaaatccccggggttccttgagcaccagcagctccaggaaggccaggatcaccaggaaggccaggctcaccatgagcaccatctcgaccatctttgctgatgccaggcacaccttgaggccctcggtagccctcgtg

SEQ ID NO: 1469 - DNA, 726 bp, Rattus norvegicus
  misc_feature (20)..(20): n is a, c, g, or t
tttttttttttttttttggnatgatctggtcctgagcatatgacattttgaagtagggtaatcaaagaacaagggatactattttaacattcaagaaagaaggaagaagtagtcaaacctgctgcaaaataatgaaatgttctgactaatggaataatgtgtgatggagcaggtggaaatctgaaaatgcgacagaaaagcagacctcttcttagaactagatgctgagtctgcgctgcctccaggaggaaagtcgctataaaaagagtcgccatctccaggcttttttacataatctccctggggtaactgtytaaggcataataaacatttcaaagtcagaaaacaggacacacacatgaacacagacatatacaaatattatttcaagaaaaggggagggagggaaggagggagggataatggtctacatgatcaaatctataacacatgaggtcattaataaacacgacaagttcaactcattccggstgtggagatcagaaatgtaatcatggagactttgtaggttgggtgaacaaagcctttttttccccccaggagaaatatggaaagatgagttattttcaacacgacctcattctacctggagatgttaatctataacagcttctgtcttttaaaatgatgttgaagatgtgtttccacattccttgctcaaataaaacacgtttttttgttccctaaatgtgatgaatcctcgtg

SEQ ID NO: 1470 - DNA, 512 bp, Rattus norvegicus
ccagctaaagcgcttgccgcattcagagcaggcgtacggcttctcgcctgtgtggatgcgccggtgctccaccaggtgcgagctctgcgagaaggtcttgccgcagtcggtacaggcgttaggccgctcgcccgtgtgcgtgcgttggtgccgcgtcagcttcgaccagtggctgaagcttttgccacactcagtgcagatgtagggtgcaggtggccgcggccggggtgggggcccaggaggaggtgcagactgaggtggggaaagcttgttcgggggccagcttgggacgtcgtcgtcatccatgatgaggatgtccactgggttctcatgactggccatctgctggtcctcagaatccagtggccctggagaccaagcttcttcccgaagctccatgtctgggtccctcctcggccccggggccgtcacaccgcactcttcctctcaactgcctcgcggatggtggcagcggcggcagcggcgactcagaccctggggtcagcctcgtg

SEQ ID NO: 1471 - DNA, 749 bp, Rattus norvegicus
tttttttttttttttttagycyaggaaaaaaatatatttgtatcactgcaatggcacaccctgggtaaaatgtcacttcagcaatgcktatcggaggcagcttacggaactggctttgttctgcgtggtggcgcctgacctggcgtccatagtaaaacctgtaccatttggtcacgtgctgccacatggatgcagcagtgacgtasaggaatgaaatatggaaatacgtakaaataaaaccacaaggagtttgggagcaagggctctgcagagctggtgtcttgagacgcacgttcctccgtgcaactggagaacagctgccaaagcttgatgttttcctgggcgaaggggacttgacacatttcttttgcttttcaggtacaggkgttttgtcgtgtctttgcctcagaactggcagaagagaagccaaagaaaaacattcagaaggaaccaaggagggtgkgttctcttttcttccaagggcttatgtcatcaacaggaagggctgagaggctgagataccagaatctattcccttgtaaatttgggagttgcctctttaaaggggtgtgtgaaaattctccattcaggattgtctcagcccactatccataaggtagttatgataagtttgtagcattcccaaacaagactttatatggcacagcctcgagcccaaagaaacctcatttgtccggttaggggtaatagggcttgggagtttgcatttttttaaaaatcccctcgtg

SEQ ID NO: 1472 - DNA, 518 bp, Rattus norvegicus
tgctgactctgagacagcatggtgaaagaaattaacatagatattatttactgttaatgtattataaatgatctgagacttgtgacatgcaaggaaaaaatgagacktkwkwywwktkwtkytacatgatgaactaakcacatttataatgataaaatgastaaatataatascggcamtgctaaccactgattccacgagatacactatttgtcaaaacttacacagctacagagtatcgwcgataaatastcattaccawttwacacagtttactacagcttttctctttcayttaaacaagcatatcaytccctttgaaaatcaktctctaamyaaatatttagagatagagaactctaaatgaaataacagtccaatgttaaaaactaaaaaaaaaaatgagtcctactcttacagtttgacagaaatgaattattaatagtggaaggggaagggatcaggaaataatttcaagttctcaatgtccaaaagtaaattgcacagtaaacctcgtg

SEQ ID NO: 1473 - DNA, 518 bp, Rattus norvegicus
cggccgctttagccctgagcgggatctgcggctgcctgcgagtctctgctgtgccgacccttctcttcgcggaccccacgccaagcagcgaccctgagccgacagccggagcgcccggcaatggcggcctcgacggcctcgcaccggcccatcaaggggatcttgaagaacaagacctctacgacttcctctatggtggcgtcggccgaacagccccgcgggaatgtcgacgaggagctgagcaaaaaatcccagaagtgggatgaaatgaacatcttggcgacgtatcatccagcagacaaagactatggtttaatgaaaatagatgaaccaagcactccttaccataggtaatgttacgtagacgtcattcctcttgtgacttacttccattttgcatttcatatgaacgtctggataacagcctatttgaatttgttttattgtagatttgttattggagcactagtgaagtcagtaacaaatctacaataaaaaaaaagcaatgcggcctcgtg

SEQ ID NO: 1474 - DNA, 678 bp, Rattus norvegicus
tttttttttttttttttcagtttgcttcatatttatttttccttccagacaccgtagaaggtcaagactgctcagtctgtaagactcaccagaggcgtgtccagacccacacctccatgtcaggaagatggccttcaggcatcctggaaggctgtggacgtggctagattcaggttttcactggcttcccagccctctctgcttggagtcctttgagcatcytgagctagggtttgctcccagaccgtatcggcgtcaccatatctaggtgagtcagtattttctgaaaaatctccagaagaatctggagcagctgccccagccagatcctgaccaccattggaatccacagatgttgagctttcattttcgggattgagggaattgatatcttctccagtgagttcaggataagagtcacagagagagctgtcaccacccagaggattctgcatcagaggccaggcatcagaaaactcagcgcagatggaacgggaaacagacccaaagaagactggcatcgcgtctcccacggaagctgtgtttctctcctgaagggtagccgtagaatgcagcccacagccaagggcagctcgggcagagctgcgggcttcttcacagcacaagggcggaatcaggtgaacagggccatatgtctggactgagtcccgcctcgtg

SEQ ID NO: 1475 - DNA, 586 bp, Rattus norvegicus
aaagggaataagcttgcgscsgcartcraggcgggaggcccgggcaccgcagcgckcgcacgctcgcccttctccaktgagagcctcatcgggcgcactmggggtcmcgcgaccgccggtgcacacgcctcgcctggggccaccagcgggaccgcaccgggccccggrggcggaggctgcgccgtgcaagcrgmtgcgggtcccgccgtcgcgctcacccgckcgctggtggtcgccgccgcggctgctgcctcctccgtgtcgtcgtccgccgcgctgggtactctgcaccaasggactgcrctgtccastgtggagaactttactgctaggatttccaattgttagaaacgccgttagcgcgcgggagagagtgaaggtaggaccccggctcctttctacggatggggggttggttttgttcgcccctcccggccctcggcgacctcgcgcccccattttcgscacttcggaatcttggaccagaccgtgttgggcgacagcgggggcgccgcgcagtttggctgagagggtcaatctatttatgcaaaatcgccctatgctgcaaccctgacttggcctcgtg

SEQ ID NO: 1476 - DNA, 530 bp, Rattus norvegicus
gtttttttttttttttttttttttttggcttttgagaaatctttattcctgtgttttgtaagtcgggagacatatgtttcwgatagtaaattttctagcccctgacaatggatgtcagtgttctggggtgagaggagataaaaagagaacagagttaagtctgcgccgggggcctgctgactagagactgataaaagactcatcaaagtggacaggcaagccattttcacaggcaataacaacatgtctgaaccctgcagaggctcggtaccggcaagggggccggggagaccctcctgtatgcttgcaggtggtgatctggaagggagactggcttaktcttaagttttctccgtaagggcttccattcgcgccacagatggccttgatgctgcccttgttgccatggataaaggtgttgacctctttgcagggcgaggttaggsctctyctcstcmkmatwcttksgcagtatctggcatcccgacccttgggcttggcatcatagtgctgagtcaggaaccctcgtg

SEQ ID NO: 1477 - DNA, 743 bp, Rattus norvegicus
  misc_feature (20)..(20): n is a, c, g, or t
tttttttttttttttttggngtgagctctatggaagcccagaacgtatctttaatctttaatgtgggccccgggccctgcctccccaccccagcccagatgacatatttacaggatgcggagggacccaggtccaggccaggtgaatgcagccccctcttcatccacagcatcaggctggtctattaggcgcaggatgccttccaatgtgttgagcgtgtcttggatcgtaactcccgtgctcttggctctggcatcagcttgctgggcttcagtaatcaccagctgcaaggagtctttatccgtgtggaactcaagctccttcctggccaactccccttccacctctctcatctcgctcttcagagtggscagtcccttttccatggccaaggccccatctgctgtcacattggcttccaagttcagactccctatctcctgctctatctcgctggkgatctctagggcctccgtagctgcgttctttgcccgttgggtgtcagcagtggcgctccccagggccgtttctgcttgctgggtcttgtcactggcatctgcaaccttctggctaatataggagagtctcttcatggcctcttcagcctctgcttttctgtcttcaacctgcagatcaaactctctgaggttctttaggatgttctcaacttcataaaaagtggcattgcccatacttagcgcttcttgggctctgcttttagcaaggttggcacgggcctcgtg

SEQ ID NO: 1478 - DNA, 710 bp, Rattus norvegicus
tttttttttttttttttcytttttcctcttttttttccctcttcttcttcctaggaatgataccatgccagtaaacccctacagaacatttccagtttggmaacaagcagtcagtccaccattcacatttgtactcaagacagyaggcctgggcatgaggcgcctgartttcatcctgcagcgtgctcatctgakaaagagcgccctgtwacagagactaaaattcagagggaactgakaactgtcatgttgcctagggtcttgaascactttcttammaactgattgtgccttgaaatttacctgtaaaacgaagtacggttccaccccctttggcagacgtgtwaacgaagacaatgaaagggccccagaagcawacgaaggcccaggagagctcacggagactctcccactctgcccatggggtcatccgtgtctctcactggtgactccatggaaattgagtcaagcatcccttctttggctgaggattagctgacaggggcaacagggcttcattgggaaactgcttctgtagggctttattctccattctaactctttccctgcagggacagtcagcatctcagctagacgcaggggtcagaactgagcagggcctttaagaaaccactcggccacgtctccagcctctacatgtgggaagcagctctcacagccactgcaagcacctgagacctcccctcgtg

SEQ ID NO: 1479 - DNA, 620 bp, Rattus norvegicus
  misc_feature (27)..(27): n is a, c, g, or t
  misc_feature (48)..(48): n is a, c, g, or t
  misc_feature (66)..(67): n is a, c, g, or t
  misc_feature (72)..(72): n is a, c, g, or t
  misc_feature (79)..(79): n is a, c, g, or t
  misc_feature (99)..(99): n is a, c, g, or t
acggtatttcacaactataagaatganaatcattagcaaaaggatagntgcagccaaagccatgannggctnttatttngcatccacgccaccacattngccttsgaagctgtttggatctgttgctgaaagcagttgcattatccgataagctttctgatttgtcctgtagttcatctagcctctctcctctttcaattacyttggtaatattctcttgcattacatcaataacttcgtccacctgattctgaacatgcttaattttatcgtttmtgggtccaaatcttggtccagatggtccccgtagaaaaaagtcctcttcttcatctgaatcatcttccaaaagatttctcctctcacttttcacagacccagtgacgtcatcgtcatttaggtggcgcttgaacttgggaggcatactttctgctcacaaatactcttgctgtatttcccaacagaataagtatccaccacctgaggtctccgaagagctccgggcagcagtccctgctggcagcgcagggcgggcgggggagggagcgggaagctgaggaaggagggtgggagggggaaggccgagggcacagacccgccaccgctccgctctsstgcagcgc

SEQ ID NO: 1480 - DNA, 567 bp, Rattus norvegicus
tttttttttttttttttgggtttaatacttctttattaatggatatcagcaactagaattgctgttggaacaacgttcaccataggttctatgtgtttggtaacctccatgtccacccaaaagaactcccaggctccatgaactctgagaattcttacccctgagccatctccgagatcagggaataagaaccctttctgtgggaggaattaaggaaaagctatgcactcggatttgggcgcgaagagatggctagactgcagatctcataagctaacctcactcctctggccctgtgttgcagggatcatgtaccggaagtcgtgtgcatcgtcagcagcctgcctcatcgcctcagctgggtaccagtccttctgttctcccgggaaactgaactccgtgtgtatcagttgctgcaacacccctctttgcaacgggccgaggcccaagaagagaggcagctccgcttcggccattaggccggggctttttaccaccgtcctgttcttcaacttagccctctgcttggcacactgctgaagctaaaggagatgcccacccctcgtg

SEQ ID NO: 1481 - DNA, 658 bp, Rattus norvegicus
cacgagggcgggccagaatcaccgccgcccccctattctcggctgtctcctcctgaccagcacaagccactggatctgtccgattctacattgtcttacactgaaaccgaggccaccaactccctcatcactgctccgggtgaattctcagatgccagcatgtctccagatgccaccaagccaagccactggtgcagcgtggcatactgggagcaccggacacgcgtgggccgcctctatgcggtgtatgaccaggctgtcagcatcttctacgacctacctcagggcagcggcttctgcctgggccagctcaacctggagcagcgcagtgagtcggtgcggcgcacacggagcaagatcggttttggcatcctgctcagcaaggagcccgatggcgtgtgggcctacaaccggggcgagcaccccatcttcgtcaactccccgacgctggatgcgcccggaggccgcgccctggtcgtgcgcaaggtgccaccgggctactccatcaaggtgttcgactttgagcgctcaaggctgctgcagcacgcagacgccgctcatggcccctatgacccgcacagcgtgcgcatcagcttcgccaagggctggggaccctgctactcgcgacagttcatcacctcctgcccctgttgggtgg

SEQ ID NO: 1482 - DNA, 955 bp, Rattus norvegicus
cacgaggactaccctatcatatcacaatggtccaaatgccagcacttacagataatgtcatcacagtgcctagaaactcaaactgtaatataccgtagcatcttcttggtgtttcttcacgtttctttccacaaagcaaggctccctctgcctcgtgtttctaagagagttcacccactgaggagcctgccttccctgttggactctgtcacttggggaacagtcatagaagcacatagaaaccaaggaagaaacttcctggatatctgtctcccacttgcccaggtataacaaacactaaagaggggaaaaccgaagagctgccaactggtcgacctggaagggtagttctgccctggattggtgtctttctttttcttccttttttaaaaaagaaatctatttcttaaataataataaatgcacatgatgtgttaaatatgtacatatatatttcaaaaaatgggcacaagattgtcttacgagtccttctggctaatttttagtttgtattcataagtggtttttaaaagcctttttwaaagtgtaakttgcatgttctactttgattgtatgtaaacatattttagaacaaaaatgtatttgtattttattgaatatagaggcaagaaaaattgtacattgtttgaaatgttcttttgtaacagtttttattcataaaagcatttttgtacatttgaatgaccatggacttgctgtcatttgaggcgtagsgacatctggcatgctttactgtcatgctctcccatggtcttagatgttgggttttaaacattttttttttctaaaagaaagttcagtctctttcgctaccagrkcwggtkagsrcrgtmcagagcacttamctattaaaaaawwargttgatcctattcatatgytattcattgtgtgaaattaaagacaywcaattccgtcwarammwmrwrmmaaaaa

SEQ ID NO: 1483 - DNA, 638 bp, Rattus norvegicus
tgaggtagaagaacaagagaaacttttttttttttttgaggcagaggacttttctgaatggaaaaaaaaagtcaatggatgtcccggggctgtccagttggaaaagggagctcattggggagagacggttggtaggagagtacagaatctgttcagtagacggctaggtaaaagcatggggaaaggggggttagagataagcacagaggtctgttcccccagtattgcaaggaagaccgcctttaggggcaaggtatcgtcaccaagtgcttgttccctaaggaattcctccagcctcaggagccagtggtgtccaggcagtatgcactcggccttctgttcccctctgtagatgacatattcagcatacgccagcccattgacacttggtctaccgatgactgagtgatgtcctggaggcgcatgggccattttcatggtgctgaattgcagaaaagactttccaagggtcactctacagaaaagcatttgtctgtgacatacgtaacatgacctatctttgtgtgtggggcagcctgttcctcctccaattccataaacatactgattgcttttggaagagttttcggcaaagtaaatcccagctccaaacatccctccaatgtatgcgcctcgtg

SEQ ID NO: 1484 - DNA, 957 bp, Rattus norvegicus
ttttttttttttttttttyywkkgcaaaatcaaagtaaactttatttaaraagctgaagtasctggtgasagtaggggtaggaraggaragaggccctggggtgacacscstcccctyaccccacctagbgcyttcttaacggmygtgascagctggctgggatgaatcasgaasgyggastcwggmccccacascgcayatttgcasgmacggcaatgtcyawctgatgtggcttgggcaagttcaggttgtccatgaccttgataaactcctcacagctgakagtgasccgtgggttcaragtccgttcctcctycacagtaraaactgtgagcccgtggtaatcatgascagggtagattasacagttgcctggaagtgtgaagatcttctcgtgcactgagtggtacaaagtcttcgckcaaccttgttggaagtctgttcgtccacaccctcggatcagtagggcatcyccagtgaaagccatgctctggtcattcaggacaaaggtgacacagcctggggtgtggccagggctggcccgagtctccaaagcaaagcgtccaaaggggatggaatcaccttccccgatatgcaaatcagcctgagctccgctgaggcgagagatgacggactgacagcccgggaggagggatcggagaacccctgagcccgtgatgtgatcagcatggcagtgggtgttcaccgcatagagcagcttcagccccagctccttaatcagctgagcatcccggtgcgctgtctccagaacagggtcgatcaggatggcctctcgggagtcccggtcacccagcaggtaggtgtaggtgcagctcttgggctcaaacatctgacgcaggaggaccggcgctccggatgcgctttgctggctcagccgccgcccggcgactctgacggccgtgctcgccatggtgccagagcccactcccctcgtg

SEQ ID NO: 1485 - DNA, 601 bp, Rattus norvegicus
cacgaggctttcttttcctctgggtcacaggcagggccatggaattgggcagagaatgtctgaacctctggggttacgagcgggtggacgagatcatctgggtgaagaccaatcagctgcagcgcatcatcaggacaggccggacaggccactggctgaaccacgggaaggagcactgyttggttggtgtcaaaggaaatccccaaggcttcaaccagggtmtggattgcgatgtgattgtagctgaggttcgttccaccagtcacaaaccagatgaaatatatggcatgattgagagacwgkcccctggcacccgaaagattgagttatttggacgaccacacaatgtgcagcccaactggattactcttggaaaccaactggatgggatacaccttctggacccagatgtggttgcccggtttaagcacaggtatccagatggtgtcatctctaaacctaagaacttataggagacattgagagccgtggctccacaggctgcctgaagagaagtgcttatgcagtgtcccccaccctgtacataaataaaagtctgtattmtamttggmawwwwwaarwraaaaaaaaaaaaaaaaaa

SEQ ID NO: 1486 - DNA, 381 bp, Rattus norvegicus
tccttgcctttttttttattattcacaagactgagattgtttaaatgtcataacttatatgaaaataagctacattgaaataaattaaacacaacggagacgtgcttccgacatggctcagataggatatacaaggccaggaaagacagccaggcaaagcaaacgagcagagcagagttctagattgctccaaaatcaaccgactgctctgcactcaactcaaaaagccaaaatagaaacaaacaaacaaaaaataacaataagaaggttaaaccgcagtgtttgtccttgtgtctcctgtttacctttgggcacgtatgggaaggtggtcgctgaaggcgacagagtacagtggtggttttgtttcatctggaaagtgta

SEQ ID NO: 1487 - DNA, 694 bp, Rattus norvegicus
ttttttttttttttttttwgaggktttatgttttataaagtcagagctggctgagcttcaggggtacagcaacagctcaaggaagggtgaagctgyctrttggtccccaccaccgsgagttggggagggggtttcatgccaacagctgakgctcctygcagctcccggscgatgctcaakcakggagasggtggtcacggggadagggaagctcctgavgctccgacactgctggcttcttctccccastcctgtcccttttcagcacagcctggstacccadctggcctggggcagagcaaaggcccabgascastggagggasgtggatggsgacagmgcaccaakggamrgggccctcggbccarkggaggagrsaaatggscctcyccccaacaactccccactgaattcacagyacagaaaasacctctagtccatcaactccacgtgraggtatactgagtccagggtccaaaggggaaggcaggtgagatgggcaggggcaatgaagacaagagcagtcggccagctgttcatatcccccaaaaatgtacatgatcttgcccaggacacaagctgaatgtccatcccgggccccaggaactgttcctgacactcggggtgtggaccacttgtgagtattgacatcaaaggcatagagtacgttgcaggccccttcggtgtcattacc

SEQ ID NO: 1488 - DNA, 588 bp, Rattus norvegicus
tttaatacgactcactatagggaatttggsscwykmggccwmgwkbcgsymybmggsrcsrdsktggcgtctgatcttggttggggcttgtcccgmacctaaggcaagaggatggtggctgcaaaraaracgaaaaagtctctggagtcaatcaactbtmggctccaacttgttatgaaaagtggmamrwrsgtgytggggtacaaacagactctgaagatgatcrgacarggcaaagcgaaattggttatcctcgccaacaactgtccagctttgaggaaatctgaaatagaatactatgccatgttggctaaaactggtgtccatcactacagtggcaataacattgaattgggcacagcgtgtggwaawtactacagwgyatrmasactgkmwaycmttkaycyaggtgattcygatattattagaagcatgccagaacagactggtgagaagtaaacaagaaagttctcctttaataaaactttgscagagctccttttaamaaaaaaaaaaaaaaaaaaaaaaaaaaaaaaaaaaaaaaaaaaaaaaaaaaaaaaaaaaaaaaaaaaaaaaaaaaaaaaaaaa

SEQ ID NO: 1489 - DNA, 836 bp, Rattus norvegicus
tttttttttttttkttwtatwwcaakggkggaaaaatttaatgtattttaaactgtgagatgttgtttttccccataaaatacaatatgcaattatttctttaaacaaatcaaccagtatcacaaacaaaaatatgtatatcttggtttgtaatcaatcagtaatgttatctagctgaaagaatgggtaccctgcattatattatgtrrgattaaaaacraaacaaaaacaaaacagagaaattttaaagaatcacttaaaacatccattaaaactgaaggctttctgcatttgaaaatggattttaaggatgaacactgttaacatcttgacatctgtaatgaaagggaaaagctactaatcctagttcttgtcacacgaagttgtcattgcagctgattttcaacatttatacatgcaatatataaattacagctctgtataacattataatactgttcaaaggaaaatawkkwtwtwywwwktwtttgataaataaaattattgcatttaatgttattttcttaaaaacccaaatcataatattccttaatgttgtaccaaacaatgccagttcaaawtatagaaaatgtatgtcaacagtacctgaaaacaaaattaacaagggtataaagccctacctacagtttatctaatttacatcaagtgatcatggaaacaaagattattaaaattattttataattatgcacaatgaacaaaagcataatagatagcagagtacttttccaccataaaattatttacacccatttattcagctagaaaaactagcttgagaggtactcgtcaggtatattcctcgtgaaataact

SEQ ID NO: 1490 - DNA, 618 bp, Rattus norvegicus
ttttttttttttttttttgcaattggcactgttattttattagtagtacgagtattatacaataaacttgtactggtatacagacaatttatttaaaacaattttgttcaaattttgaatcaaacattgttttattataataatgaaataatttctacctagaaaacctgcaagcaccatcaaagaaagggaccataaaattcaataaacagactcgagtgtwtcctacaaatagacacaccacgattagaaaatagaatatgaattcttccattttttttaatatttgttttaaaaaagctagtgcaagtacattttacactggggttacagagagtattacgatatggagacgtcctcctgtcacgagaaaaagctctwagctatgtatgcgcttaaaagtttcttttcaataaggtgcaaaaaaacaaaamcmaaaacwraamcaaaraaaacaaaaaaagttttgttttccctagttctccacatggtaggaccctyagcccaagttttggtgtctgtttctgcytggcctgtgggaagcataaccaatggaaatcggaaggtttgggaacgtgatgttgaaaccctttaactggtgccgatctctggttcttt

SEQ ID NO: 1491 - DNA, 526 bp, Rattus norvegicus
  misc_feature (494)..(494): n is a, c, g, or t
cggccgccactggtttkttttttttktttttggkgtmragcartccatttaatttttaacattggcatcatcccatgacatcttcattcccataaccccttccccctgtgctcttcaggcctccttakggcstcctgctcaaggtcctccaatgatggaactgggttgctgtcaccttacttgcatcagcaagctggtgtctgttgtgatgctratgccgggatggwttgtcccttgaytggggsgtcaggyggcatggtgctcagagccagctcatcttggsctakgatgmcatctcggtcttcatckggtctagagctactgggsccaaagaatttcaccacggctcggacctgtggcagctctgagaacgtctctactgctaacaacatggccaggagccccaggagcaagtaaccaagaagtgcaaactgcccaaggcgataaatggctggatgcaggcctcttccctgggcaggcagcaagtctcctangccgatagtgctgagtgagccgaagcaaaagt

SEQ ID NO: 1492 - DNA, 647 bp, Rattus norvegicus
cggccgcgggcactgakgcagcgcgaggcagaggagccggagcccgcsatyrggyagmkgcggcakctgyggaggcgatggcagggaaagaattggagcgatgccagcggcaggcagaccaagtgacggaaatcatgctcaacaatttcgacaaggtcctggaacrcgakgggaagctgtcagagttgcagcagcgctcagaccagctcctggacatgagttctgccttcagcaagacaaccaagactttagcccagcagaagcgctgggagaatatccggtgccgggtmtacctggggctagccgtggctggsgsymttctcctcaycctgrdtgtgcytmtggtmatctttcttccgagtggagaggacagtagkaaaccayaggcctaggakgcaggcacggccytakggactggggcctgacccascctggcctgaaggaaasgctgaatggctgcactggcctgttctggtctccakagaatcctggtgtttgcttccatctaggacaccccastgactgctgaagggcatgctggatatgtgcacytctgcgtctcccatcatgccayggactggscctattgggccacaccactggagctcagtaaaagctgctgttkggttaaaaaaaammwmrwraaa

SEQ ID NO: 1493 - DNA, 668 bp, Rattus norvegicus
cgttgttaccctcatgtaacaatagtggaagtatggtgataaatgtgttcatattataaagattggtaataagtttaattttttgtakkkkwtktttttttttttcagtgttccatttctttattttaccttcatcaaggcwagccaagkacagatgctgtacattaaaaacatawatacccctcttacaccatgtccacctcgcacaaaggactmtacgcactgctctctgaagcacatawccwcactaaatgtacaaagagccatccgctggccccacatagccaactccaatcagcaagacgtcgattagggtccatattcccagaccaccaaagctgaagagcttgccgaggccttcacgccactggcccaggtagaagcgatycgctccaaagcccccaagggtgatgctcaragccagagccgtcgaccacttgtagcctccagtccagttgcagtacarcagtttarggaaagtccggttacccaagcaatgaatgtggtcgcgcacagtgcagttggcaaagtagcgctgccgagggcaggmmacggtcatgcaggtggtggaatttgaacactcatagtctgtctcargaagctgccagcaaaacctgcaagtcatgttgatgacgaagttcctctggggcctgaggtcttgatcgaca

SEQ ID NO: 1494 - DNA, 536 bp, Rattus norvegicus
tttttttttttytktykbywkkgggatttaawtactctttattgaaatggagtgtggggtggtgagggcacccccakcctccakaatgaggtagggscacatgtattmagttsakactttgcctgrgtcttctttgagtgtgamtgttcggttgmagacaamctgtccttgawggstatccggatccacagmraagtmcccarggcsctcaamctgsracttgtcaaagggstytgccaaagccacaragcagtccaccaacgctcckttaakcacktgyadtgatgccssgttcaaskcacttaggaakccaccaggcacttckacagggtcktcarggktcktgtgctggratagtckctcatagaggcgaatctcacacaccadaggstgtgacacccagtgaataaaggccttgggcttctctccagcatcagctcgtctacaggtcacctscaagcattccacacagccactggagcccctgacaacatgctgcagttcaatgacgtaaccagtgtgtctcaggcccacag

SEQ ID NO: 1495 - DNA, 578 bp, Rattus norvegicus
catgaaggaggtggatgagcagatgctcaacgtgcagaacaagaacagmagctacttcgtggagtggatccccaacaaygtsaagacggccgtgtgtgacatccctcctcgtggcctcaagatgtcagccrscwysaktggcaacagcacysccatccaggagctgttcaagcgcatctcgkagcagttcactsccatgttcmggcgcaaggctttcctgcactggtacacgggygagggcatggacgagatggagttcaccgaggcrgagagcaacatgaatgacctggtgtctgagtaccagcagtaccaggatgccacggctgatgagcagggcgagttcgaggaggaggagggygargatgaggcttragaacttctcrgatacaktgtgcacccttagtgaacttctgttgtcctccagcatggtctttctatttgtaaattatggtgctcagtttgcctctgtcwgaaattcactgttgatgtaatagtgtgaacctcctttcaagatyacagtattgtctcagaaatctatatgaataaaaaagcatgtgtwtaaraaaaaaaaaaaaaaa

SEQ ID NO: 1496 - DNA, 505 bp, Rattus norvegicus
tttttttttttttttttyywhwwwhhwwtyccagggctttctccttttrttgtaaractggattcacataggacatggccaaggctcatatcggcatctgtttcagtgagtgtttgatgtgcttgctgagtatatgtgaacctgttcaaccataccgttgctagtccacaatgtcttctttactctagggtttagatagatggtgttggagagagttactttcccatagccccttagactgtgtgtagagggytgtgaccaacactcctttcactgaacctaktatctgaattcttgggtccagcctaagtttacactcaacagggatcttaaggctggtggggaagtmstctsymscatggkttctggggcggctgggaagtatasggcagcatcttcctgacctggggcatccttagcccaggcttgaagaggtaggcttgactgtgatcagccccttgaagaatttcactgggttcggtcctgcttgctcttttgtgcagat

SEQ ID NO: 1497 - DNA, 634 bp, Rattus norvegicus
ttttttttttttttttttwaaytttttttaattttattttttaaactatgggctaaaagtaaacagtattaaaasattaagtttatataatacatatgtacaatttagtggtgctttctttttaaccaaaacaaactgaaacaaattagtttataaacaaaaagtatacaaaaacttcatatcttaacaatagtttataatttttcaaagagagacaaaggttcacatgtctgataatctggcagtctggtaccacttttatccaatgaaattaacattttttaggcccaaatttccttttcamaggstaacttaaaatatttaatgtataagtagctattctatatacagcaagtttaaataaataaatttctaggagtcagtatacatttaatatttttctgccataagaaaatagaagtttaggtcatatgttaagttttacsatgttgacacagtcctcatctcataatattaaaaatggaccaccagttttacaaacataaagcgccttagggatatcttagtgtaataaagtgactttcttatatagtttgaaaaagtgtttaattttacccaaattgtgatacacaaaaggattataaagcaacctttctatcaagtaaaacccccc

SEQ ID NO: 1498 - DNA, 516 bp, Rattus norvegicus
ttttttttttttttttttgagattagcaaacacttttataagaaaacactaagtttaaagagcttataagaatcacaagcatcataagaacagaaaaattaacawktykkkwtwkwwwwttgggctaaattcaatggactttttaagatkaaaaacaatctctaagacctatgtgggggtgcatgtgtggwcccagcactcakaacacagaggcaggtggatgtctgtgagttcaaggccaacaccggytacatagagagtttcaggccagacagagctgtctaaracaaagcawracawaacawracaaagcagaaacaacgtctaagaccatttgatgatatagatgcctgctgtgtctgccgccacctctcaactcctgagtctttaactgtctagtggccttcgtgacctcttccttcctgagcgccgtgccccctgctggcagtgtgctcagctactggatgcaacaggacttggatgcaggtgcaccccctggactggggttccctcctg

SEQ ID NO: 1499 - DNA, 675 bp, Rattus norvegicus
ttttttttttttttttttcctgtaaactatagtcttttatagagttacacatctctttaaaataacaccctggtgcacacatgcatacttcaatgctttcttttcctrgksaatacwgcgmgcsaratttwtttytkwwtkkwkktggggcgtccaacaatgagctttatttagaaggaagcagagctacagtgataacaacagaagtctagctgtaagcttttctctaatgtccgttaatacatttatgaacaaatcaaaagactttgccagaagagcactgttgtcagtggctcaagggctactgactccagtgtgccccttaaccaggcaaaatattcttttcttggctcctaacactatttattttgctgcctgccaatcttgaaaataattcatgctgtgtggcatttcctcataaatgcttcccggtgttgcccmgctccgcttgtkcagtgtctgatttcaatctgccattctacctttataaacatttagaactttcacagcatgagggaaatgcccaaaggcatacaaacacaaggcttcaaggatagccgcagagtctgctttacagcaatatctagttcttgmswyrtkaccagaattctctctttacatcaaatactgcatctcaatcggggtacagaacaccaaattaaaacccgcctcgtg

SEQ ID NO: 1500 - DNA, 807 bp, Rattus norvegicus
ggcacgagggaaggtgggggcttagccagccttcgacagtttctagaaagtggggttctggggtcaggtgggggacccccacgaggtcctggttttttccgggaggagatcaccaccttcatcgatgagacacctctgccttctccaactgcatcaccaggaccctctcctcgtaggcctaggccgmtrggcttttcacctcgacgactytcscttgggtctcytgagascsgagctrttggacttcctttgsggttaagtgcaggmagacsctgttcccttacagggagtgaagggagttcwagggcttggggaagaccmtgggggccaggcaacsscatckwsscysagttgaccctgtaagsccatgggtgagtgagtttgcctcattctggccmtgagtctatggcagctgcctccagggagatggggggctacatytgggctbtagagccccagctctytmccatccaagtgaccagatacccaactcacccgtcttcacccttagcaaaatgtattaaaaggctgargtgttrmmrwrraaammwwrrwvhwmwrmramtgcggtggcaaatgggtcagtggcttgggcgagggagaatggctcacagaggacaaaatggagaaagggcaggaggaagagatacagaaagagacagcccaacatgcaggcaggagaaatgggcttaggagagactgatcctgaggtggagcatggggcacttgagtgtgttagtttgaagtgggaaggatccttgttcaaattagtaaaggcgctcaatcctcaaaaaaaaaaaaaaaaaa

SEQ ID NO: 1501 - DNA, 498 bp, Rattus norvegicus
ttttttttttttttttttgatgattcattgtttatttcctttctcccccaccgtgaccttggtgatggctgtacccatatgagcattcatctgagcacatgaccggaagtcatcgtaagagaggagcagaattcttgtctagacagtaacagaagggagttagctgcaaagatagcatatctgttgtgcagtaggaagctgcccaggtcttcttggagaatgcatagaagacttagaatcatggatcatctgtcccccaaccaccctccytsctsmcwgtgwtarcmaamgctkaatcttcmagyktyaamgtgcaaatggtttggatatgactgctgctgcaggtctgaacagaacagacggagtgccatctacgcgatgttctccaggatgtaaaagatgagctcgatgccgactgggccctcgctgagctggcaggctcctccatggatgacaggcaccaaggcactgtccagatccttcatgtactgcgagggg

SEQ ID NO: 1502 - DNA, 565 bp, Rattus norvegicus
acgacggccagtgccaagctaaaattaaccctcactaaagggaataagcttgcggccgctagagtttttttttttttttttttttttttgacagatcaattgtaatttattttcttttaacactgtatcatcataaagaaaactggtataamtgaaaaaaaatctatttcaaatatctacatctaaaattttaggcagtgaaaaagcattttgttgacgaggggtgtggaatgacgtgtcagctcgggagaaactgctggatgccgcgtttagttkccacaaacaaatcacatatcagaacgaacaatactgctaaatattccttttttttcctgtttttttttccttttttgttaaaacatactgggagaaagaaaaraaaagaaaactggaaacccatacatctttcaaaagtttgagattggagcaatatttagaaccattgatgaggaaacacagtggcattggtgtaatatacacaatgcactcttcgtctttaatctgtaatgtacatcaaatactttacaacaatgcattaacaaaaggcaagagacgtcttgctgta

SEQ ID NO: 1503 - DNA, 421 bp, Rattus norvegicus
ttttttttttttttttttkwtkktwkktagattttgtacattttattcgtttgggacacatwaraacccaccctgagggatggagggtgggttggagttatctggtggttwcttgtgatwvaatcstgggttctggctgtgttggatgaaarggartykakggcccggttggctggtggtggcaaagcctgacttyccggctgcttgtatctgtacagggagctgargagaagccaggagtccaggggctggatgcagagcttggggatgcatgggccgcagakaakatgagtcagakaagctagtctgctggttggcatgctccatctgtttttgcaaagagagggcactaccgggctggaggaaccctgtctgagtgggctgaaagtggccatgcactgcataaggttgtggctgtggc

SEQ ID NO: 1504 - DNA, 688 bp, Rattus norvegicus
agtaagcaggaagtgaagctgtarckrscttgggtggaaacagactaggcgaagttctgctttgagaggcccaagtgctccgagacatggaggccagtgggagtgccggaaatgaccgagtcaggaacctgcagagtgaggtggagggagtcaagrryaykakgrcccagaatgtggagcggatcttggcccgaggggagaacctggaccatctccgawwcaagacagaggacttggaagccacgtytgaacacttcaagacgacktcccagaaggtggcccggaagttytggtggaaraatgtgaagatgattgkcatmatctgtgtgattgtccttatmattytcatcctmatcatactctktgstacgggcaccatcsccacwtaagrgcmcctytcacctcaccstactyttcaggggtgatcctcccraaagtrtbccaarrrgggccctytcctgccctcctccccaggrgtgytgctcggtccctgtgrggrcctthtgstgcctcatwtgccccagaagttccttgatcccctgggrggrgacagytggactgtggctgcacctcatggtcctgrgrgtgggttwgrgrgacccmgrggaccctgtttgtggctgggaaactgctggtggttggtgggcaataaagacctcttggtwtccttwaaaaaaaaaaaaaaaaa

SEQ ID NO: 1505 - DNA, 500 bp, Rattus norvegicus
ttttttttttttttgttcaaagtattcaagaaaagacggttttgcaggctgcatggtctcatctctccttttcatggttccttcctcttcctcatcctccgtgttgatcaccatggtacccagctgggatggcaatgtgtcaccgtgctcaatcatagtattggctccgccgctcatcgtgctggctactcggacagtgcccatgtcatcacccgcagctcgaaccatcgtgccagagtccatttcatcctcctctgagttctcatcgtcgtcctggtccactgcccgctgctgggcttcctggcgcttcagtttcacgtccatggcctcgttaattaagtctcgcagtatggccgctcccttggcgctcttaacaaacgggtgctggaggagctgagtggctgtggctctctgctccgggctttttaccagacactgcttcacgaaatccatgaagttgtccgaccacacctcgggcttacggaatgtggtctcgtgcc

SEQ ID NO: 1506 - DNA, 517 bp, Rattus norvegicus
tttttttttttttttttkywkkccaacttaacagctctatttacaccataccaccaactctgatggccccttatggtttcttggctttcttcacagaagatgagctggaggctgattcccgtcgtttccgcgaattgggtgtgagcggtgcacccacgacatcaatgatggtgtccttgctagggtcaagaccaagtccagattcagacactgttggctcagcagacgctggggttggtcccactgctggtgtggcagggccccccagcactcctgcccgagccagagcctcatgccggtgccgtagcatctgcagctcatattcacagttggcacaggcctgcttgagctcgtaragtaacaccaggtcactccgcaactcattgaacatatgcamcagctcctctgtgggcgtagggctcagctccacaccaagttccagcagcatctgttccagcgccttgatcttcttctgacccacagagctgggcagcttcatccgctcctcgtgccgaat

SEQ ID NO: 1507 - DNA, 516 bp, Rattus norvegicus
ttttttttttttttttttgtgaggtggcagtcatatttatttttacttccattaacaaacacmgagataggaaaaggtgcaaagattaagaatattttagttcacacaaggattagacactytccccatgaatataatagtgttcagtgcgacttcccttataagaaccaggaagggcctgttggccttgaaggtcaccctactggggttcagtgaccggccagtaatcacgacagaagtactcgctgctgcttcactgccttcctcatttacctcaagaaaygctttgtggaatgcatcggagacaaagaggtcgtccctgccttcagcaatgatccctgggagttgggacttctcagggctgaagagatcaacaaggcccatgtcttgcagctgctccttcagactgaagctgtcctcsmtgygsmagcggggcacgtggaccacaagcatgacctccgacagctcatccagccactcctgcagcagctccggggtgagttcccgctccacctt

SEQ ID NO: 1508 - DNA, 463 bp, Rattus norvegicus
ttttttttttttttttttcaggggggaaagactagtttatttgttttataaaatasaatgasaaagcttagtgtaracagtcaggaggagagagtcttaagtgtcatcctccccaagaacagccccgtaccattgttgattcattcctataggacagacagggtagtataattcctgacccctgcctggtcacttaaattcttcttaaggaatccaaaagaaaaatacttttgattttggwtactcttaaagttaatattcgcagatgccctggaagaaacagttcgatttggtttcatgtgttccgagaaggaacggtaaacttagcctggagcagggtgacctccactttcaaaggstgtgamcaattatttgagagttgtaatctgcaggctccatttttaaaatgtgtgggatgacactgtcgatccgtacgttgccaatgagacctttgaagaacaat

SEQ ID NO: 1509 - DNA, 571 bp, Rattus norvegicus
tttttttttttttttttwkwkhwwgcargagatgggatctttattarcagctasagctatgagctacavataaatcaaaaacattgacactgaagttgctggaaacaggtctgtacagaaatattacaaraatctcatcttccaatcccacagytaamctcttggggaarggcagccttggycagggcamagcagcasagaagttatyctaagaaagtctcatccaccaggaaagcagtgamctacagstacatggcactaraactcaagatagcagtttgtwaagagtcscttaatcawaaaagttttcgaatgaaaayacktgcccctcctgtcccgggggcttccaratctctacccaagagacttgagtacytctattaasgcaactggaagcccagcacgtccttcctaacrtgcyrtgssgaaaaaacavatgtccamagtgctgctctttcctakaaaggaaacagcactcamrataaaggaaaaggscacagagggctccctgagaatccartaaaaccaagaacttttccaaacacactttgcaactggatccaggtggagc

SEQ ID NO: 1510 - DNA, 985 bp, Rattus norvegicus
gcggcttgcggagcgggaggcagcggccggagagccaggcggaacctgcgggggcggaggcggcggtggcagccggggcgcagatagcaggaacaggatcaagccctccataccagggaccaggctaaaaccagattaccactgcccctacctgggccctgttgacttaaagcagccactgtaatcatgggcaatatctttgggaaccttctgaagagcctgatcgggaagaaggagatgcgcatcctgatggtgggcctggatgctgcaggaaagaccaccatcctctataagctgaagcttggcgagattgttaccaccattcccaccatcgggtttaatgtggagacagtggaatataagaatatcagcttcacagtatgggacgtaggtggccaggacaagattcggcccctctggagacactacttccagaatacccaaggcttgatatttgtggttgacagcaatgaccgggagcgagtgaacgaggcccgggaagagctgatgaggatgctggcggaggatgagctccgggatgctgtgctgcttgtgtttgcaaacaaacaggatttgccgaatgctatgaatgctgctgagatcacagacaagctgggcctgcactctctgcgccaccgcaattggtacattcaggccacctgtgccaccagcggggacgggctctatgaaggcttggactggctggccaatcagctcaaaaacaagaagtgagagccaggcagccctctctgmctaccccacscactcctgaaacatacctgwtgtctccktaccccaatttccccctttstkcctcatgaaatgtggscaaggtcctgggtgtcatgyccaytgcscagcaagcgcctttcctcctgagcctcccgccccsttccttgtgcaytgacrcggtcagcccccastgctgtcmtgatgatgagtcatkccaatykactgggtwtaaaccaraaaaaaaaaaaaaaaa

SEQ ID NO: 1511 - DNA, 2768 bp, Rattus norvegicus
ggcttttacsasgtaksagcactttwctttcattggggggaaggcgtgaggaaagtaccaaacagcagcagacttttaaactttaaacagacaggtctgagagyytkwwytytywtttttcctttgacttcagcctccaaggagttccaccaactttggcggcggcttcactttcaytaagtgaaagagaggtgcccagacatgggtgactggagtgccttggggaagcttctggacaaggtccaagcctactccaccgctggagggaaggtgtggctgtcagtgctcttcatattcagaatcctgctcctggggacagctgttgagtcagcttggggtgatgaacagtctgcctttcgctgtaacactcaacaacctggctgcgaaaacgtctgctatgacaagtccttccccatctctcacgtgcgcttctgggtccttcagatcatattcgtgtctgtgcccascctcctgtacwtggcccatgtgttctatgtgatgagsmwsgwrsmgaagctaaacaagaaagaagaggagctcaaagtggcccagactgacggggtcaacgtggagatgcacctgaagcagattgaaatcaagaagttcaagtacgggattgaagagcacggcaaggtgaaaatgaggggcggcttgctgagaacytacatcatcagcatcctsktcaagtctgtcttcgaggtggccttcctgctcatccagtggtacatctatgggttcagcttgagcgcggtctacacctgcaagagagatccctgcccccaccaggtagactgcttcctctcacstcccwcgrwgmwamccawmwwmawmawmwwmawgctggtggtgtccktggtgtctctcgcyttgaacatcattgagctcttctacgtsttcktcaaaggcgttaaggatcgcgtgaagggaagaagcgatccttaccacgccaccactggcccactgagcccatcaaaagrctgcggmtckccaaaatacgcctacttcaatggctgctcctcaccaacggctccactctcgcctatgtctcctcctgggtacaagctggttactggtgacagaaacaattcctcgtgccgcaattacaacaagcaagctagcgagcaaaactgggcgaactacagcgcagagcaaaatcgcatggggcaggccggaagcaccatctccaactcgcacgcccagccgttcgatttccccgacgacaaccagaatgccaaaaaagttgctgctggacatgaactccagccattagccatcgtggaccaacgaccttccagcagagccagcagccgcgccagcagcaggcctcggcctgatgacctggagatttaaaccggcttgagcatcgagctgtcgattatggaggagaaaaaaaggtgcttgcagaacatgcacctagggtgttcattttcgttcccgtggagttggtactcaacaacctcagcaatgaggccatagaaaacaaagacattacaatacctaggttccttgggggtgcttgggatagctgggcgaacaggtggggataagggaggtacacattgatatttaatgtagaagattcaaagaacttaaattctagtaagagtcgcattgggtgaacatagataagggctttctctctctgcccccatcccccaactgaaccttaagaatgagtctgtgtattgtgtgtgtttgtgtgtgtgtgtgattattcatcagtcactgagcattaaactttcctgtcttgactattataaaagatgtacacttgagaatgtggatatctctttgagatcctgatttcaactcttttctgaaagtattgaaatgtaatgtcactcagtcatgtgtcagctctggttttactttttgaaagacttttataatccctggcctaggattgcaccattttatgttacgttcaacagagcactgaagtccaatctcaccgtcaataccttactaatacacatgtttactttctaagcatttgattttacttaacacagagagagagagagacagagagagagacagacagagagagagagagagagagagagagagagagagagagagatgcacatacatgtatctatgaagtccagaagagggggtaggatctcctggagctggagttacatgtgtttctgagctgctcagtttaaatgctggaacagaacccaggtcctctgtgagggcagaatggctcttaatctctgagtcctctctccagcccccacttctttcctttcatactagctgtgctgacgagcatgaagtaatactttcttggagccgtgtagctgtggattatgctaatttagtaagtgatggtttgtggttctctcacatccatgagttcactaaccctgaatagttagctaggttttcagtaggaagcctggtttccattttgttgagtggatttcaagtcccattaggagctattggttacaccaaccatgccattgctacaccctaacagttactgcaccagatcaacaacgaaaagcaggtttctcattcctgaaattgaaggattttgttaggtgatctttgactcttgatcattgtcagcccagataagaagattttatttaaactacatatgaatatttatacacacaattattcttattatactttttatttataattgcttatatttatttataagtttttatttacatttgtggttaatagaatgattccttataaccttttcagatatccttattgttaatttacctccatcctcttcc

SEQ ID NO: 1512 - DNA, 518 bp, Rattus norvegicus
ttttttttttttttttttwhcgkactaacgtttttaatatagtctgatcaggtcaattcacatcacaaggtcaacctgggcttgctcaagcataacacagtcaaggtgaacaacatctctacstgaggctcytccamsttcctggctcccaacgcactgaaccctcttcctgatcagactggaacttttttwwwwaattttgcataaaactatttcttccatagacttcaaacaactagccaagttaattatggtacacytaaacaaagtttaatactaaccctaatgtgtgactgcggtttwmaaagagctctgtgtcacctggggtagctttcagtagcaattcactacaactggtcctaaaaawaacrakmagmrkymgagaataaaacccaacagcaagttgaatggttaaaatcaagtaagaactggaatttgggggagaggcgtcctcagtggaggggcttgccctgacagcgaatgttcgcttccagcagcttggggagaccagggccaac

SEQ ID NO: 1513 - DNA, 751 bp, Rattus norvegicus
  misc_feature (611)..(611): n is a, c, g, or t
  misc_feature (678)..(678): n is a, c, g, or t
ttttttttttttttttttywwwwtkgagcaacagtactttatcacaatgatcattctaraaagatgactgtcatcccaagggttccaggactggtgtccaggttctgatgacttaacaggtgatgagctgtcactgkggcactcggacatccadtttgcattcagccakggcctcccyaagttcattgmaggcacggcaggaataggtccctgcatcsaagggtgaaggtcggcgaatgttcasggtcaggatgccctgstasttggttatgakgaatttgggatcttcgtggatctccatcwtgttcttcatccacaccaccttgggcttagggtggcctctgactgcacagttgaragctgcggcatatcctgccaccactacccggtccatcakgggggtcaggaacttakgggctgtccggaaatcatgctctttgtaytccatgggttttaaggtgattcctgtcttgaggatccgagctgtgttcttggagacacctggcgagtcactgaggscacagatgttctcgctgaagacacggwagtagtactcattacccacaatgaggtcagacaccgtacagctggtgtggcgattgtgctcgtanacattgaaccactccatggtctttttgtcagccttctggacaaagtagcctgtgatctcactgttcncgtcgtccttgggcggctgcactccacagtgattcgtgcccacactccttcacatcacatctctgctggcctg

SEQ ID NO: 1514 - DNA, 501 bp, Rattus norvegicus
tttttttttttttttktwgcaaccttgtaacttctgctttaatggcaatcaagtttaaaaatgtacagttcacttcttcatactgtttgttcctttataaaaggcasaattcaggtaagcgtctaratgcatgcataacgtaraggcagatattttctggcagtccttggttcctgaaagttggacttccatcasatgtggttttaagcttttgtcaaaataktcatgaaggatatgttacttctgcataatgargtaatatctcaggggtggccactcgccataagatgtacaaatccactcayctaaacttgcacraggctgcatatgctgtaaaatgctgcamaggattttgtgtcagtsaatatttgctgaaggaataacacaattaactgaacacttttctgtaataaataccaaaataagtttttgtacctgtaaactgtgtacacagataactacaggctggctggccaggggactaacctaacgttccacccg

SEQ ID NO: 1515 - DNA, 1175 bp, Rattus norvegicus
  misc_feature (79)..(79): n is a, c, g, or t
tggcccagctccacactctgtcctcgggctcaaatccacatcatgcagatcagactctccatcagggtttatctaggtngctgagtattttttatttgttcatccatcctttgtttacctgagcccacggccccatgaccgwggacywmtravgycwkgdrgswhyygsagdymcmmwmwcctatcmawsctctcacttacwtywctrggtttggctcctatctggaacgcacaccggtccccatggcattgtctggcacaggtacgctggtggcttctattgcctccaaggtggcatcttcagtggccgtggtcaaagccggaggggcggtatccagcaccatcctagctagytcacaggggctcaacttgttagcccmgactgcactgggctctggagcttytgcasktggwtctkcaktggsmgyrstsaargcyggmrssgykktatccagcmtccmtgcctmcgcctwggstgtttgcmccattggagtcaagactgytgtcgccatgcttgggggasccgtgacagtagctgcggttccamctgtgctgagtsccdtgggyttcactgggtcaggcattgcarcctcctctmtagcagccaagctgatgtctgtgtcarccattgctaatgggggcggagtcscarctggtggcctgstgbccactctgcagtctgctggagctgctggactctccatgacatcyaaggtcctcstgggctyyacagggtctsccdttgtkgccartgtkatgggygtctgttaagcatttgtactccttcctctgataattgtacttggaaaccaaggtggctgacatggcaagagaggaggcagacatgggaacagaggtgtcgccactcagcttgtctaatccggagagggattaattagccccaggggacaatttactatcacagattgcctacgtggaaataagaaataaaaccaagtgcttgccawaawaraaaaaaamaaaaaaaacaacaaacaaaaaaacacaacaacacaaaaaaaatacacacaaaaaaaaactcgagggggggcccggtacccaattcgccctatagtgagtcgtatcacaattcacgggccgtcgtttcacaacgtcgtgacggggaaaaccctggcgtaacccagattaatcgccttgcagcaaatcgccctttg

SEQ ID NO: 1516 - DNA, 504 bp, Rattus norvegicus
ttttttttttttttttttwbywktkwagcaggtaattttttaktchtgggtgctgactccaagcacccacgccyctccctrctaccatccatctgcctgtttggagccagaggtccaagtggactaggagctggwatcagtcgtagctatgttcacaggtcagcagctctgagtggtgcaactggagctggcagggctctcadtgctggtccaggatgaggggcatctgtgcgctgtctactcggggaggtaaccgctctcctgtacgcacgttgaacatgggcaaggtggatagakgccggggcacctcgcggctgsytgccatctgccgaagctcttccgtattcccgtggatggagcagtggtgaaacatctggatgtcagargtggccatgtctctcttcagccgtccttcacgccgacagcacataatgtaaaccagcaacagggtgagcagcagagccaccagcacgggcactaagagggtcaccaaggcatctgtta

SEQ ID NO: 1517 - DNA, 663 bp, Rattus norvegicus
ttttttttttttttttttywkwtttgtwagaaacaatatatttatttttytgacaccacagytmtggtgagtggktttgtmccmaatttaatgaarattacacabaacgtttcacscatgggaagagggaggaaagggaaggwacacamawtytaamacawawmcaraatcctgsatagcttttrrcatckgwtccwktcccmcattaataaaattcacttgkkaattcctaagaaaaaaagagaacaagaaacaaggcggtcgaggaagagtacacaggcggggaaggctgggagggacaasaggcasggcatccgaggcaggggcgaggcttcccgagagaaccccagagaagagaacccgggtattgcmrctgscaaggggaaraggaggggggaagcaswgsgccwcswkcsgrrtyacaggaaggaaacacacttacccaaggaactggaggaggagaggaggagaggaaaccgtgagggcgggttcgtatactggsagagacagaccgtgctcaagagcacacgaactgaagagcaaatgtcccgagcttcagtatttttaaamswmrwktgtccccctcmccccacccctcgctgaactcagtttcttttttgtgcttgtcgttaatactctgctctgaggtcgtagtttggtttt

SEQ ID NO: 1518 - DNA, 1068 bp, Rattus norvegicus
  misc_feature (97)..(97): n is a, c, g, or t
  misc_feature (213)..(213): n is a, c, g, or t
ttttttttttyttttttkbyyttgcbcawkwmtttattccgcagtcaagtaaatcawaacgtcawgccgcagsatkattaavggaraattackggwncagctktcwaaagdgcaacactgacaggtgttctttcccatgatkaaacawaracmcacttcccwaaggtctgggaraggcaaacawscctttgawmcaaactgcccarcawttanaggcaractgcaaataatttcwactascatttttctgcaaggkggagcaaccccccggstggcwaactyaagccctcatgtcacccacctgtgccctggmtttgghcyccttcctcaatcamacctacacccawmaggcttbyytgyttcavactyaracaccccccgagtcccggrggccctgarcactgctgsccawkartgastttgtgaacaactttyacccavaatcycgtgggaraccaggagcacgatggctcadcsatggcttgsdgtcatttyctyaaacaatagktctaactgtwaaacaagctgacatytgacaggccatytgcacgccataaacaaaccagkgkattcttatcttttcctktghytgcaaaatgtymwsgwgmckatccaaggggggaaaaaatgaaatgaattcarrgggtttgtgtcacaaagtaaaccmstcstscacaggcaaattcatttgtttttgggcttcgaggccatgtagagggcgatcaggcagtasatggtccctcccactgtgagagccatggtggtccggtaaagcatttggtccggaaggcctcgtttcaggtggatgggcacaccgtcagccttctggaagaatctctgtagctctggaactttattcttcccagcatagtcatatgctgtcacactggaggtcagtttggtcggtgtggcaaatatgataggcggtgcttcymtggaaaccggcttaamaccytgcggagtataggcttccgaagcccaagcactagccamcttctgcgtgaaactgctammyytgtagtacatgttggctgamsccagcytcgyrccgccgcyscctgcctcgtg

SEQ ID NO: 1519 - DNA, 518 bp, Rattus norvegicus
ggtgggcaacaagtgtgacctgcccgctcgcactgttgagtctcggcagccccaggaccttgctcgcagctatggcatcccctacattgaaacatcagccaagacccgscagggtgtggaggatscsttcwacacaytagtacgtgagattcggcagcataaactgcggaaactgaacccgcmtgatgagagtggccctggctgcatgakctgcaagtgtgtgctgtcctgacaccagsctcaggacgaggaggtkccggatgcagggaggaggtkctgtcggaaggaaggaaagaggagggaaggaaggaaacgatgctggagccagtccagtccagggatggtggacagatgtgmccamgaccttcgcatggacaatttgaacagactgtcatgaactatccctgktgccactggcacccaagtccyccgcccctctcakctcccttgggcgcctatgagggcacatgttgaatcacagtaaattatttgatggtcwwraaaaaaaaaaaaaaaaa

SEQ ID NO: 1520 - DNA, 478 bp, Rattus norvegicus
ttttttttttttttttttkyywwwgtgctcayaggstgtttattatcawkaggaaggagagagaggaggagagagcccagacagccctcrkggcccaarggagagtgaacagaaaggctcctcttcctcctcttgccastgamccagaagactccatctgcagagatctcagggtggcttakgggcctccaggakgygtggcagctctgctgttgactggmgatgggatggatccccacagggtcaggtcccagcctcggaatggcttctgtgtacacaaaatatctctcttcgaaaggcactggtggaggtgagsagtakgaaggctgccccatcacaagccaractcactgtcccargtctgagttctgcttcctcaggttggtctctgaggccctarttcccctcctctcccttccctcagcccacagatgagcaggcagtcagcagaaggacgggtcaggtcacaagatgaacg

SEQ ID NO: 1521 - DNA, 650 bp, Rattus norvegicus
  misc_feature (50)..(50): n is a, c, g, or t
  misc_feature (74)..(74): n is a, c, g, or t
tttttttttttttttttttktgcchkwkwkkwywwwkybdytbkwwkkdnykywaasgggctgttctttawtanwgagtttcyywaaggggaaagtgcycartcccktggmamadttgtctgakccccahacarcatcccttccaasagccctcatcaraaaaahagtccccgcatycgcctgccgatgccttgtcggtcawacaggacgttgaacttgttcacaaactggktcattgkgttgcacgttttggwgatggtgccgakgtadgbcawaabccccacgtcattgcattgatcakaaaagkctgtyytgaacttgtcartgctgavaactggwaracagtggsatagggcatadgcctcccgcargatctyatggttgmagggaayctctcctgcttcaraggccttgacgtactctaaaatgagcttcacacrgstgtgcadcatcttgatggcgctgtgctgagctatgaggtgttcarccacagtggagttctccccactgcctgtagctgtcatccgggccacatggtctayaccgatacgttcagcttcctcagtggccagagtgtaagtgagttcagcaaacagcattgtggcctctccattgattatatcgatgacagactcaaaaacgccctcgtg

SEQ ID NO: 1522 - DNA, 826 bp, Rattus norvegicus
gtgaaggtgcgggtccggctgtgggctctgagaggcccctgcccggatggcagcagtagttctagggggagacaccatgggccctgagcgtatcttccccaatcagactgaggacttagggccacatcagggccctacagaaggaactgkggattggagcagtgaagaacccgaggaagagcaggaggaaacaggagcaggcccagcaggctactcataccagcccctcaatcaagaccctgaacaagaagaggtggaactggcaccagtgggtgagggcgaagatggagctgctgacatccaagatcggatccaggccctggggcttcacttaycagacccaccaktggagagtgaggatgaagatgaggagggagctgcagcattgagcagccacagctccatccccatggacccagaacatgtggagctggtgaagaggacgatggctggagtgagcctgcctgcgccaggggttcccgcytgggctcgggagatatcagatgctmagtgggaagatgtggtgcagaaagccctccmrgcmcgrsrggcatcccctgcctggaagtgaccactcagagagctagctgcsttacctccctgcatwmcaggcccggaccagcacaggactaacagttbtggttttaacawccaccttmttcccatgtcctttttcacmccaaggcaagtcagacytmtcagagacccactttattcagttctgtacatatggggacattggcccaagcccagcccaccttagcctgtatcactmtgtggagaataaagcaccytwtgtmcmmmrmmvaaaaaaaaaaaaaaaaaa

SEQ ID NO: 1523 - DNA, 671 bp, Rattus norvegicus
ttttttttttttttttktwtttgkattgkagctgctttaatctgccctcaccctcccagcasgaagctccttataagaaacccaagtcctcgtctttgagcttctcctttagccagggcagcacctggaagagattgatgtggaagtcccgggcataggagggcaccaactgttgccgcctcgggtctttgcagacatccactactccccagctgatcacaccaacttgaatgaagcggcttctcttgtgaacaatgagagggcccccggagtctcctttgcatgtgttggggtcagcatagggatctacccctccggtgcacaggaacctgggggtgaccacctcagaggcaactttgaccttctcatagcyttgggcctttgtagcatctctctcacaactggctttcttttccccattcttgatgtacacctccttccgggtcagcttcttcccttcctcggatacaaacagagctttgacgtccttcatagggagcaactcttccttgtgctgtttgcaggtggctgtctgaggaagccgcaaggctcgggtggttccctctgtgcaggggagacagatgggcctgagagtctggctgtacttcagcttggtcttgagcttgatgagggcaacatcatagtcatagaactcagagattcccctcgtg

SEQ ID NO: 1524 - DNA, 580 bp, Rattus norvegicus
ttttttttttttttttttgcarcaycagrggaamyccatgkdwktkkkkttwywdwtagttttctttctttattgttaaamaaaatattaacarcarcaasaacaaaacaacaaacacaasaatagtayaaacattcacawyytktywkwktyytktaagctttggccatttattcctartaragtccttcctctcagtgcgagcaggagcttcaaccaaaaggscccttmatgctttttawgggcgggtactgctgctccattggmatggycccaaaacartctgaggggttgcagtggmctgccttccctggctggcccatgggccccggggggccagggatcccaggaatgccttgctggbccattggcccggttgcacccatcwtgccataacctggaggcccttgaggacctggagggccasggagaccattttctcctgcaatgmcarcassaatgtctcccttatcacctttggtaccaggcaatcctctcattcctgggaaaccctggcgtccttctcgggctatcggagcagagagcccaggtgatcctggagcacgcctcgtgccgaatt

SEQ ID NO: 1525 - DNA, 615 bp, Rattus norvegicus
ttttttttttttttttttytgkgcacaaaaatgatacatttattgaaagagtatttttttttaatacaaaagaaagctctgtacagaggatgtgaccatgtccactattcctgggtcgacatcccaggagaagtagaaaccacggrtatttccacacatactccacagtcacacatatattcactcagacacaggcacacacacacmcccagagccacttaggaagggaaacaccaagggttgctgcacatagaaatgccacctcagtcctgacaaacaggttctcccaaggscacaatcacacagcacacgttgtggtaagcactttgcctgattcactcgccctggctctatcttttgtgaggaggaatcaacaccycctccggtgttgggggaggggccgtgartgggtggcagtggagggaaacaagagcagagaagggggctgggcarttacagacctgagtcscaagctccccaactctggccctggtttaccatgccccagtcttgaaagccacccaaatgccccagctatttccaggagaaaggccagaaaggtggcatcccagctggggaagacagcaatggggattagaggttaagggggctctc

SEQ ID NO: 1526 - DNA, 651 bp, Rattus norvegicus
ttttttttttttttttttwwwwkgacycatgaatattttattgtatggcttataactcattacaggtttgaggtggttacccgcacagtagattatgagcaaacacactggtgggcaggatggagcagggttgtgagctggggcttaacaggaaagcatgggtagcagaggcactgtaggagaccagactcagasggacaaaatgtgggcatgaggagggaggagcttakcagggaagttccaaacacaggtggctgggagccagtgtgccaacggaggcctgcactggagctggtttgcagggtcccttarcacaggcttttgtgtaaacttttgatgctatgctacgaccacagggccgsacagamtctsstgcmcacattcctgatcagcactttggcctacagctttcaacacttggctctgttcactagtcttccatagtggaaacttgtcacctagcacacagctaacgtccttccttcctcagatcctccacatgctagcccaactgacctctttggkttatgtcactgtgccacagaccaatttacccttccttgccaatgttccctccccagcctcactgtcaaagtactctccctacmcactgactgtccaagctcttaatagccagcgggccccgcctat

SEQ ID NO: 1527 - DNA, 655 bp, Rattus norvegicus
ttttttttttttttttttagkattaatttttattacatttatttattaatttatggcctgtgacttgtttgtaaatcagaggtcaacttgcagctttcagctgcmaccatgtggattccacagttgaacccagcaggtctggcarcagggcctttctgtatgtcatgggtccccctgtcccttctctggcctagcagccaatgtgcarggtccttgagagctctggctgctggtgacagggtagagcaragccaggtgctcaatgccytgcacargcagtgggcgggcactgtaatgcaggaccagctcargcacgctggggaagggcccactgtgctgtcctagtaccacctggktctcccgggtctyckcgwryykcargtgcatsgaamsstggttacttctgagggacagaatgcagtcctgagccctggtctcgcttagccgcacaaggtagctgccttccttgcagagggacagaaggttctcggcctccactcggctcaggggaccatgaaaccacggctgcttctccagggccagagctgtatccacacgctccgcaggctgtggtctccaaggctccttggtggagcatggagtccgttcccagtcaggaccatgaaattgcactgcgaaagccctggaaatgtga

SEQ ID NO: 1528 - DNA, 2528 bp, Rattus norvegicus
agagcgcgcccagctctccatcttccgcgcttgccgaccctgagcgccacgtgtcgccgcaccgccgcctcctcagagactcgaattttcacccaggggctggagccacgaccccagccaagagcaatgaaggactgcagtaatggatgttcggcatcgtatgctgaagaagaagaattagaagcttcgaccgagtcgtatgatgaagaaggaggatcagaagcttcgacccagacgtttagggccaaagatctcattatcacaaaagccgatgtcttaaaaaagaagcccgaccccagctcgctggtctttggagcttcgttcactgaccacatgctgatggtggagtggacctccaagtatggatgggataagcctcacatcaagccttttgaaaacttgtccatacatcccgctgcctctgttttgcactatgctgtggaattgtttgaaggcttgaaggcttttcggggagttgataacaagatccgattgttccggccggacctcaacatgaaaagaatgtgccgatctgccgtgaggaccactctgccggagtttgacaaggaggagcttctgcaatgcgttcttcagctcatacagctcgaccgagagtgggtcccctactcaacctctgccagtctgtacatccgccccacattcatcgggattgagccatcgcttggagtcaagaagccttctaaagctctgctctttgtgattttgagccccgtgggatcttatttttctaatgggaccttttctccggtgtccctgtgggccaacccaaagttcgtcagatcctggaaaggtgggactggagacttcaagatgggctgcaactatggatcttcccttctggcgcagtgtgaggcggcagagaacggctgtcaccaggtcctgtggctgtacggcaaggaaaaccggataactgaagtgggcacgatgaatctcttcctctactggataaacaaagatggagaagaagaactggcgacgcctccgctagatggcgtcattctcccaggagtcactcggcagagcatcctggagctgggagaagagtggggcgagtttaaggtgtgcgagagacacatcaccatggatgacctgtccaccgccctggaggagaacagagtgaaggagatgttcggctcggggacagcctgcgttgtctgcccagttgccagtattctgtacaagggccagatgctgcacattccaaccatggagaatggccacaagctttcaagtcgcatcatggcaaagttgactgatatccagtatggacggatcaagagcgaatggacactggagttgccctaatgggagagctcagggtatcggtgacggggtgccacagaagaccgactcctgtcctcgagctgggacaacctgtgactattttaactccttgtagttccattgttcattgttaccaaacgagtttgtgtccccccccccccgtgagccaagaaaattgccagtgttaagtgtcacctgtgaacatgatagtagctgctttactgtacctttccttggaaagctatcaatgaataattgcctcccctcactccataccagatccttagtaggagaatgggttccccaccaatgagatgactgtgtgctggaagggctactgaggaaatgccataggcggcctccctgtgactcatgggcaccctcagagcgggagccctttgttacttttgctggctggtaaggttctgttgtttacgtwtttgtttgtttgtttctaattggggagatttgggctccctgtgaagccytgctggcctggtattccgtgatgtctgcmcaggctggtctcagactcggagcgggtcttcctgtctcacacagcmttctggatgctggggcgatggacaggtstgataccttgatttgtttctgtctttwaaacaaaagtttggtcggytggatttcgtttctccgcgcttctgtaagtccctgagtccgcgctaaggtgaccgtgccccywckdggwawbwyggsckrsactaatktcmcykmwggkswstgtgaggctcactgccctttttctgtaactatacctggctgctcactgcgctgctatgagactaggggtcctgtgccttytagatctttgtatcctcaaagcccagcacatagtaagtattcagtacttgtttmccatgagaatgaacatagaagtgtactttctgtctctccatgctgaaaccctttcggaaaccacgchtgattcgggcagcatgtagcagtatttatcttaggctgtctttmttgtccytggactcctccagacagcatggaggaaytctgttttaagattatcttggagtttaagtgattgccctggaaaaatgaaatgtaccamccatgtggaaatgacagctactgtacattatgtatgaaatgccaaataaagggacaagttgggrghtaaaaaaaaaaaaaaaaaaaaaaaaaaaaaaaaaaaaaaaaaaaaaataaagaaaaaaaaaaaaaaaaaaaaaaaaaaa

SEQ ID NO: 1529 - DNA, 777 bp, Rattus norvegicus
tkktttttttttttttttgacagcacatcttatgtttattcccttgccgggtttctggaagtcactatgccccatctacaaacttagataaagagtgaccgcaaggttctgggctgaaggagtcaggggttacaagggcaagtctcacgaatgctgatgtgctaagggtaagggggggggtgctcccaggattccacaggaaggtgggggactgttgggatcagcaggtgatggtgactacagggccagtggtctataaagggttcccagtgtgacataagcaggaggcatggggaarggggggtgcadtgactggtgccccacggcagctggctggctcactgggttgacctcttcyaaccctaaactamccctgatggggggtggggggragtgaaaggtagacagaagagccctatagatgcaccagagttcctgggacagctgagacatggctgtgtcctggaactatgggcctcggggaggccgctgattcccaaacatctgtcctaggggcactgcaccccagctccttgcaccccaactgctccttacggtcgtttactgtagctgtcaactcaagacccacaaggacagttgctgytctacgkgtttaagtaatgcttcatttgcagggagacgtttcattgaagaagtcgacacgaagaagaaagagtccatgtggacaggtcttcataatactggtccccttgagcccgagcccagggttctcactcctcgttccgaagatttctcatatccgtcagcactgagccc

SEQ ID NO: 1530 - DNA, 792 bp, Rattus norvegicus
cttgcggccgcgaaaggtctcttggttggaccttcttttaaataaatctaytwktwwtttttttwwttwachaaaagagctgrcgactttattttcacatttcacaawgtargtgaaaaccgcacttttttktascacttctccctccasaagcgttmtcyctgttaggaagggaagttcctsatcrkscrcmwakkwwwywctywkkktywgcaccaaratytcctggcgaaacaacaagaaatayamaaggakraagarcgcttctgctcttakctgtctggccgggtcatgccarkccgtgtgggcaccawcatarggcgggcgggaggtctcatcattggmggcccgggcatcatgggcatatggsctcccawgggtggwctcatccmaggagctggtcycacaggcatcmtcsyaksmgrakkskggcccatcattggcatcatgggagggcctcccatgtggggtgcaggcatcatgccaggccgagkaggacccgggagactggggggrggcgggatcwtggcccctgcaggcgraggagcagagaacggakctggaggsatctttycttgttgaaatgcagccgttgttttgtcaatcaggctctgggcctgttcttccatccatttctggtaatagtcttttacattctctttgtgtttccgaccactrcagtgtgtcttcctyacagacggagaatcgtgggtaagatacgtatcacagtagtcacaataaaacttgggcatgttgctccacaggccgttggctatcccgstcsccctcgtg

SEQ ID NO: 1531 - DNA, 884 bp, Rattus norvegicus
  misc_feature (298)..(298): n is a, c, g, or t
  misc_feature (496)..(496): n is a, c, g, or t
  misc_feature (593)..(593): n is a, c, g, or t
  misc_feature (595)..(595): n is a, c, g, or t
  misc_feature (599)..(599): n is a, c, g, or t
caaaagctggagctccaccgcggtggcggccgcwckagdmctgagctggrtcmcsyrgkcwkgtcmsagamttrsswsrcrscrcrcttwacaccgtcctccggccgksghtsgcaskmkbtccgccwccatgcctatgttcatcgtgaacaccaatkttccccgcgcctccgtgccaraggggtttctbtcsgagctcacccagcaghtggcgcakgcyaccggcaagccsgcacagtacatcgcagtgcacgtggtcccggacsagskcaygasktttaghggcacgarcgahccntgcgsccthtgcagcbtgcwcagcatcggmragatcggtggygsccagaaccgcaabtacagyaagbtgytgtkyggmbtgctgymcrwtcgsbtgcamatcarcccggwccgggtytacatcawbtmttwsgrcwtgaacgswgccaacgtgggytgrwrygskkccrcywtsgyttgagbcckggcmycrmttacntgcaccghtstthttbgagyctygbtvcacgmmsygttbtgtgtwtawccaccsgtwaygatgkycmcmttccdgycgggagaaataaatgstttrnknhsmnmamamamararhaaaaavwvarcrrctcgargkgggrcccggtacccattcgccctatagtgagtcgattaccattcactggccgcggtttacaccgtcctcctgggcaaacctggcgttaccacattatctcctttgggaaatcccttttgccagtgggatatacgagagccggccagtgcctccacagtgcacctatgtgagtgcatgtagctacattgggaaccggtaattggaccctatatacctgtgcatggacctttttatatcacacggtgtgtctgg

SEQ ID NO: 1532 - DNA, 768 bp, Rattus norvegicus
cttgctgacgtcagagagagagttaaaaaggggagaccgtggagagctcgatagcggctgaaggagasgctactggagtcgtctctgctgyctgcggacctgcgtctagactgrccsassgcgctcaagckcggctgtctgaggcagrggagatgctgtcctgccgtctccagtgcgcgctgkccgcgctmtgcatcgtcctggctttgggcggygtcaccggggygccctyggaccccrgastccgtcagkttctgcaraagwstmtggsggctgccacmgggaaacrggaactggscargwacttcttggcagaastgctgtyygagcccaaccagacmgagaacgatgccctggagcctgaggatttgccccaggcagctgagcasgacgagwtgaggctggagctgcagaggtctgccaactcgaacccagccatggcaccccsggaacgcaaagctggctgcaagaacttcttytggaagacattcacatmctgttagctttaataytgbtgkbtcagccagacctctgatccctctcctmcaaatmccatatctcttycttaactcccagmccccccccmaatgctcaactagaccctgcgktagaaatygaagactgkwaatacaaaataraattatkgtgrrmwtwhrramraaammmmmmraaaatcaggaaggacccgtatcaaccccccctattttacaagaaaggattggcattaaaaaggggaaaccctgggggggggccgcgcccccatacccc

SEQ ID NO: 1533 - DNA, 730 bp, Rattus norvegicus
tttttttttttttttttaaagcatakwkyytytywywtykyywwwkgctgattgagaatgatttattaaggttcaattagtatgcttttcaatttaaagtccttacatcccccataaaaagggcatcaataaaagtccaagttcatttcactcattyccaatataaatttctttgcattttggtaaatatggagcaaaatctttttcctgstaactggctctccacctacttatttttcccaccrggcacacgtcacatgcctaccctctacccagacacaagccacaccctgcctttcctcctccccagaatgccactctctgcaggacttccttctcacagacatcctcctgacctccccacacctgcttcaggactattcttcttcctccttgctcctcatagcacgacaatagacacatgagtcgcmcggacactgtactgggcatctctgaacatagggcaccaattggttgatwgctggagatcacacaggagccagctgctaacatgccccaccaaggctacttggaacagcaacgctggattcacttcgatgtttgatgtctttgtttacttctacccaacattcaagaaagmsatcrysatttcctcaaaaaacgctaaaataaatttgctagttacgttagggcatcttgggtattgggaaacatcttgtcaagaactcattctcaactaaagttagcactgcatttcttttgtaaaaag

SEQ ID NO: 1534 - DNA, 940 bp, Rattus norvegicus
  misc_feature (28)..(28): n is a, c, g, or t
ttttttttttttttttttwwwkytkcanaaaacaagtttaatttccaaccagggtcacagccattgcattatccacatttctgagcaaggatagagaaggcaagttattaamcrcgtacagtctacattccagagacagcaaaaaraaaaaammmacytcrkrmctgcagataccamygkaacaccataaattctggaggtggagggaagggagagtccccacaawagaaaggtagaacaagatcaaaaattaaacttgagaaaagcaagagaggggttcacasaaatgggatgaaatgcccaassctkwrasmctgrttaggraatgtavawwgytmyscarcybyammamaaarmmarawrwtaccaagatgtcactgscctctgctggacatawytggagcagcaggcaccaaggsaacactcrwgsskamttcwkcmtgstcagccttaggktggtcccaggaggtggrgraaaagaagatgctgtggtaaggggtgcagtrgtggawtgaagtctgcaatgtacacaacttatctggaactagcatctaagtaggaaaggtcagaaagcgtggcagagtaaaaggcaaagtcctcaccaacctcaaagcaaagagagagtagaaaatcagatagaagacaaaaactaaatcaaaaacaaacaggcaaagtggwgagwsaascgamarggsaaacaggmrctyamagcmgcwmgwgcgcagtgttgggaatggaaggaacccattgaaaatgaaacagaacccctggcaccccctgtagagatcacacactcacacatggcacgcacacactcacgcacggacacacacatggacaccaggtctagagcacaccccgccatggtgtggtatctggggtagcacagcactacctgactgagacatatcctggaaccttgcacaagcacacattctca

SEQ ID NO: 1535 - DNA, 671 bp, Rattus norvegicus
tttttttttttttttttwkktttctttcagttgagacaagctttaatacagggcaaccacattcagcagacacctacatctttcacgtgaatgaggatttttttttccttttttctttggaaacaacaatttgaaacaacttggagggagtggtagtaaagaataagaaaagaattaattactgacacaytywwywyttggatagatctcaggatattatttggagtaagaaagtacatttcaaaaggtagaatgctaaataaaaattggtaaaaagaccatgggctgtcagggtagggatggagggagggcgtgtcytaggtaagtggaagccatgtaatataatttcacgtatctatacacaaaacatgcgattcaatgagtgcacataacacctcatggatggacgtagcacttcatgtgaggtccctgggttcaactccagcacagccttatcccaccaaataacaacccacggcgagggaaagtttattcagtatggtgtctagtgtaatttctcagtctggaaacaaactatgattatgtaaaaaaattgttttggggcaacacagggtaaagtgcatatctgagctagatgaggagggcagaattctaagtctgaagccagcctaggctgcgagattgacctgagaccttcttaaaacctcgtg

SEQ ID NO: 1536 - DNA, 623 bp, Rattus norvegicus
tttttttttttttttttytttttccygttgctatggcaaccggggagtcaagcttcagatgtgtcgwtctcacagacctgacaataagctgaggagagagaagagcagcagcaagctgaggctgaggtgcagggtccccgccgcattgcagtccactttggagttcttgcaagagcacacctgcaccctgaggtccgygatgttcgtcatgggtggcttccctgaatccgtcaccatgatgggcaggttgtagttcgccttgttcagattctgaagaaggctcacgagggcgtgggtgttgttgattttggagatcttccagactttatcagggacggtctgtttatgaatctcgaacttgaaggggtctgtgttggggtgaaggtccttgtctgaagcccccaggatgaccacgctgaggtttctggcgtcgtcgcakacttcarccaccgttgggtaaatkacargagcgttgwcwttaacgycctccagggtgatcatmagagtcccggtgccagtcgcaggagggttgccgctgtcgatggccacgaagagggcagtgtacacactgttgtggacgaatggagactcccggtccaacacagctgtggtgtcgacagtgc

SEQ ID NO: 1537 - DNA, 500 bp, Rattus norvegicus
ttttttttttcttttttgcaaatatttatttttttctcagccgggttagcgggcatttaggccaccctaatatctgggtttatttcaagttactgaaactgaggactaactgcagaaagtgtcaagagagaaaaacgtacatgtacagtttccaaaaccaaagccattaaggccgtttgagaaagccgtagagctgaggcacgaaataatccttgtaatgtccgtcgatgaaacccttcccactgttgtgtacgaaccagcagggaacgtctgttccaaacaytatattggtcctgtagtctttctgcatgcctctggtgacagtcaacttatgtcctttcacttccatgctcgcttctggttttcccggctcttttccyggcckcycmktgmmgawwtggatgtctggttcatgcatgaactaacagtccatgcacactaggtgagaacttgtctgtcgggggagcgtagatccccaggaagtccacattaaccggatg

SEQ ID NO: 1538 - DNA, 525 bp, Rattus norvegicus
  misc_feature (9)..(9): n is a, c, g, or t
tcttcatgnaccaggtgggagtagtccagtttggcccctataagcaactgtttctacagacatacgcgcgaggccgcaccacctaccaagcactgccctgcttgccctccatgtatagctaccctaatcgcaattggaaggacgcagggctgmaagaatggtgtgccrgctgtgggcctcaagcttaacgacctgatccagcggctgcagctctgttaccagctcagcacagtcggcaagtttgaagacgctgtggagaaattccgctccatcctactcagtgtgccccttcttgtggtggacaataaacaggagattgcagaggcccagcagctcatcaccatctgccgtgagtacattgwgggtttgtgcatggagatagaaaggaagaagctacctaaggagaccctagaccagcagaagcgcatctktgagatggcggcttatttcacacactcaaacctgcagcctgtgcacatgatcctggtgctgaggacagccctcaacctcttcttcaagctcaag

SEQ ID NO: 1539 - DNA, 564 bp, Rattus norvegicus
  misc_feature (516)..(516): n is a, c, g, or t
  misc_feature (552)..(552): n is a, c, g, or t
ctataaggtgattggcaagggcagcgaaaagagcgatgacagctcctatgacgagaagtacttgattgccacctcagaacagcccatcgcagctctgcaccgggacgagtggctgcggccagaggatctgcccatcaagtacgccggcttctccacctgctttcggcaggaagtgggttcgcatggccgtgatacccgtggtatctttcgagtccatcagtttgagaagattgaacagttcgtgtactcatcacctcatgacaacaagtcatgggagatgtttgatgagatgatcaccaccgcagaagaattctatcagtctttgggaatcccttaccacattgtgaatattgtctcaggctctttgaatcatgctgccagcaagaagcttgacctggaggcctggttcccgggctycggtgccttccgtgagttggwttcctgttctaactgcacggattaccaggctcgtcggctccgaatccgatacgggcagaccaagaagatgatggacangaggaagaaataacctccgttctctacacagaacangttggaggcagt

SEQ ID NO: 1540 - DNA, 1478 bp, Rattus norvegicus
gggtttgagaggagggcggagtgtcgttccctttcgctgatgcwmgdymcgwagcgcggtgctgtsagaggtatcggtaggmrckasgctgactccggggtgtgaagccgaccggtctgacttttcatcactgccgaacccactcgaaccacagccatgtccggggacgagatgatttttgatcctactatgagcaaaaagaaaaagaagaagaagaagccttttatgttagatgaagaaggtgatgcccagacagaagaaacccagccctcagagacaaaagaagtggagccagaaccagctgaagagaaagatgtggaagccgatgaagaggacagtaggaaaaaagatgcttctgatgacttakwtkwyttkwwyttctttaawmaaaaraaaaaraarmamragrcaaaaaagatatttgatattgatgaagctgaagaagctwtaaaggatgttaagattgaaagtgatgctcaagagccggccgagccggaggacgaccttgacattatgcttggcaataagaaraaraaaaaraaraawstgamatkcssagmksaagackwawtactagaaaaagatgaagctttakaagatgaagacagcaaaaaagatgatggcatttcattcagtaaccaaactgggcctgcttgggcaggctcakaaagagactacacatatgaggagttgctgaaccgagtgttcaacatcatgagagaaaagaatccagatatggttgctggcgagaagaggaaatttgttatgaaacctccacaggtcgtccgagtaggaactaagaaaacttcttttgtcaattttacagatatctgtaaactattacatcgtcaacccaaacatctccttgcatttttattggcagaattgggtacaagtggttctatagatggtaataaccaacttgtaatcaaaggragrttccaacagaaacagwtagaaaacgtcttgagaagrtatatcaaggaatacgtcacttgtcacacatgccggtcaccggacacaatyctacagaakgacacccgaytctatttcttacagtgtgaaacttgtcattctcgatgctctgtggccagtatcaaaactggcttccaggctgtcacaggcaagcgagcacagctccgtgccaaagctaactaatttgctaatcaccattgattttttcaaaatgtggtggagatatggctggacaggttaccatcagagtggatgtacattgagttaaaaccagatagaaacggccaagtctctggcgagtgattgtctgaaatcttgcagatacggtattcagtgtgatatatcgtgctacttacaattgcgggaaatgatggataggggggcttaaagtataaatctgttaggagtattagttttcagaaacaaaaatcggggggcgaagcatagtgtaataaagggtgaagatgaaagggaaatgataactggaggggcccgggagatta

SEQ ID NO: 1541 - DNA, 869 bp, Rattus norvegicus
gaagacgctcgcttacgtgaatgtgaaatcctttaagtgtgtaaatagtagtgttggtctcatgcakwksgagaaaaaggacagctgcaatgttttttcctttccttttttttttttycttcwtcktttttttacgcagtggattaaagtayctttcactggcaacaagtctcagaccccttcaaccaacgttagagaccatcagacgaaccgtccatgttctccaaatgtgttttatcattggtggwtgcagttttcgatggaagctgattgccttgwcatagccataartcagaattatgaactttgttacagattgggcgtactaaatgctcttttgactgtttccttaggaatatattgaaatgccaacggagttcggattatgytctkkaagaawgtgtaraccattgttttaggatgtgtacagttgtagaaggtgccmgctttamragttcatgktttggwtcytaaggkttttcyttkttcwttwttgktwataaatgcwtcaaagtaatttcattacatggcttgccstactaamawmwrwwawwamwrytgtgarmaaattttttactttttctaaaacckstgctgaaacaatgttttatkcccccgtcaratttgattckratggakacaagcttatccgttwagawttytttttaatttatttttammaygtawtggcttaaattaatttttccctgagcggtttgttctgtttcgaaggcaatcccgtcagttcgactatgctgttagtaggggggggccaactggtgatcctgggctgtgttaaccaaagcaaatgtgagatcagctggcatcctgttaatagctatttcaacaaaccatattttgggcctttg

SEQ ID NO: 1542 - DNA, 1504 bp, Rattus norvegicus
tgcgccacgtctctacgcggtttctgggcgccagggtctgcaccgaaacatggcagaggttgggtccaagtcagtgctgttcgtgtgtctcggtracatttgscggtcaccsaktgcaraagcagtgttcagaaaattggtaactgatgaaaacgtttcagataactggaggatagacagtgcggctacatycacctatgaagtggggaacccccctgactatcgagggcasaactgcmtraraaawcatggcatbcacatgcmacayawkgcamgrcagattacaagagaagactttgccacattcgattatatactgwgtatggatgaaagcaatctgagagatctgaatagaaaaagtwatcaagttwaaaactgcaaagctaaaatcgagctacttgggagctatgatccacagaagcagctcattattkragawccctattatggcaatgactctgacttysaggtggwgtmccagcaatgccttargtgctgcarggmyttcytggagargactyamtarctggkcctaamcmccamcactgagmaaccmactcytmaktgctgtgcccargggtggwggcagtccttasccccataccccacctctcttttcagctgacttactkkatatstttaaaawaattktaggtggaaawyaggcmtttgttcagaaggataaaaacatttgaggcagacatttgaggtgtggctcagtattcttagactaacaaaagctytggcctygscataatacmaawagtggaacgagcmactgwggaacmaaagraaacccaataaagtaagaatgasscacaaggtccagatcagcctttgagcccagcgagcctgggtagtctggymyraskggagtgtgagcatggccagcacccagtgtgctgtttgcttgccttacactctctattctatattgtctcttattgtgacaatatctccatccatggcagccttccatttaacactgggagagtttaaacccagacacaccragggttcagataydygagrgaggagaacctggatgtgatgatgggcctggaactccagcaggccatcytgggctgtacagtgactccctgtmtgaaakataaaaatgctaacagatgggagcaacaggttggtgaagttaacacctttaatctcacttggtttttgtktagtttcttkagcttggttcctatttgagccactttgcttctttaaagagaaagtaagtgtgcttaaatagtggtgtgcktttgtaagtgttctctcatcaacattttacaaagttacaggcaagcatgagtaattttagtgtattttcagaaaagggmcctcaaatttatgtggatatatgtcagaaaagattgtgaattammctgggatgttatcaaatacaactaaaawtwtawaamamaawaaaaaawaaaaaacattgcggccgcaagcttattccctttagtgagggttaattttagcttggcactggccgtcgttt

SEQ ID NO: 1543 - DNA, 715 bp, Rattus norvegicus
tttttttttttttttttwyttgaaatccaagaatggttttaatgtgttggccaagaaaaataaactgcaaagtcctgtgaggtcttctaaaaacttccaagaacaactgatgggcggttctaatcagacttggatgttatttcccccctttaaaaatgacaacatatacagtcccacaaaacacaatatcaacttttttatcttgactgccagaracgctgcttttcgaagccttctggttccaaatgtwgggcaaacacacagttggccttcatttyttmagkgrmtgmtasacarasgcattaggatcaagtccagaggggctggtctccacaaacttgraagagtagtggggggacacagggctcaggggactggtggcggcactgtatgttatgctgggcatgacggccatgacttcagctatcttctgttttaggtccttgatttcctggtctttctgaaggatttgcccctgggcaatctcgagctgccgctttgcatcaccgagtgcagagaacaggtccagcttgatcctcgtctctgcactgaggctgttctctaggtgttgcgttttgtcttgcatggcagagagggctgacatcaacacctcagtgtccttctcgttttctttgtacttccgaagctcctgcaccttcagctccagttccctgatctgctcctccttcaccttcaggtccattgtgagcttctt

SEQ ID NO: 1544 - DNA, 1398 bp, Rattus norvegicus
  misc_feature (1105)..(1105): n is a, c, g, or t
  misc_feature (1245)..(1245): n is a, c, g, or t
aacctggtggcccttctcgacagcggagcgcgcggggacgctgcagcggcgggcaacgcgggcaggcagcgcgctccaggcagggccgcctggtcacctcccggcgccggggcggcgcggcgatggccagggcgcagagggaggcagagaccggcgggcggcggcgggcggagggggcgcggggacgcggccgggcgcccctgcccgccctggtgcccgccgcctaaggctgcccggggcgcgggagccggcgccggcgcggcgcgggcgcaggagaccactcgaggcgcgatgtcggtgccgctgctgaagatcggggtcgtgctaagcaccatggccatgatcaccaactggatgtcccagacgctgcccwcgmkggyggrcmtcaayacsrcccggctctcrgcckccrgcskcskgrygmtggaccgmakcaccsrmgtgttgcccaccaaccccgaggagagctggcaggtgtacagctctgcccaggacagtgagggcaggtgtatctgcacggtggtcgccccccagcagaccatgtgttcacgggatgcccgcacaaaacagctgaggcagctactggagaaggtgcaaaacatgtctcaatccatagaagtcttggacaggcggactcagagagacctgcagtacgtggagaagatggagaayymgryrmraggcctggagtccaagttcaggcaggtggaggagagccataagcagmatctgrccaggcagttcaaggrctaacttaaagagttttttcaatgcgccagtgactgaagaakcagtccccccatgtaaccatgagagagccagagagctttttgcaccatgcatttttatgattcttttccaatccttagcgccatttcactaaggaaccttgaatccagccaggatcctccttttgcatgcgactctagatgcatcccatgaatagtttgaacccttccttgtcaatgcactttttgaaararaaaraaaaaaaaaacccacaaactttgtgtatgtgacmtaaagcatgtaactttaagatgctgcattytcaactraytamtaaaggcctttcccaadwaaaaaaaaamaamaaamaaccaanaacaaaatcacaaacacccccacgccccacacccaccccaatcccactaataataaacaaaatacactcggggtggccccggaacccaaatagccttatagtgggcggtttacaattacttgccggcgttttacaacgcngaactggaaaaccctggggtcaccaacttaatcgctttggagaacattcccttttgccaggtgtgcgaattgcaagaaggccggcaccatggcctttccaacagttgcgacacttgattggaattggaaaatggaagcgtaaatttcgttaaa

SEQ ID NO: 1545 - DNA, 795 bp, Rattus norvegicus
cttctcccaagaaatggtctacttctcagacctcaagtatgagtgcagagatgcctagagagcagggttccagctccagcagtgtgctgccaacaccccttcctggacgcatcggtccatcttggccctcgcagctcttctgccatgcagcatttcctgtttcttggccttacctgagtggatcttcacctccttcatcagcactgaggtccagtgccttccgaggctaagcacctagggagccccaagaggagcatcaagcctgctgctggggaacagttggaggagactgaggctccctgcggagcggacacggagctgtcgctgcattgccctytcttgtttgtttaaaaagaatgacgtttacatggaaaatgtaattacttgcagtatttatgtgtatatggagtkgaakkkwatatwgtgtayaagtcayycycataaattaagcawgaaaawtaawmrmwmammwamwwmcagtgcttaawgktgtcaactgktcttggattcgtgctgttctacaataacacacaaatcctgtgaggctgattaggaagaaagaccaggtgaacccsgctgcagtaaggaagaagccagaaggcagtcacctgagactgkggccccttgtccagtgatttkraacattaacgaattagaacatggraagggattgcaaagwtagaagcaaagmagktyttctttkgccgcagdwwaagatgacttgrcagagacagagaagcwakgkcyttccctgtccctamwactargaaacaramtggcagawaggkkggtgga

SEQ ID NO: 1546 - DNA, 515 bp, Rattus norvegicus
ggtggtgtctttacagacccgaagcgaatctttaaatccccaggcttcccaaatgagtatgacgacaaccaggtttgctactggcacatccggctcaagtacggtcagcgaattcacctgagctttttggactttgaccttgaacatgatccaggctgtttggctgactatgtagaaatatatgacagttatgacgatgtccacggctttgtaggaagatactgcggtgatgaacttccagaagacatcmtcagcacaggaaatgtcatgaccttgaagtttctgagtgatgcgtccgtcacagccggwggcttccagattaaatacgtcacagtggcctgcacctaaatccaatcaaggcaaaamtacaactatgactggwaataaaaagttcttagctggacggtttagccatctataattcttatttttttttttaaaaaaaaagatgttcaaaacatccagtcaatatttatatttgtagcttttggacctcatttgttctcaattttgta

SEQ ID NO: 1547 - DNA, 649 bp, Rattus norvegicus
  misc_feature (348)..(348): n is a, c, g, or t
  misc_feature (374)..(374): n is a, c, g, or t
tggcagtaccgcttcccgcctttctttacgttacagccgaacgtggacacccggcagaagcagctgggcgcctggggctctctgggtctggccttctgccgcctgcacaaacagtccagcatgacggtgatggaagcccaggagagcccgctcttcaacaacgtcaagctacagcgggaaacttctgtggagtcgattcagattgtattagaagaactgaggagaaagggaacctcgagtgggtggataagaaaaagtctagctttctgatcatgtggcggaagccagaaaaatgggggaaactcatttatcaatgggttttcacgaatggccagaataactttgtgntcaccctgtatgaactgaccagtggngagacacacgaggagaagagattcatgggctggatgaggcgacccttgtgcgtgctctggaagccctaaggacgagcacaagggtgagattattactgtcagcgatgggcgaagagttaaaatcttctaacaaagaactgggttcctttaattttaacttccactattcaggggtttaaaaagggacagaactaatggcccacagaatgtgttgtgacttcacacactcaaagggtcaaagctcagaggtcaaattaagggaaggtttcccaaaa

SEQ ID NO: 1548 - DNA, 1232 bp, Rattus norvegicus
ccaaggaaaatggacgagtttcctgcggctttatcccgcctgattatcggctctttagcgaattggaccgggcccctcggagtttgtagttatgtttgttgtgtgttgtgtktktttttktttwttkktgaragkkctggkgtttatgtacaaggaaggaaatggtacatgtacaagacaaagtgccctgcattcccttccagggycaggaagcccarcagggaattgagcagtcagtctgtgaggctcctctgttgcccgttcctgggccaraatccacargctgaggaaggtgagcctgctggcacatccttcctctagcaatcttggagctggtacagacagtgcttytgctcttcagtcaktgggaaracagtggscagggtggggtccaggcccttcctgtcattgtttggagcargaagtgcccatccagagggtggccamcaggggtyakctggtcccactgccacccactctccatgttaaacgttagcccttccctttycacttttgaaagcctcaaatcttctcccacaacactttkkttttwwkkwwktggagcmagatywywwytywykytkttwttttttwhtgawcgagtgattttagtgaatacacggcagggaaagcaatgagaacaaaacacatctgggaattactattaacatargtgataacatcaaaacatctggtcaartgtagttwawwwaaaaaaaacaacacraacgaaatggaatgtaaaacatcttcacagtatcsaaagcttttgtataaaaggtttaggctakaaagtggagtcctcacggggcaaggggggcargggcgcggggactakggccaacagggattccacatatgtgcttasgacccgcagtgccaggtcaragcagtcakcatgccattgtgaagatkaagcytcaggtttgcttctgaagctcatcttgaaacacttccagctatgaaggtasamcmgwgcmkctggttacasgaaggctaasamgaawwwywkkttytwbytttgggaaccgagagttctgtaatttacacattcacaggaagcctggactctgccccagggagaacmcagtgctaacccaccaaccacgarttttgagtattgctacagaatgtttttaaagtagaatatctttacaattcgtgcctccgagcctattttccaagataactactggtagtttccaaaagtttggttgggggggtgggggggg

SEQ ID NO: 1549 - DNA, 4370 bp, Rattus norvegicus
catagagttcactgacatcatcaagcagctgagccagaatacatatactcctcgtgaggctggatctcagaaagacgagaatcttgcctattatattgaaaatctgttccatgactttaaattcagcaaagtctggcgagatgaacattatgtgaagattcaagtgaaaaacagtgtttctcaaaacttggtgaccataaattcaggtagtaacattgacccagtggaggctcctgagggttatgtggcatttagtaaagctggagaagttactggtaaactggtccatgctaattttggcactaaaaaggactttgaagaattaaattattctgtgaatggatctttagtgattgttagagcagggaaaattacttttgcagaaaaggttgcaaatgcccaaagctttaatgcaattggtgtcctcatctacatggacaggaatacgttccccgttgttgaggcagaccttcaattctttggacatgctcatctaggaactggggatccatatacacctggctttccttctttcaaccatactcagtttccgccatctcagtcatctggattgccttctatacctgtgcagacgatctcaagagctcctgcagaaaagctattcaaaaacatggaaggaaactgtcctcctagttggaatatagattcctcatgtaagctggaactttcacagaatcaaaatgtgaagctcactgtgaacaatgtactgaaagaaacaagaatacttaacatctttggcgttattaaaggctatgaggaaccagaccgctacattgtagtaggagcccagagagacgcttggggccctggtgttgcgaagtccagtgtgggaacaggtcttctgttgaaacttgcccaagtattctcagatatgatttcaaaagatggatttagacccagcaggagtattatctttgccagctggactgcaggagactatggagctgttggtccgactgagtggctggaggggtacctttcatctttgcatctaaaggctttcacttacattaatctggataaagtcgtcctgggtactagcaacttcaaggtttctgccagccccctattatatacacttatggggaagataatgcaggacgtaaagcatccgattgatggaaaatatctatatcgaaacagtaattggattagcaaaattgaggaactttccttggacaatgctgcattcccttttcttgcatattcaggaatcccagcagtttctttctgtttttgtgaggatgaggactatccttatttgggcactaaactagatacctatgagatattaattcagaaagttcctcagctcaaccaaatggttcgtacagcagcagaggtggccggtcagttcattattaaacttacccatgacattgagttgaccctggactatgagatgtacaacagcaaactactgtcatttatgaaggatctgaaccagttcaaagcagatataaaagatatgggtctaagtctacaatggctgtattctgctcgtggagactacttccgtgctacttctagactaacaactgattttcataatgctgagaaaacaaacagattcgtcatgagggaaatcaatgatcgtattatgaaagtggagtatcacttcctgtcaccctatgtatctccaagagagtctcctttccgacacatcttctggggctctggctctcacaccctctcagctttagtggagaacctgagacttcgtcagaaaaatatcactgctttcaatgaaacgctcttcagaaaccagttggccctggctacgtggactattcagggagttgcaaatgccctctctggtgacatttggaatattgacaatgagttttaaatgtaatgtgcataattaagtgagagagggtagtctgtttctagacttgagctggttgtgctaaattttcattagagctcgaattaatgttaaaaattctacccaatcatctaatgtgtttaggcagcagcttttagtgcagggttggacccacacttcaagttacagtggacaacactttccatgttcatgataccttcttagattatctttagaattttgagtcttttgtaataccttgctctttgcttcatggtcatgaaaatgtcagaaccagttgtaagaacattgctataagtcctgagggcactactagtatcttgaggtgggaggaagaggrtrtatgtgaggggcagagtgstcgctsrgtgtgattccccatstccatstgaccytcactgggattckccaaktgagctgtatkcctgaaggatttagctggctyccattcccctaaagtrgacagttacttttcagaagaggtgcaacttgttttyttgccagcaaggttgaaytaggtccttctgctggataaaagaaaggamgtktgtctgtttacaggaataaggcstkattggyttaacctttgtgttattkaggatgagrccagaagccaaagacttcaagktttstctccactgtcatctacccastagtctttagttcywtgggwtswwttgttyttgtyktgktkttcywttccaacackttstgaaaaaraamarrwwwagactcagtctgtcagcagaacacactgccgagctcggtacccggggatcctctagagtcgacctgcaggcatgcaagctttccctatagtgagtcgtattagagcttggtgcatgcctgcaggtcgactctagaggatccccgggtaccgagctctggccaaagtgctggtcttcagggaagctctgtcgtttttggcactgagatatttattgtttatttatcagtgacagagttcactataaatagtgtttttttaatagaagataattatcggaagcagtgccttccataattatgacagttatactgtcgttttcttttaataaaagcagcatctgctaatgagacccacagatactggaagttttgcacttacggtcagcacttgcgggctttagaaaggagaaagccacaagccaaacaatatccgatgagctagaagaggattgggttaaataagagattcctagttgagttggaaaaaaatgataattctaagtccagtgagttgtggccaagttaaatgtcatttaaaggctatgatagtacatcaacaaaattctatagctcagtttattcaagatgtaactcaaatccaattttgcaaaatttccagtacctttgtcacaaacttaactcacattatcgggagcagtgtcttccataatgtataaagaacaaggtagtttttgcctaccacagtgtctatatcggagacagtgacctccatatgttacactaagggtgtacgtaattatcgggaacagtgtttcccataattttcttcatgcgatgacatcttcaaagcttgaagatcgttagtatctaacatgaattcccaacttcctgtagcgccttagttttagttgcaaaaacatttgtggtcgttgagcatttggtgagtaaatgcaaccgctatacaataaaatcattacttccaatatcctgttttaaaacatgggtgttctgttatctggtttatggaatggaagcatacgttaagaatatttgctggtgacaaagggatttaactgtctccctttatttgcatgttatttcttaaatgtagttcttagtctgaattcatttttggtttttggaagggtagagagtagagaataacgggtgttgggaaacaaagcttgcaaaaggatctttatgtacctgcccatcactatggtggctataaattatgtaaataatgagcaagatcaaattaacaaagactagttacccagcatycsgcatctagtcagttttgtcakggggcagytcaaagctgccacctgagaacatcaytaggctctcakggktcttggcaccactcamccaagttwcatccaccagattattttcagtcttsacaagtatcaccatgcmtwgtgggattttyagccmtgaatwaagggcgtgcgttttsscatatcarkctctaaaataacctttgctaatcaatgcrgwgagttgctaasgtttagtcwtgggkaaaatgtgtgtctgaayaamagcktctgktrcwcawaargttattatcrggtaaaatgtatatcttgaacataagaatagagcgcgcctttatcatgattcactgytagaattcgcatgacctttactgtgttagcttttgaatwtctttgggacttgctaacctatactcagccatcttygctgacatgcccttatmsatgtatacagctggtgtttaacaatgtgaagattccttacctgacttaataaaatacttcgatatamaaaaaaaaaaaaaaaa

SEQ ID NO: 1550 - DNA, 1218 bp, Rattus norvegicus
agcgcttaaactgtacttcagggatctgccaattcctctcatcacctacgatgcctaccccaagttcatagagtctgccaaaattgtggaccytgatgagcaactggagacccttcatgaagcactgaggtctctgccgcccgcccactgcgagacgctccggtacctcatggcacacctcaagagagtgacccttcacgagaaggagaatctgatgagtgcagagaaccttgggatcgtgtttggtccaaccctcatgagatcaccagagctagaccccatggccgccctgaacgacatacgctatcagagactggtggtggagctgcttatcaaaaatgaagacattttattttagagttttgacttgaggagaaaagaaatggtttacagatgaaggaatgttywckagkaatttaattagcttcattagctgaattgtttcttggttagaggtttggccaaatacccagattaaaatgaaggaacttcctgtcawwwmwmwarmammrmwmagccgtccttgtraaaccgtgaacacacgctytctggtcctggtaatcctgggtgtttatcatgttaagagaaactcaagctactgcatgattacccctttttggtgaggaaaccccatattgaagaatcacagacttgttcctgcaccatctctctgtcctgggttgtctgtggttgtcacccasmatgcttyccagagtaaactgtcatgacattgsttttggggkccataccattggktgtytgacgcttgcacatgcgcacacgtgcacacgtwctcacacmcacamacwyrcrcayvcacaywmmcacwcawaswcacycmcacacwcmmsmcamdcmcmcmcmcdccacaaacacmctcayrycacaaayacgcacacacmcmccmyawacacactcacacacacacagacacacacgtataagcagcaccctggctgttgcactctcatccctgtaccatacgccagctccacagcagttccttcccagcttcctcctctcagacatagtgctttgtcttcagcagaagcgagacgtgttttcagatgttacttcagtaagcttccaataaaaatgcaccacmcrgcawwwmmwrwwaaawwawtggttttcaactgtaaatttatatttttacctggcatgcagttattaatttattaaatttggcctttrgaawtcraaaaaaaaaaaaaaaaa

SEQ ID NO: 1551 - DNA, 1131 bp, Rattus norvegicus
  misc_feature (310)..(310): n is a, c, g, or t
  misc_feature (312)..(312): n is a, c, g, or t
  misc_feature (314)..(314): n is a, c, g, or t
  misc_feature (319)..(320): n is a, c, g, or t
cacacccgccggatctaaaacagagataggtagatattgtatgtctctgcacgggttacgtgtgcagagcgcttttagtaagatagcgatgttgcgggtcgagtagaggcaaactataggtcaaatatcgatacttagtattgtaatttgtgcaggcgggtcacaaagataggtgtgggcgacgggtagtcgtgctgtgggctgtgttgcggacgggagggcgagctaagccggagctgcaggcgggcgataaatataaattttagataacgatggttagaaggaaaagagcgaaacatatacacaatcncncnctctnnctctctytytytytytytytytykhybkktwcaragwtggaaagtgtttttattgcgsacatttgcacagacagtgttagtgacgttggcctcccttcctggggtgagccaggtcmtatgtcmtcawacattcacgcaagcctyaacactyccgagttactctcttttttagtacctggggattcgctttggctagatttyytawtttaasccacgcttcttctcgctctttcattkttagcttctctttgagtttckctgctttgaactgctgcgtgsagtcatcgaasagtttttggttcatctccatgaaragyttcagggcgttgtatatcaasccgtgtatggkcttgttycagtgggtctttgagttgcggtataargatggaaacatgatgggcagaatcwtcsctgcmktgtcactgattaamctcatgatgtactcaktgttccagtaatacagmgsccgctctgccacctggaagtgagggstggaaacacatttggctaactgtcggaaaagaggctccatgatcytcrcmaattctkrkggytcaattacatctaagatttcttctaattcatttaagaacattacttcttttggactgtgagtctttggccagtatttgagaagtgccattaccactggttcagtgagggtgctgtccttctctaaaaactgcacgacacagtacgccagctggggatggtagacactcagggatttcactttgtgcaagggcagcaacacctttaacaggaaaatcttgtgctcttcctttagtggtaaggcaaatccatcctcgtg

SEQ ID NO: 1552 - DNA, 890 bp, Rattus norvegicus
ttttttttttttttttttkkwwtwttaattctcttctttattaatactyacatataacctcggctgacacaaaagtctacttcttaagactgcctcsttggtttaccagcccagtgggggctttctgctctgggaacabttycytbttytccamccmccccaccccacatcmaaatttactcttacacattcacagataccacgaaaattktktwwwywwkwtttgggttactggaactcgttttatcamcattccacttcagtacggaarggaggggggatakagkatgagragagagggagaagasacasggacacasggcaattcgtcagaactttcaagtcttgccttttctgaggtgtgtgcacgcacgcgcgtgagttgaggccgttccttgaawttcactgactcaaaacgytgacagcaagtgcctgtgtggytatttatatymtrtryctmtaatagaatatgtgggcttcctcagcttgggtmtgggctgtgttygtttaaacacagcaccatcctctttgtgggtgtctcgggagastgtcagatmtcytgggaacccttstcaaagccggggtttcstgagcaagctcytgctgaggtctttgacctcctcaggactgttaacccgmtsgtagcccaacactrccatgggctggtagcaaaactcctcswsctgtttgatctgctggaaggtgagtgcggtccgccaggcattggcggcctgagtggcattgcgagctgacaccacaaaaggcttggaggaggagcccgaaccactagtcatgttcagggcaaactgctccatttcgggactcaccagcagccccacaaagtcatacaccctccgtagggtcttaacggggtctcccaccagatcctc

SEQ ID NO: 1553 - DNA, 818 bp, Rattus norvegicus
cacctgcagcaccacgctccgaggacagctcctgcttgcagcttccagactcaggaagcctgaagggaaagaaggaagtacaggcgaaagcatcagattggctttccagatttggggatctgaagcgggsmcacatmtkcmwgmcamcwymsakkgaacttyssrgmrmkctaardsgmcmkwdrkgsvgrkhmhrkaaccccagctgaaagggattgtgacaaggttattcagccagcagggatatttcctgcagatgcatccagatggtaccattgatgggaccaaggacgaraacagcgactacaccctcttcaatctaattcctgtgggactgcgtgtggtggccatccaaggtgtgaaagccagcctttatgtggscatgaatggmgaaggctatctctacagctcagatgtttttaccccagaatgcaratttaaggagtctgtgtttgmaaactactatgtgatctatwyctcaaccctgtatcgccagcargaawyargccgcgcatggbttctwkkwctmratawagaaggtcamatcatgaaggggaacakagtgaasaaaaccarrscctcatytcattttgtaccadaacctattgaagtgtgtmtgkwcmgagaaccatctctacatkaaattggagaamagcamggacgctcgrgraaaagtyycsgracacccaccatgaatggaggsmaagksgtkaatcaagawtctacatakccyggykgaratttttgtgtttctttctccctcctttttttccttcttttcccggttttccaggaatcccccagggagagagagaaaa

SEQ ID NO: 1554 - DNA, 756 bp, Rattus norvegicus
cacaggggcagggaccttcaggggcaggaagaagatggtatcmagtctgatctsysargragsmkccrcyttgacacaskgcagssagagtgtctgaagaccctgtccagctctccaatggccagcaacaacaccgmcagcatagcgcaagccaggaaactggtcgagcagctgaagatgsamgssagcatcgacaggataaaggtgtccaaggcagctgcagacttgatggcmtaytgtgaggcacatgccaaggaagatcycctgctgaccccagtcccggcbkcasrarrtccctttcgggagargaagttcttctgcgccatcctttaagtctctgarwggaggytgaakatggtcggggctcccgggacattgatgtagagwtcstarcagagtgggygcstttmtcgtvygcagcattkwaagasasgarkgagaaccatcctggacactccgggctgtgcatgtttaaagaactgtsccctcatgagaatgaaagcttgattccatgtsctaactytagagatctgaccctgcagaccggcctgkaggaggggaktgtataaaaaaaasgagattggtgtcacttcttttctgctacccccccaccmcccaggaccwtacatttctgcttcatatttwtaaacamacaamataaacattaaagytggtgwmmwrarmwrarawawrrmwramatcctgggaatgagaattgtccttcaagtaccctctgataagatgtcgccctgtgta

SEQ ID NO: 1555 - DNA, 921 bp, Rattus norvegicus
  misc_feature (9)..(9): n is a, c, g, or t
  misc_feature (32)..(32): n is a, c, g, or t
  misc_feature (39)..(39): n is a, c, g, or t
tgaggcggnccggcctgaagcagagccggggncgggganagccgcgcaggacccccttggaggcggggcctgtgggaccgcgatgggcgtggagatcgaraccatctccccgggagacggaaggacattccctaagaagggtcagatatgcgtggtgcactacacagggatgctccagaatggcaagaaattcgattcgtccagagacagaaacaaacccttcaagttcagaattggcaagcaggaagtcatcaaaggttttgaagaaggcgctgcccagatgagcttggggcagagggcgaagctgacctgcacccctgatgtggcatatggagctactggccaccccggtgtcatccctcccaatgccaccctcatctttgacgtggagctgctcaacttagagtgaargcaggaargaagtcgaggtggctkgagaaggctcctgctctgtyctagcctgctctytctgccactgggacggctcctccaatgtagggctcttgatcagtgtgctgaccccaccgsccyttgacattatctgttctttctgscmaacttgctctgtatgkgkcggccayttaaccgkccccatacatctttgcttgaggaaacttttagttgcagatccaaacatttcrgacygcattttgtgtgatgcatgkggtascmmttcctgatcwtakgacacaratctcgkttgmmcaawctatattgscttayctgcrcttaagcsagatatacmagrkgctcasacatgcgctgtacatggktaccyggagggacytgagccagttacctttgctgtcactttcttatcttctgttggctgctcactttaagcactgccctctttggaaatactatgtaaaataaaggctytgtgcttggcawmwwmmwrwmmaaaaaaaaaaaaaaaaa

SEQ ID NO: 1556 - DNA, 897 bp, Rattus norvegicus
ttttttttttttttttttbwybcycarwwattwactttatttggtgagcamcaggatataabarcaatggtaagttataaaggacaggrayarrwcastgaaamctggkacagattttgcaaaactaaatgacttcttctcarcctgcargtgtgtgggcccacataaagawsgwrcytatttatgacattaaatgcacaagraaaatatgggatagttaacagttcgyttggctgaggaaaaatgtcatttcttgcatcctgctgcttgctartggrwttggaccaaaggcggtagttaaggaaggaataaatactaaagaatttgctaaacaaatggccagcacagagttttcatttgttccttggaaggcccaagctgaaacgcaaagycatckatgmycacaagcacagtaaayttcwkgagarrwmwrmaggagcaagawaatcaascttgmrmctystsmtktgccracgaagagaaagaacatgacgttttcagggagaaccaacctcaacaagtcgaatcgtggctgtaggggaragtgagggtttgcagctagagactttaaagaacagtgtgtgattaaccaygcacgtgaagggagaaccttagcgaaactgaagaggactgatcctcagaccaatcacatctttgccaatctctgtcactgtagtgaccctgcagatctgccctttgaactcaggggaatagcaggccccactgagtggacacttctccactggttttccacggtagatgggccggtaagatgcagcacaaatgtcaaaggggttgtgcatgtcataattgagctggcaggcatctgtggggtttttctcacaggcagacaagattttccttgtctgttgggctacttcaggtttgggcccaagt

SEQ ID NO: 1557 - DNA, 1231 bp, Rattus norvegicus
ggtaccgggccccccctcgagtttttttttkktytkkytttykttttywkttkyttaaagtttatttttatrtgatcttaaagaaagaaamgksargatwtwgaatataatgtaacraatcaaacaattcaaagtgaaggtgtmcaaatracratacmaagaacatgtacatgacattatgcagtacttttgaggtttcaaacaacaragtttttggttttgagatcctgcaactaccaccatattgttcaagtaatccatattccaraagttagttatttgtaaaataactaatcggcacacaattctaagacaacctgcctttaccccggtcttcaaaatagtcctgttcaattcttstacaraaagcaaggaggttgctatagtttttcaccttytcacaaagttcatcactggtcamctgtgysgtaagaatggtgtacaaatggccaaaaaccagagcatcaagttcagtaggttgcttatcgaaraagtaaggttgtgttcccagtctttgggaaagggcttgacagcaccggtctacgtcttctaaracctggtccarggtcttgttaccccatccaatggctttcatcttacgcttgacttcacactgcttctggtaggtcagaatgaggttcagaggccaaggatamskmgwsccatacctagcaagagtgatctcccctactgtagcttcatcacaccactggagatacaaytctgcagtcagcagcatgttgttgactaattccatgtaagccttcatttctgctttttggacttcatccaacccatcactaagagaatggcccttggctttaacaaattggattattgggccaagttctgacactacttgatttcccacatgaataaaaggtacttttccagatggagacatatattctgcatttgccctgcataccactttgacaggcagattacacatctgcaaaaaggtctgcacagcaagagatgctgcattgtcagaaagcaaaatttgctcccctctcagttgctgatataaggttgcattttcaggccatggttctgtagctgcgatctgggagacgaacgcttccgccaccagagacatgtcggctgcgaggccctgcgcgcgcgcctgagctccgcagccctcggctccctcctgcgcgacctcggcggcccgccgcaggtaacgagcttcgctgggccaacgatcagactcgccgagctcacctcagcc

SEQ ID NO: 1558 - DNA, 1053 bp, Rattus norvegicus
tttttttttttttttttcagatttywwkwtwtttttattttaaactgttttattataaaactaatacaaataacaaatgaaatgtagagaaggaaagcagtccacttgctgcccyrccatcctacagggaccatcgctggtgatctgattgtctactttcacagcctggtgtgtcattcgcatcyatgccacgttaacgctgtggtccttctcttactgtagtgttgtctccatgctgctcacggatacctgcmtatcgactagagctgtgggacagcagagacacagccagcctccgccactytgaacgtctccttggtgtaaacccccatgactgtactgtctctcataagaaagttctaggctaactatatttgcaagcaatatagtgtttccatccgaggttttgttctgaaagaaagtttatgggttgggactagctaagtcagccctgactacctcygagataaaagacgaagcacgctgatgagccttgcatccaatctttcaggaatgaaatcagcaccaagaagggtggccgtcatcttctaagagaaatattctgagggtctggcagcataaatccgtcggtaagtttataatagacgattgtggaatctgactccactatggccaaarwaaaaracmtykgcrgcyccggatcgccttgcaactttctagacgccttcaagatttcccttatcctgttatggctgaggramgcagaaatgggcgtaggcaccaccgtctgcaccccttccccttcgatctcggtgcccaggaggcagatgagctgtagttctggtattcctacacagtttacttcatgccaacttttactctccatgagatccaggtaaaccaagaatgctatataaacttgggtggcgtctcctatatctaattccatcatctctaagtacttagggtgtgtgcccatccaggcgtcctccggagcccacttgtgggcggcgccgccatcgcgaacgggacccgggccaggcccgctacagcccggggtaggctcggaatcgctgcgctcctccatgccgc

SEQ ID NO: 1559 - DNA, 1133 bp, Rattus norvegicus
  misc_feature (258)..(258): n is a, c, g, or t
ttgtttggataattaacacacgggtcgccaatttcttcacccctgtttttcatccccttaaaatattccacttctctgtcttagaatgactaactacccctttatgagaagtttatccaaaaaatcacagtgaaagcacaccatcgactaaatataacacactcatttgtacatgacatagttaactaaaacacagacttgaggacattttggaatatctttggatttaaataaaacctatctccccaacctgaaganacatggattaattttcatacaaaaaaggtgtggttcccacttttaactcttaacaatcacctgatttccactaccaaggcaaaaaatgaaatcacccacaacacacatctgtgacttgaggttaagctagaatgctcataacaggcttggttggcccacttaatacacacagagggaaacagtatcttatgaaaacttggccaacgcctctaataaaagaggaaattatcataatacacatttacagctatcttctggtctactaatttaatccacttctaaccaaaacaaataaatagtaaagtagcttgctgggccacaagcttacaatcgcgtataagaaagaaaattgcttctcgcctagtaaaaacctttaagttgtagctggtggccaggaagctaaccatcacagagcatatgccacttagcaatttgtctcctggggaagtcacagatctccttccagtgccccccaccacttccttctgctgtggcacccaggaccaaccgcccgatcacctcatttcgggatcccctttcagaatccamaactaaaaattcaacacttatttcttcaagactctcacaaggaatatcaaagacaaacagttcgttgaamactgcgttgggagtgcactttttcacgtgagtcttctttttagagattctcttcttggcatggtacaggttcactttgacgtagggatctgaaagtccagacacatcagatttcggtaggtgccgcgcttttaagacaaccacagtgagcgtgtttgtagtggactgataacagagggaswcgtgcmgaattcmyvcmgyccrgrrgatcyasyakttctmgagcggccgccaccgcggtggagctccagcttttg

SEQ ID NO: 1560 - DNA, 946 bp, Rattus norvegicus
aagtgtccgatgtttgcgcgtggtctgtatctgttatttctgatcagtgctgtggtcctcgtgtgtcgtgtcctattcctatcggtgtcgtcgctcgtgtgcgttctctaaaagcggagaggagagaaaagaggcgagtgcaggtatcgtcacgtgtatttgtgtctcatattgcgtatcagtggactgagttagcaatgcagcaatggcgtatgtgagcagcgtcgcttcgcttcacttgaagggagttctacggttatgggatcgcggtgttccgtatgcgtggttttttcgcctgtgttgatgtgattcttatggtgtgttggtttccggtcccccctgtgttgttgtgttgttttgtttgttttgggttgttgttttgcgtgttgtttgtgtttgtattttttatgtatggtctgttgttkytktkttkttttttcagggtcacagcttattgtmkagattgtctkttaaacacagccatrkkacaaacattgtcagggaacatttacaagaataaataagatggacttgcaggtgtmaaaagaktacacgtcackttaatgtacagkcaraaaatakakctgatattcattgacctgacattakktaccttctgctttttgaagstagwactggaaatwmaaagggaaagggaaaaawrawacattgacagcacagtgctggctttctktctgctgaagttgatttattttgttttctcttctcatacgtgctttatctatcaaaaacccaaactgtacaagtgcaggccattggaatttgtggagacttcgggtagtgcggatacttgggtctcatgtgacatcatatgccactgggaaatgaaaatgtcagattccctagtgtagactgggaatgccatgagaggtcctggagagctgtaccagtacagtatccagtagccatgggaactgtaccttaa

SEQ ID NO: 1561 - DNA, 497 bp, Rattus norvegicus
ggtactgtcgagcctctcactggccgctgctgccgcagmgccggkgaagccggagaacaccgtcgtctccgggcagcccccggccgtggggctgccacgcgggatcctgcagctggcggcgcgcgctgygctgyacttyctcaacttccgcgccggstygcccagcgcgctacgggtgctggccgccgtgcaggagaggccgcgcgtgggttgaccctcargagggctgcgaggtggacctggtgtttagcacagagcactacaaccccgagcaggaaggagaggaacgtttgggcaaatgttctgcgagggtgkttttcaagaatgaaaagcccagaccggccgstaacgtaacctgcrcacggctctttgagaaatcgwagagacawgaaaaggattatctgctctacaagcagatgaagcaactgaagacccgtctggacgtcgtcagcatacctgataatcaaggtcacattgacccttcactgagacccctg

SEQ ID NO: 1562 - DNA, 1266 bp, Rattus norvegicus
  misc_feature (269)..(269): n is a, c, g, or t
  misc_feature (307)..(307): n is a, c, g, or t
tccagtggctggaagccgagatcattccagatggctggttctctaaaggcagtaactacagtgagatcctagacaagtactttaagagctttgataatggtgactctcacctggactccagcgaattcctgaaattcgtggagcagaatgaaacagccgtcaacatcaccgcttaccccaatcaggagaacaacaaactgctcagaggcctctgtgttgatgccctcattgaactgtccgatgagaacgctgactggaaactcagcttncagagttcctcaagtgctcaacccatccttcaaccctnctgagaagaagtgcgccctggaggacgaaacctatgcagatggagctgagaccgaagtggactgcaatcgctgtgtctgttccttgtgacactkggtctgcacagcgatgmcytgtgatgraaagaatcaraagggggtccagacccacacagaggaggagatgmcgagatatgcccmrgaacyycagaagcaccrgggamcagcagaaaagmccaagaaggtgaacaccaaagagatctaagaagaggcacgtagcacctcatctggaacccagcacctcctcttcagcgmtaagtccagtatacagcgtctgtggcaatcaccgaatcaccagtatttgcttgtacggcagcaaatcttattctgtttgttttgcaataaaggaagtgagggtggctggctagccagggcaggcaggccacaactttcacttctaggaatgctttaararamamwaaarrrmaccttggggcaggaggcgagtatccggttggcagaggagcagaggcaggtctgaatgaaacctttctggggtcagctgtgaggatacaacaggaaaagcatgtgatgttagggggaacactgagctggccctgctkgaggaaatagggggagcttkgtggggaggaaccctgctgctttgaccyttgtcaccacttgtcatcatyccagatctgcagcaaatctgcttctycttttkratcccacartcacctgsatacacagkcgscccawtaggtagstgkgttcctyaamytggagtttctgagagkggttkgatkatcraatacttcggcttcagggcagggtacctacccaaattaaacttccgcctttgtgtatggtccaagggggctccgggaagcgtcttgtgagagagcacccgatacaaaagagggcacaacgtcgaaatgccgcgaatctacacaacaagagggggtacagagaaactctcgga

SEQ ID NO: 1563 - DNA, 913 bp, Rattus norvegicus
  misc_feature (907)..(907): n is a, c, g, or t
ctggaacccaggtttccattcagacgttaaacgcgcccgtgactgtaaccatcactatggccaattggtacccgcccccytywwttttttyttytttttktywaaawgkgattttytttattttaaattatatamccwwkwwwwwyhwyyywyytkkaggrwaacacaacttttaataaaactatwacagtmatctcaaagacaagscamaaaccactgagtaactgtaccatctakagttaggagttattgtcaggaatatggtakgaaaaacagcaactagcatgaagattatgatgcatagctcttcaaagatgaytaragrmckkactgctggratctaagaatatccagccatacagtgcaawtctaaamytggtttctwaccacaactagcmwatggccatcccmmycbtkmystctkaatagaccctwccgtgaaaacsvtwrcmtacagaggtactgaaagcakcaamcaggaaaacwgcactggtgcarctgattggtastkgscacgcctgtcactgtgmtggdktgytctycwwaytsttgttcttcttgtcchtcttcttcagcccayccatgttggstctcagtmrwkyygaatwskycatctgaaacttrwtcacttctttggagctcamcactgkgytgatcttccttttcccatccgtggsccttaacagacacttgttttctgcgggctcgaggccctccacggractcttccgtgggattggtttagtgcgaccatcatacttcktcagggtgatgaacacgctgsccgatgacsggmactyctggaagagcctggtcagctccgwcaggaamkgcwcrcwmtcrmgcmmcryyaksywggkctccgcaggttccgactccgtcagcagaagcctystgaggtcaaccngaatct

SEQ ID NO: 1564 - DNA, 916 bp, Rattus norvegicus
tttttttttttttttttkyccagataagacagaggtttactaactctatccaggtggctctccagggcccttttaacacwywywwktwwkwktytwtagtggaaactatgttkaaaatgaasacttsyarakgctgcmgwkcvcmrkkctsrggcgaggwcrgcaycwccyytgttccgaggagtctgtgcagaggcagggctctcgtcccrrtgwgcacwgaacgcatcagccgagtgtgtcctgccwcggcttctktgtgktkgcktkgacgctsttggtgctsctsktgssggtkttgggggagcgacktggatcatgctgtascagagggttgtgggtaaaagtctgtcstaagggtcctctggcagctagstccaagtgtttmtgsakycgmtcctcccgctctyggrgccgatgtgcaatttcagcattcttycmgccttttttgaarctcttcaagaagccttccctgggaggtaacttgctagggtcatgcacwactcgctgggggatcttgagtgctgtgcgcmcwsstgsmaaccggaggcaggctacttggcacagggagaacacgttggaggacagccagtacatgaacaccgccgaggggaagtggatagtcacgggcaagactgctagaggcatcaccctgatgacgttcctcatgagctggaggtcagagctctgcatacctgtctcagcgcctagctcaaggacaccccacattgtggcagtgactaccagtggcaagacgtagatgggatcagataccgtgagatcgtgaaaccaccagagcccacctgtctggaggctgggcacaggcaggttggccatctctctcaaggcaataaagaaggagatgaagatggggccctgagtgagaggtaggatgagcggcctgaagaatttaatg

SEQ ID NO: 1565 - DNA, 812 bp, Rattus norvegicus
cttagacgcctggtgactctcatctcccagcaggccacactgctggcctccaatgaagcctttaaaaagcaggcagaaagtgccastgakgcagmsawvaaatacatgrargagaatgatcagctamakamsgsaactgctgasgatggaggcaagtygkatgttkggagtcctgaaatgaagktagakgagaacawgatcctgaagactgmtctswagaakytaaaagatgagytggccagcaccaagaaaaaacttgagaaagctgwwaacraggctctggctatgcagaagcagtmtragggccttaccaaagaatatgaccgtctgctaraagagcacgccaagctgcaggcctcagtacgtggtccctcagacaagaaggaggagtaaagacttgkyttttccctgcctgtagctggcttawacttgacccatsmttactgcttmmttggagcccagmctgtmcctctggwacttggttwattcccttccatttccccawttttyttccatggcttatagatcatkttgsccccattacacatactactcttmtaccmaaaaggrcctgattsttgttcattcacagtaatyttkscactkktctgcctggccagkssacttkccactcctagaagtgtagaaaagcaykggtgmcctgggctgcacytgtactccattttattttrccatgtatcctaaaagaggctgstgttaagcaggtcaactgtkttatcctgaggggamtaartgttgtymwrwyavmaaaaaaamaawaarmacatacctcactgggggtcagacccaaa

SEQ ID NO: 1566 - DNA, 927 bp, Rattus norvegicus
  misc_feature (900)..(900): n is a, c, g, or t
ctgccgcggcttccggagctcttcgaaaccagcaagaaacttctggaggagttggaagtagcaactgaacccaccggctcccgaacaatccaggataaggtgtccaaaggactagaactccttgagaaggctgccggaatgttatcgcagcttgatttgttcagccgaaatgaagatttggaagagattgcttctatcgacctgaagtacctgatggtaccagcgttgcaaggagctctcaccatgaaacaagtcaaccccagcaagcgtctagatcatttgcagcgggctcgagaacacttcatacatttcttaactcagtgtcattgctatcatgtggcagagtttcagctaccccaaaccaagaataactcagctgaaaataatactgctcgctcctccatggcctatccaaatctcgttgctatggcatctcaaagacaggctaaaatagagagatacaagcagaagaaggaggtggagcataggttgtctgcactgaaatctgctgtggaaagtggtcaagcagatgatgagcgtgttcgtgaatattacctccttcaccttcggaggtggattggtatcagcttagaagagatagagagcattgaccaggaaatacagtcctgaaagaccaagactctccaagagaggatcaggttgtcagccatctctccagagaagctccatgaaaccctctcccactcgaagatgcgcagcccagtcttgaactggtttccagccggcactatacgggagtacggctgacagataaagacgggctacaattggaatccagagcacgggattaagagccacgaggaatacaagtaaaaggaacccacgaagggtgcgacccgcgccgagaacaagagcccccagggcggctatcttaacccncccaccacaaccacacgagacacaaca

SEQ ID NO: 1567 - DNA, 1343 bp, Rattus norvegicus
ataagtacagcaggtcatttagaaaaacagaaacaaaatatatacccagtctttgcaattcaaattttttttaacatgaacaatattcaaatataaaattgcactaattttttctaaatatgatttatgcaaataggttttcttaaacaagccaagccttaaggatatgatgtgtacaaactaccagtagtgtatattccaaacattcttcctatattatgatacaacataactgttctctgagtgaaggtttatgttaagtttaaggtgtaaacactttagaagcaacttagttaaattattgttcagttaaaagtaacatcatctcataacaggctcctgaattttcaaacttacatgtaaaaatacatttacatcttaaatttytagaaaaggcacgttttatgtagrmamgcagsrrwtttttwwwyyywywwtttrctgaaaaagccattactytttattagaaacaataatsctystsaagatgttggcmacmagsyatagtatagcacacatttcatacagtgtatktctcccyttaattacattccagragtgggtggracacctccttggccatgagaagctgacgtatttgatggactatgtaagctgktctccttgtacacaaaccaagcatttcctccccaaagtatcatattcagaaagccaaagatcacggatacattcagggaccccatactagtcacagagacaaagtaacatgacacttctgacttacaaggatcaagttcttcaacaattctgtgtccagtarctaccttaatatctgtaagagctttagcscaggcmgaggaactcaccawccwcawaaragtagcaacaagagtmacaataaagtcgatcatgggcagtktgmgactatcccggtasaggttggtgtamccaacatagaggagaagggcakcaatgcagtacaggaacaccaagactgcaaaggtgacatagaactgtgcggaagaggagtaatcacctatgaggacatgcttttcccaaytcrcctkacacacattgacatttggagctgaatgaaatgatgcytgattcaacctgaatgsataaccraaagtagctgtaatcgtcttattttcaccaggtgcagaaagacaattcacttgaatttytgttttgcccttaaacccaccacaggtggcaaaagcaaagatagaagcaaaccactcgaggatcttgatgaagccgagcggctccttgagcgggttgaggttgatytggaaggtggacatcctctgaggsmmmgsmssgaamagagtcagkacgcggggcggaggaggggagcagcgacacccgagcacttcggc

SEQ ID NO: 1568 - DNA, 994 bp, Rattus norvegicus
gtgtgcggcgcttcctgtctttatctcaatgtcgtgctccaggtctctctgtgggtgctttcccgcggttccctggtggtgctctctggtccgctgttacctccttgcatgtccgccctgatttctcaccgtgctgcacgcggttcgttctcgctttcgaccgtgtccttgctggcacgcacacactagtcgggcactctgaggttcgggacagctgaagaggagcggtggtccgggagtacccgtaccagagtgttcctcgccgtggattgctggatwyksvryrssagkakcgaccacagcrsgagrakcagcactctasccgmcwskarscccwacctgggaggaagatgctaattaaagtgaagacgctgactggaaaggagattgagattgacatcgaacccacagacaaggtggwacgaatcaaggagcgtgtggaagaaaaagaagkaattcccccacaacagcagcggytcatctacagtggcaaacaaatgawtgayragaakwcrgcagctgakkrcaagattctaggtggtkccgkycwbsacstggtgttggctcttaragrargtggtsgtcttgggcaatgargaaasttgattmtktkttacctccttgtcctgccgytcataatgtggcatcacatatcctctcactctytgrgacaccagagstactgyscccttccttggrtgcccmatcttgtgtgtytactggwgggagaatgtgaggaccccakgatgcagwsttcctggcccaaatggcccttgytggccattgggttttartttgcagtcctgtgtgcttccctctcttatggctatatccttggktgtcartaaaatatttcctggcmaaaaaaaarrrrdrrmmmcctttgcgkmcscaattykccctwtagtgagksktattwyamttcactggscgtcgttttcaacgtcgtgactgggaaaaccctgcggttaccaacttatggcttgcaggaata

SEQ ID NO: 1569 - DNA, 1693 bp, Rattus norvegicus
  misc_feature (494)..(494): n is a, c, g, or t
  misc_feature (500)..(501): n is a, c, g, or t
  misc_feature (514)..(514): n is a, c, g, or t
  misc_feature (950)..(950): n is a, c, g, or t
cagagaattaatgttatcagttcattttctttagaaatcttaattccaagacttaaaaactaaagagadwwtthkbywhdwbkgtcacaatgtcatatatttgcaatgctttcaaagcccaacagtgattttwwwawkwwwttwwwywwywtkyyytywttgwmtttttawaaatytwtwcaattcaagctaatgaaataktttattatacatagtaaamgtggygtttaaaaaraaattccaggcccagatgtctgcaggagtatgtkagaaatggattccackygagcatawscagmaaaactactgaatgaraccmcwartccaccaactcctttatagtaaatgccgacgttcaccgaggctcgaattcctgtggtktcaggagatatatktaacgtattacacacatgcttacgatgcwtwggaaaawrraaaammaaaswtgcrgyygcatavcwtrtksmctymswrmkkktcyaawttwyadhtbndyddgnnbbdvdwydkdvhnmkhhwgbwktwkwwwwtwkyktatgattcdbtkwtkwyttttttttkaskswaatmrataccmwattttgccatttwaatgkmrcartadmattmwdttttcaatccaaggggrrggaraatsarstgaracatgttcatgarttcaggattatatatawatkrcratstgcsttataawrcacdtgkggctttgkgataaaaatarstcaggaacatatggaattcaagctratktgcwtaactgtcrcaaravawaagcwttwaatgcattymtgaaatrartattstcatttaatttcarmatctcaaaacakcaacakacvttggscktgttttaaaaaakttkarttagacrhtaagcyagbyaarkrrcckbayysaraaggtttamacgtsmcyggtrtagaaratgmwmgccctvwagtctccayctnsydcsccagaagaggtgaaaggaaaaggtagacaatttctttagcagcatgtatggctaagtccatcaaccaccttaamtagagtgtycaytmctgwsycsamtaaaaatacctgyggtcacatyagaagttgcccttttyacaggccakmvwcrwktycagggttacagtaaataagatwcttttgagatatttaaaatcctttwgacatgacccararggatcacctcttcactgtaggaaaaggamcagagagagagagagagagagaaagagagaaagagagatacttggaaaggaggaacagagtaagatactgatctaaactcatgtccaaccctctgaacaaaggaaatggaacaaggttattagctaagctctgtgctctaaccacactacttaattacagtgatcttagatgcaacagcccacctcactgggcagctgacagctcagaatacttttgcaataatttttgtaacgcgaagacactaaaacaatctgctcatgcaattttcatttatgcattctgcatctctttgccaatcttgtagctaaggatcttsytcswgtcgatcttagtacgtgtcactggcaactgtcgacgtaaggctttgaaggtagtgtccgacattgtctgatagttctcactgatggcagtctggtattcattttctgcagcttctacaatctttataaattcttttgctgtttgcacctcattagatactgtgagcctcgtg

SEQ ID NO: 1570 - DNA, 916 bp, Rattus norvegicus
  misc_feature (6)..(6): n is a, c, g, or t
ggcgcnattatatctgttgtttctccttctggcgttccgcgcgcgcccctgtgttggccccgcccggttttttactctgttgtgcacgcgagatcgtgtttgcgcccggttttaggagtccgccgcttctggttttgtgtctccgctcgctacgatgttataacagagaaagggcgtagaggaattccggccagagttcgcggatactggagaatgattcccttcgagcttagcagcaagctgctgagtgagccacaagtccgccagctcctttatagtaaatgccgacgttcaccgaggctcgaattcctgtgtgttcaggagatatatttaacgtattacacacatgcttacgatgcataggaaaatggaaaacaaaagatgcagttgcataccatgtggactcccaaattttctaatttacaacttgttaagaatkwywwtwtwykwwkwwwgtattttaaaatagtgtatgattcactgatgattttttttttactcaaataaataccaaattttgccattttaatgtcacaataaaattcagttttcaatccaaggggagggagaatcagctgagacatgttcatgagttcaggattatatatatattacaatctgccttataatacacttgtggctttgtgataaaaataactcaggaacatatggaattcaagctaatttgcataactgtcacaagaaaaaagcattaaatgcatttctgaaataagtattctgcatytmtttsmsaatctwryagcwamrgaycttgktccwgtcgwtytwarwamgtgtcactggcaactgtcgacgtaaggctttgaaggtagtgtccgacattgtctgatagttctcactgatggcagtctggtattcattttctgcagcttctacaatctttataaattctttt

SEQ ID NO: 1571 - DNA, 1070 bp, Rattus norvegicus
  misc_feature (17)..(17): n is a, c, g, or t
  misc_feature (20)..(21): n is a, c, g, or t
cgtcgtgcgtcggcgcnccnnagaaagtattgccgtggacccatctctcgcgatgcgcatgtgcccgccagtgtgtctgcccgcgctccttgggccttttgtttgcaggcacccactcgtatttgataaggttccttccctaggtaaacgcctgttccgagtacggggtcaccaagtacgtgcgtgtccttccatcggcggccattgggagccatcgtcgcctcttcattaccctctggcacagggattcctgcagcgataagtggtcacgccggttttcccgtcacgcgctgttaacgccgtccagtgattggatcgactcgctatcgggcggattgggtaccggccccccckykwtktkttyttkwktktsmtggtcagtgcattytattgaatcagcacagyacahmrataratmwmaataagggaagsggaattaaattacasccwwacagagcttcatgagtcycgtcagattataaaccagacatactcacmwacacgccatacatacatacaaaatgagacaaatataaattaatatyawcagtatccacmgtttggtcmaagawtagctacagaagdaatctcacyyaaaaammwmaaaacwawacmaaacmawaccwmaaccatcacatgtgtgtacagcagtatcgatcgacgtacagctatgggtaagtccggscaggggatggcacattttctcctcattgcaagtttaacactgstgggacaaaactaaattctawtaactgcmcggaaggatggatcmwcsyktcatggtcgtaaggagagagaaaaatcccatcgtgaactccgctcctgcggcttgttctcagcacgtgggattctcacggccatctgctctaaggttatttttcttaagacacaaaatgctcctggttcgcatgcaccgttccagctgtaaaagcaatccagaataaaagggggtttttgtagatttttcttcacatcgttcttgttttttttttcttttctattttgtgtgtatgaatgcctgaatgtgtatccaaccctcatgtgtatgtctgatgcaccaggaagatcag

SEQ ID NO: 1572 - DNA, 1083 bp, Rattus norvegicus
  misc_feature (896)..(896): n is a, c, g, or t
gactgtgacctaaggagcatcagttgggggatgctaaaggtktwmwytkaratgccctctggcrgatgcaaaacacttaactytttggatagcatctccccccaccccatcagttgtgtcctsttggcctstggcacawtatcttmacaatggtgctcttttcctkgggttttatccattcacttacagcaggtgattagaggatytygwkymgtttcaraatgattcctgtttcatatttcccagttgtttatytcttgttwggagctgtaccaraaagaactggagaatgattctttgagcttagttctttttcaaaaraaaaaaraaaaactggacagtaagcatcacaaaaatatttgaaattgtgtagtcccatgaaatgattgggattttccccaagtattctaccttttgtagaactaggcttggtaaatwwgaacctccatttgaataacctgtccaatattttcttttctaataaatgacagatgattttgcttgctaatattatctcagcattttgaaagtttaggcttagcatagaggttattgtgtcttggtatatataggtcacataatagatttcagcaactgccagctgtttagttggtgagcttccagagagctctggagacatggtgaggacagacagaattggaaacctgaagaactcccagatttcaggcttatcctgtacttgttaactttgggtgaaagaaagaaaagcaaagaaagaaaggaaaagcctctgatctgtttttactgaaggaaaagttactgtagattttttttttcgtagatttgtgctgtcattccccaaagggcgtttgtcatgtcgacagagatataggactcgaagaagaatactgagactgctctggggcagtatatangtaactaccagagcccacatgaggaagcttaggactggagaaccaccagataggacggaaaacaaactcaaggaggtgcaacaaacaacacctcgaaactcgaataaaccggaccaaaagacgaggccacaaatgacccaggacgcaccccgtgggaaattcgaaaaaagccgacgacccaccaggg

SEQ ID NO: 1573 - DNA, 1566 bp, Rattus norvegicus
  misc_feature (882)..(882): n is a, c, g, or t
  misc_feature (927)..(927): n is a, c, g, or t
  misc_feature (997)..(997): n is a, c, g, or t
  misc_feature (1036)..(1036): n is a, c, g, or t
  misc_feature (1044)..(1044): n is a, c, g, or t
  misc_feature (1049)..(1049): n is a, c, g, or t
  misc_feature (1051)..(1051): n is a, c, g, or t
  misc_feature (1054)..(1054): n is a, c, g, or t
  misc_feature (1057)..(1057): n is a, c, g, or t
  misc_feature (1083)..(1083): n is a, c, g, or t
caacaaaagctggagctccaccgcggtggcggccgctctagaactagtggatsscmcgrgskgcargaawtmsgcacgarcctcttgcccctgttcttggctcagctgaaggatgagtgtcctgaggtgcggstgwacakcatttccaacctggattgtgtgaatgawgtgattggcatccggcwgctctcgcagtccttgcttcctgccatcgtggaactcgctgwwgatgccaagtggcgwgtgcggctggccatcattgaatacatgcctctgctggctggacagctcggtgwggaattttttgatgwgaaacttaactctttgtgtatggcctggctagtggatcatgtckryrcdadsvgykavghkkccaccagcwaccttwagawgctagyggwgwwgttcgggaaggagtgggcccatkccwctatcatcmccamggtcttagccatgtctggagaccctawctwcctgcaccgaatgactacactcttctgcatcartgtdttgtctgaggkctgtgggcwsgrtattaccacgwagcacatgctgyccacagktcttcgtatggctggrgacccagwcgccaatgtccgsttcwatgtggccaagtcactacagaagataggacccattcttgrtaacagcaccctgcaaagtgargtcaagyytatcstagagaagytgacccaggaccaggatgtggatgtyaagtactttkcccmggargstctgactgttstbtctmttgsctgrtgctggavgaaraagcawtkccgscctbtggtgtycaccctycaacccccacagktacbtcccttagggaggwgktgggagcaaakrastgtcgytccbgtgcatggtbtgaccccaggcccntcchtmagmacggktwggkttytccyhkhtgwagchtgggarganttstctgtcmmcbtchtghgggrbtggggcarwhhaagttggggcaggacavcarcykvwwaaraagstnksdttkyycykgsccayattgggrdrrwtggrmgchtcntaggtvankgghndnksnwkntvtwwwssvracccccstcycccatntacttwcaagcrmyctttyctaamcccaaccatgttttttygtgtgtgtcaattgtgccatttttattttattcctttccytactmtttacacmgaataaaaatgtrgaahtwmwwvrwmamaaamrrmackmgmggrsgrgcccggtacccaattcgccctatagtgagtcgtattacaattcactggccgtcgttttacaacgtcgtgactgggaaaaccctggcgtacccaacttaatcgctgcagcacatcccctttcgccagtggcgttatagcgaagaggcccgaccggcgccctcccaacagtgcgcgcctgatggcacgggaaatggtagccgtaccatcggtcaacccggctaacttcgggaacaacgccatataaccagtagcgagactggaagcctttaccaagactaacgacacggtgagtgtccctggccagcccataaaacgggccccgcagggaccctaggggcgcat

SEQ ID NO: 1574 - DNA, 912 bp, Rattus norvegicus
ggttgggtccgagtcggagccattacagccggcaaaggtcccgcackagykcwgyagcymagrkgtgtrayktmascgakgrcyasacckyagaattcaaggaggctttccagctgtttgaccgaacaggcgatggcaagatcctgtacagccagtgtggggatgtgatgcgggccctgggccagaaccctaccaacgccgaggtgctcaaggtcctggggaaccccaagagcgatgagatgaatgtgaaggtgctggactttgargcacttcctgcccatgctgcagactgtggccaagaacaaggmccaaggaacctacgaggattatgttgaaggccttcgtgtgtttgacaaagaagggacatggcactgtcatgggtgctgaaatccgtcatgtcctagtcacactgggggrgacagatgacagaggaagaagtcgagatgctagtggcggggcatgaggacagcaacggttgcattaactatgaagcatatgtgaggcatatcctgtcggggtgacgggcccatggggcggagcttgtccggatggtgcttgaatggctgaggacatatgcgtgtctcgagcctgctccttgccagtgtagattcctgtgttggcccagaggcatcctaatcacacaccttgcctgtctggtaactttggatgagttaggcttatcacataaacatggctctgtgcagaacaaaaaacactcaggggggccggtccaatgccttaggagagatcaataccggcgcggttaacgaggtagaaacctgtgtcacactaccgttgagatcctataaaggaagaagagcgaatattcaagtcatatgataaacgaattgacgaaggagcttcaacaaagataacacgttttcactctccgctccgagagtaacaggacta

SEQ ID NO: 1575 - DNA, 1128 bp, Rattus norvegicus
  misc_feature (674)..(674): n is a, c, g, or t
  misc_feature (681)..(681): n is a, c, g, or t
  misc_feature (692)..(692): n is a, c, g, or t
  misc_feature (724)..(724): n is a, c, g, or t
  misc_feature (836)..(836): n is a, c, g, or t
  misc_feature (843)..(843): n is a, c, g, or t
gatgtcgtggcgctctgaggcaaaaagttgtttctctgaggagccttaggactgaagccgaggttgggtgaccctggcccttycctacccactcttccttgccctccttcccctctcgtggcaggatgagscgtgcagscctgggtgatggagcacctcctggcggctatgggaactatggttatgccaatagtggatataatgcttgtgaagaagagaatgacagactcactgaaagtctcagaagcaaagtamcagctataaaatctctttccattgagataggccatgaagtcaaaaatcaaaataaactgttagctgaaatggattcacaatttgattctacaactggatttctaggtaaaaccatgggaagactgaagattttgtccmsagggagccaaacgaaattgctatgctatatgatgctgttttcattgtttgtcttttttgtcatttattggattattaaactgaggtgatgcaagttarwrwrrrmwwwraawwwattgcagttaatgtcttgkggaaccactttgataaccagcatctcaacattcctaatggtcttctccattgaagattagtagaattttcctctttcagaaatcatactataccatgtaatgttttgaatactgctccttactgactgactcaatatgactcctatnttaaggngtatttaattntcttgaagtcagtgtggctatacctaatgtgntccaagtgtttccagtcagagtaaatatgactaccattaccctgctgtacataaatgtaaacttttaaagcaagttggagagcagaagaatgccagagaacttgaattcagnctttgangagtgttgatgctggtagaagctcactttgttgtctgatgcatcttgaatgatggctctttgctatacatgtaggcgttcttctctacagtttaagtatacatgatcttgcctagactcctgagtagctatgctattttgtgagctatcacatggttacatagcatgtaattatgaaatctactgttgttaagaagtcgatctactgatagggccatggtatattaggaaaaaggacatttgatttaaccttgcaaaaggatcccaaataatgctttttactgtc

SEQ ID NO: 1576 - DNA, 1123 bp, Rattus norvegicus
gggcgttttgcgcgacggtgggcgccggggcgggttccgctgggtgcccctgcggtcggtggccgctgcttctggggaccttcgggctcgtgggcggcccctcgtttagccgggccggctgttgggcaagtcgcggtgtgaggcgccaggtactgcaggggtgacgtactgaggccgcagcctcactgccgaycctagsgyycttccagckccatcagccmcttcktgcgcraaatacaatgcagkctcccaagcataagttctggcagtccktktttskacagaccgcratwattctttgtgtgtgcttagagagctagggattccatgtcaagattataaagtaactgctacctcataaatggagaggaccttcaagcccagggataccctcccttggcagagagatagtgaagacctctacctgctcrraracacacccaagcagaggcgaggctgtgttagaaggagggcctggggggggtcaagtctgggtcagcctcctgagaggcaaatctgcccagcagaaaatgccctaccagaggagcccttagwywytyyywkkyywtttywwkwywwwyttaggkttgaattctttattaraaaccatgcaaactttaatacaaaaaatacaagtgcrataagaatcttgtgttgatacaattcccgggattttctcaatattgcagccatcccatccatgagcagaccacactgggatggctgcacctccacggctggcctctcctgctcctcctctccagtcacaccagaagaaaagtgggatggcctcagtctcatgcattytagttttaaattttcacacctgattccccactgttcacaagcattctggacatctcargstcccctadatatgaggatttgggtgccatggcctgcaggtacagaccagggactttgaccttcatttctgtttctccagccctggttttgtatcacacattaaccaccggattcccasggaatgagatagatgccaaaaccagcctcttgttagaaaagcagcaaatatacacaacacagscatcacgctgaccacctggctktccaactccactaggcaatagtccacttcttcccacaggatccaagctgccca

SEQ ID NO: 1577 - DNA, 1073 bp, Rattus norvegicus
ttaatccgtctccgcctcctttccgtgccgttggctcattgctcatgcgcgggatttttcttttcaactgagagaactatcggatggatttgaaagatttatggtgagcaagaatgcgaaccatattcggataacattaccatatcagataaagttgaaccaaggcaatagcttctcataacacccattggtgtttaccttgatacttgataaggaataacctgaaagggtataaataaagtggcaagcaaataccattgggtttgcctttagtaaggcaattgtgtgtgtcatttgttggggtaaggaattaragaaaaaggckwaaatacttttttttccctagagaagtacaaagcctttgtgtttcgtrtaagtgacttcacaatkcccmagtgscagaatrtcaacaaggtgttttcatgcactggcatrargggctgtggtgttccacmcagkgtccctccagactgtcamtacacactggggtaggggtgcaacacacctggtctcyttaacaccaggttctagtgaagtcacagaatcatccracgggaaatgggtgtraggaagagraagctcgtgttttctaagctctgctgtggatgagttctctcagaggcgacactgaataaccgtgtgtacaattctgttttcacaagatggtttcacccatagttctatactatgkggacattccaggtaacacwscggcccatattagtgtwrctttgccactatggagaaagtgaactctgacrctgagatccatacatgaaracgcacataagccagtactcattagggatcmcycktgcctacggtaaatgaacttttatttttaggttaacatgctcactgggagggggagctgactgagactggtggcttgcaggaagtacctttttaagaacttagcatagcctttatagacagagaggacgggcacaggtattcacatctgccagacagggaactggagccctgtaccgcaggctcggctggccaacgataaaatcaagactggacggtgaccatgcctggctaactctgatcaccctaaaagcatgcac

SEQ ID NO: 1578 - DNA, 1306 bp, Rattus norvegicus
  misc_feature (176)..(176): n is a, c, g, or t
  misc_feature (220)..(220): n is a, c, g, or t
  misc_feature (256)..(256): n is a, c, g, or t
  misc_feature (404)..(404): n is a, c, g, or t
ttattttacaacatcaaaccactattagtaccctccgtgttttctaggactccacataaccttcccacataacttctacctattggtgtaactattcagtccttcccagaaattgtggtcgcattatatataatgtttggccctaaatttaaccttttatgttgccacaaacgccnccagtcaattacatcatcagagtccagttaacatggcttgcccntaaaaagcgttgctcagaaccttatatagtttgccngaaaccaagagacttggtcagatcaattctaaagaccatcacattggttttaagtaggtaaaatagtaactataaccagacacgatgttcttaagattctgaaatgtacactggaaaaatacacctatttcttataaacatctaaacnaagcatcatagaaaagaykwytwwwkywkywkytgkatctgacactttattcctaaagtcagtctctaagattttragcaggataaatgtcttgaaamcatycccctttscctgtttttcmragtattcccacttactgacacctacctaggcccttgaatctttttccactcagcctgactttattgcatgtcctgattatttaaccctacaaacaaactctaccttataatctctaatccaacttttgctagattatacaacagctgaggaaggaattaaacctcacccratccatctacacctttactaaagaatgaggttaagcacttagatgaaatgactttacacacgtctgaataatggaaaggttgttaagtaacwattgatcgcagtctcaactgactgggctttgggatgtatagaaactgcaaatctagttattcctacacatttgcactatttattttaacttgggtttccacagcattcctaatgcttaaaagtatraagcattttagtttaaccatgtcactgttttttaaactaaccacaaaagccccaccaatacaaaggggactgattgaattttaaccagcaaatcttatcaatagtctgctaagcacctgttaaacagattcatctttcagcagaaaatgcagtgtatatgcttttcaactttgaataaaaataactaaatctctaattaaaggttacttctgtttttcaaacattaaagaccaccaaatcatacattaacagtaattatgctgaccacttccagagcacaggataacaagatcccaagtactaggacctacttcttgaagagttcaaattgtaatcctttagtttcttttatttatcatgtggcactaactacaaagtcccttttcctcgtg

SEQ ID NO: 1579 - DNA, 784 bp, Rattus norvegicus
tcgttgcaagctcgtttcccccgtgtgtaccggacattacgtatttgctactcgcgcgtaactttctggatgactcgctctttgaattggaagccactccctccatattgtgtacattgatgtcataggccatggatttagttagctcggagctctaatgtcaagagccaccatttccaagtatcctacggagcgccaggaagttgatggtgatccagtttacaggatgtttattggaaaaggattttgtttttttttaaaagagaacaaatctgacamcaaatacttttaaaattgtaaatagttttacgatttaaagtgttttgacggtgtaagtcgattgaaactatttatggctggttttaagggaaaagaagasrvccgcaaagraaggagaaaagcaagaaaaataytgaaacaggcagggagatatgtgatctcattacttmtgaaaattgtactgtttrtagtgtatkacagtatcaacgtgaatatccaattctgctaaatttcctgcactgtattaaacatgtaaattaacttttttgtctgcttagccagtstaaccacccggacagggagsytsccatgtctgaagaactgtgtgattcagtgatgacttgttctgacwtgttgtrkwtcagtagtgttcasgaggaaagcatggtgtaagggagatgctgtctgtccctttgtgccagcactgtatgtttgcaagacacgaataaactgccgcttttgcccaaacgawmwmaaaaaaaaaaaaaaaaaacccctcgtgccg

SEQ ID NO: 1580 - DNA, 777 bp, Rattus norvegicus
tttgcataatcagagataacaaaaaccattcttagattgacaagaagtattctagcagtttgttacaacattagagacacatcagcattctatwykwtkktywwktkkktacatgcaataatggtacaatgmccaataatatttattgaatttaaactatttrctgttgtaaacattttaacaaaagcaatgggatctragtacagtctttgacaattccaacaaaataagtggtgtgtttaaaaaataragctgatgagcaatagagtcatccatttcatataktgtctttcaacaattccggaaagaagagcrcggtatttttaaaragtatatagcaagattgttcctattataatgtcaamctctggaamctktaaatacaaataaattcagtgaacagtcaaatggtcatgtttataaagaagaaattgcagtaagamctgtctgcgatccagttaaattctgttgtcaataggatgagttttcttgtcagttgatttcatagttccttttccgagacagcaaamctttggcaattgaatatactgaaaatatattttcaaagtttaagacacgtcagtcagcgtttttgctgttgttaagggtgacctgtacaccaaggctcagagtttggtaaagattccatgtggaaaaagtgcacaatattctgcacagatagcttacagaggtgctggcagttactctccagcagtcttgggtttttgcttgcatagctcacacatctctggaatgtgaaaaggtgtgctatttttt

SEQ ID NO: 1581 - DNA, 1058 bp, Rattus norvegicus
  misc_feature (2)..(2): n is a, c, g, or t
cnccttcttttctggagagttcggaacctcaccaaggasamgartggaactaaaacagatttycagcaacaagtgctttggcgggctccaraaagtttttgaacatagcagtgttgagctgaaatgtaaaatgaaatttgctatctacctaccaccccaggctgagagtgcaaagtgccctgcactttactggctgtctggtttaacttgcacagaacaaaatttcatatcaaagtctggctgtcaacaagctgcctcagaacatggccttgtggtcattgctcctgataccagcccccgtggctgcaatattaaaggagaagatgacagctgggacttcggcactggtgcggggttttttgtgaacgccactgaggatccttggaacactaactamagaatgtactcttacgtaacagaggagcttccacaactcataaatgccaatttcccagtggacccacagaggatatytatttttkgtcactccatgggaggtcacggagctctgatttgcgctttgaaaaatcctggaaaatwcagatctgtatctgcatttgctccaatttgcaaccctgtgctctgtcyttggggcaaaaaagcttttamtggrtattwggrmccmgatcaaagtaaatggaaggcgtacgatgcgacctgtctcgtgaagtcctamtcgggtccmcagattgasmtactaattgatcaggggraagatgacsagttcctctcgaatggscagttactccctgrcracttcatcsstgcctgcrcagaaaagaaaatccctgktgttttwaggctacaagagggttmtgatcatasvhaytacttcatbgsaaccttcatcaykgaccacaksaggcatcatgccaagtacctgaatgcatgaagagcttcagmcaagagaatmtcatcaggmtgatwaaagttggaatcaacaggattgstgacaaaaarattttggatttcctctgaaaagatcatgctcctgcagttgaatcacttttytgaatarwcawatcmamcttthwrrwwwwwaaaaaaaaaaaaaaaaa

SEQ ID NO: 1582 - DNA, 657 bp, Rattus norvegicus
ctctctctccctctctctctctctctctccctctctctctcaacgtcactctgattttaaaaggcaactgtgtaacaagctcttctaattctggttgagtgatccggtagaactctgcagagccggggactgggtgactacatcaaagggtgaccccgggatgaggttctcgatctctccctccaccagacagtcccactgatcaaagtctttatgaagtcctaaatgtttttgtaagaaagccaaggaagccttgatsgksmgstcyaykkcarmtctggagtctatgtctcctttcagtgacagcttgwttccaattattttgccagttacaaaagtcccgtcagcaaaattctggtgcactgagcccttgatcgtaatcattttcctttccttgtcaggctggtagaagtttttcatttttgcaatgwcctttggagtctggaattcggcagagttgataaagaagagaggctgaggaactctggagtacagctcctcactcacgggaaacatccacggatcaagggcaatcccacatctgaatctctggtcttcacttaaggcttgaaaaactgttgctcctccaaaagaatgccccatcacagctattttagtctcatcgatagaatccttcagctgtttcatatcaaaagg

SEQ ID NO: 1583 - DNA, 732 bp, Rattus norvegicus
tgcaggttcgagtcgctcacgttgtcgcacaacaacatgatcgcgctcaagcccatcctgcaggcgtggctggaggaggccgagggcgcgcagcgtgagaaaatgaacaagccggagctcttcaacggcggcgagaagaagcgcaagcggacttccatcgccgcgcccgagaagcgctccctcgaggcctattttgccgtacaaccccggccctcctcggagaagatcgccgccatcgccgagaaactggacctcaaaaagaacgtggtgcgggtgtggttttgcaaccagagacagaagcakwwkcssatgaaatwcwmtsycacttwctswggagggtccctrtctccctcccttggagaacatgaagttgttgaaaagctgagaagtttctgctttcatttgggggcaggagtcccatgtaagaaaaatcacctaaaatcccagaagaaaggaagagatttaaagaywtaaagcccctcccaccctgttcgtttcaaataggtctgcamttatccgggaaagcagaagtgtttccctgttgttmttgtgtwgttcaaggatcatytattaccagggataaacgmtgagttgcagaaacttcaatttgcamtrtgagttyccaaaatagaaaatcatgwatggtatctcatactaataatccaaactgctgatagatttttkttaartgagaaagacagtktghgaawrraawaaaaamaaaaaaaaaaa

SEQ ID NO: 1584 - DNA, 829 bp, Rattus norvegicus
gtatggccttgttctcgagacttctattcggttgtdaactctgttcggcagcctcaggcctgcggtctygwgaccgarywcgatgcckasgataaagttgcagagttctgatggagagatatttgaagttgatgtagaaattgccaaacartctgtgaycattaagaccatgctggaagatttgggaatggatgatgagggagatgatgatcctgttcctttaccaartgttaatgcagcaattctraaaarggycatycagtggtgcacccaccacaaggwtgaccctcctcctcctgrggatgrtgagaacamagagawgcggacagrtgatattcctgtttgggaccargaattcctgaaagttgaccaaggaacactttttgaacttattctggctgcaaactacttagacatcaaaggtttgcttgatgtcacctgcaagactgtggctaatatgattaavggraaaacgcctgaggagattcgtaaaaccttcaatwtcaaaaatgactttactgaagargavkavgcccasgtwcscvmagagaaccagtggtgtgaagasaagtgaactgtgcctgtcactgtaacactagaasggtkgttccamatgctwrtkgmctgstcygtttatamttgktatattagaratcagtagacaacamagscttgkyctyaytgsatgtgtwkttccagwmcagatcagacctgtkgstgaktytyywtkacasaarttytttcyycmtatccgatawcggaywtggtcctsggacggcgttggktccccttgraggattccscttaggcggatatgggctagggcgga

SEQ ID NO: 1585 - DNA, 1286 bp, Rattus norvegicus
tttcactcatgcatggccacagcatctctctctagtaggctggattatcattctctctgcccttttgtatgtaccgagaaccacacccatgccattactgtracattccmacaccttgatctgatccgatctccatatcttctyttgscagscttthcctgsgctycctcaaatawgtatctgacgagactctttaattcccaactccatgtgtgtgcgagcacgcgtgtctgkgtctgkgtgtgcatagktctgkgattttagacatkctttcttgtagtgcttctgcaaagggacttttttgaattctcagtggcatttttaarggaaatatgcagagtggatatctgggtgggataggccacaagattggattttggttycacttggacaactaacaatatttgtagagtgatttcadgagagagcaggtctraggaatatgtgargctatagttactgwgtgggccactggkgaggkwacgattacacagataggcaggcakggtggcagtcacctyccctgtscacgtggattcatacctgtcatcgtgtaagtcagagggagggatctgarscctgtgagtgatgtctggkacactgtggagtkttctycagagaagtggsctaagcccycggttagccragaaagatggaaagcaaagcgccaggyttcgctctacagagagaaagtgctgwccctgaagcatctgagtccacttaccagacacccaggcatcwgcaggaagtgcctccyggwctgakggagagcggttctccatccytcggtcccagagaacagagtgakatttgaaaawgccatcgatgstkasggktttatyggkgaaragraaggmccgttagcacacaccatcatggtaaataagtggagcytaagtgtcagcagacatgatgaaagccaagtcacyttgaagktgacttttctgggaaggtcttargcatgtaatrtcccttaataggagggaaagggacaatctcagggcasccttgtycaggtagaaatatttwgcccccctgtctsttgttggtkaggggtcacaccakccagggagaccctytgggaagaarctgccacacacaaggactytggaaggatccasatgtgagcccagccagggtcatacggttcccaacctgaggaaaaggtttttcacacacwccttgctttytgytgagataagaaaggtgtcactctgcagagtgtgacttttyacaggttaaataaagctgtatatgtctcattgttwaaaaaaaaaaaaaaaaaa

SEQ ID NO: 1586 - DNA, 2008 bp, Rattus norvegicus
ttttttttttttttttttywtkkttcycyttctttttwattttttattttttaaaaaagacagatttaggatttggtaagaaagtactgagtcacactttttttaayckgtgaagtgctacaataatggrgtaaataaataagatttgtaagttcaatgtttacagacatattataaaaaaatgactgaattagaagacagtgagtaatgttgatacacaccaggaagggatctgggcaaggaaaggcacatcatttcaccacaagaaataaagacccacaactggaggtcagtaggtggccacagctttagatcttgtggtggtaggacccccagctctggggggtcratattgataggacctcccatatagtacycagctgggacaaaacagttggggaattggctgtgattcttctccgttaaaaagaaagtactctttaataagcctggtgtgyccakatggggggaggggggagcagcaaaaatccacaatggtttggtggcactgvaaawcctaatgagtttcagttttaaaaaaaaaaaaagtataaccagcttttctcattgaattkaaattytgcagttaaaagctacaatttcaagtaaacatttttcacttkkywydmkdgkagacaatcacagtataagcagctgccatatttcacctcgaatgaagtaatgtaccaragtttagggacacagatgttagataakttcccaattttgtawgcacacatctttakgaacgctggttctgctagctgacyaaatacaggaaagtgattatgaagttctgacagtgataaccgatatcatacagaaattcgtttctagtttcacacacagttactacactactgkrtttagcagrcattagcagaccctgtttggggtcaattttccactgctaatattcttttacaaatctgggtcacatctctaaagttctttctgtctgaactctgactgaacctagatcagtttggtaaaatgamtgagccactcaaagaaarccacatacattttaaatggtatttagtggcactgtatataaataaaaaggacttttagaataaaatggcgtmtccmcaaaaataaaaattaaagacamctgagaggaagacaagggaaaacctcaacagtaaaaaaraaawarwaraaatagtaatcatcggcggcagcctcccttcacgccacacgataagccttcattaaggtgtactccttccggttggtgtggrcagcccagatgaagagagcagaagccatgaactkbhmaggsarytkakwcgcakgccaskcagaakkmycwtsmrmakkmcyywgatacgytcktgsscagccctagtttctgatggagcagctcaatgccagcaacataacaactcacggagcccagcgtacacagacctgcaaggagatggagaatgcctgtggcaatggtggggtacaggctgcggcacacacaggcacawagtccaatcaaagcsccgaagcacatcagacccaagctawcaaacggtaagaggaactggcagcgccagaggtaggtccgaagcaggtcmmtgysactgttgtggtttccaggatcaacatacttctccatgaactgttcgtttagtgtgaaactcatgcattttgtaaccacttcaaatgactctgtcctttccggcggagcataccagtgagtgtttttgggaatggtgatacagcgtctccacaatcccaagttgccgttgtaccggaacagagcatcgttgtaggtcttctcatccgcctcatcgcccatgaaatcttcccaggcaattctattcgcatcactagaattctcttgagcaggactttgatactcataccagaagtctgtgcctatggaggcggccatgtagatggtggagataagactaagcacacaggcaatcacaaaggctgtagcgaaacggttatccattctggcattcagactgctccacgatgcgcccatcctctcactccaccggcttcg

SEQ ID NO: 1587 - DNA, 478 bp, Rattus norvegicus
tttttttttttttttttkyttggytagataatatttattaaacacaggtgggcacagcagcccatcgtctcccaaaagtacagaarctggkttcacatgagcatgtctgcgtacatcacattcttgggggaagagactcaccasccgcgcactgaaaagagaatatgtcggtttagtacctccagacttcgttggagcagtgtttacttctttagttccacaccarggtctaacaawatatgatcttcagatatcagtaakgactcaagaaatgatttttaaagtcttaattgtaaagttcataatgtgtcttaatasgccaaagataccaaactcaaggatacaaatcataagcgagctgaggcagacccccgttgtcaggccgatatcctcacactggccttgacatgagaacagcctgaaattaactgggtgctgcttagtttcaggtactgactcctccctatgctgctggctg

SEQ ID NO: 1588 - DNA, 688 bp, Rattus norvegicus
  misc_feature (535)..(536): n is a, c, g, or t
  misc_feature (662)..(662): n is a, c, g, or t
  misc_feature (673)..(673): n is a, c, g, or t
tgtttgctctctcaacaaagtcctccatcttccgttctccatcctggcccaggcttctctgtgatccgaccttccctttttgttgcattcattcgcactcttcctcaaaactagaaatgctgctcgtggcacagtcctgaaagtcactgcccgaagagaacacccagcacctcctctttacccatttatcatgtgccctggagcttaaaagagttgtggccaatggcagaggtgaagtgtctgagaagttagcatggctgaggggaagagaaaggcatttgtgtccaagaaaggctggcctttggcaggagggaagcaagaatagttgggaagtagtagcttgctgccagtgtatatgtatatgcatatgtatatgtatatgtatatgtatatgtatatgtatatattagttgggaactatgacctgctgtcctcatttggaactttcctcccataccaggcctgtcttgggtcccagaggtctgtttaaagaccaacttcaaatcccttttagaaaaacatcaaacttgcattnntgtagctactggtatctgtcagtacaagattttctggtgctctgcagtcttctgtccttcccacccatgtgcatgagcaaatatgccacttaccttgggatctgcagtcaggtgaagccaagcttnccacattctcntttgttgccatgagg

SEQ ID NO: 1589 - DNA, 1027 bp, Rattus norvegicus
  misc_feature (21)..(21): n is a, c, g, or t
  misc_feature (194)..(194): n is a, c, g, or t
  misc_feature (213)..(213): n is a, c, g, or t
  misc_feature (216)..(219): n is a, c, g, or t
  misc_feature (267)..(267): n is a, c, g, or t
ctggtgttgttgctgctctcngtgtgctggctgttagtgtcgctgattctcttgttgctgttgctgtcgtcgtcttctctctctctgtgtgctttgctgcttgcttcgttcttctgcggctctctgtctgtcttctccagtgtgctgtgttctgcctgcgacttcgttcctcgatgtgctatgcttcgttgctnctgttctctttctggcgcngcnnnnaaagctatgccgtgctagacgagcagcgccgtgaccaggggccccccntttttgactccttaaagttgcggaaacttgcagtgtagctacgaccggcgtcagcccatccacgatttcwgycatgatsaagagaggaccgccttctctgtcagtcgtgtgtgttaagtcctgctaactctccagggccttctttgtcgatacsgaccatcagtcccaktcaaagaacaagatacagwacacctcgatgtatttcacaagtttagcacagcacatctcttgtacraaaatccaagaaagcacagaagtgaaagtaccamyttgctcacttataaaacacacatgcatcaattttaaacactacacgagtacacaactgaatacattgcattacaagataaaaaaagcactggatggaaaacttaaaaactatacatgaaatactgcactatgaatctgggatactctaatgtccaaccccacccttacacagccctagtatgggtcagaaactatcaatgtgctcctggacattttagtcctcagagacactgctgcggggggcctgggcgacaagattagcctcccgcagagctctggcctgctccagagcctctctgtagcgggaaggccaagcctggggatccttcttaaagactctggccaggaactccatgatctgcatcttggtgatttcacggttagctctggggccccagaagaactcgtactcgggaggctcgatgtggggcacacgctggtacttcaggtaattctgctggacgaactcctcggtaaaaatctttctcac

SEQ ID NO: 1590 - DNA, 1227 bp, Rattus norvegicus
  misc_feature (46)..(139): n is a, c, g, or t
  misc_feature (173)..(173): n is a, c, g, or t
  misc_feature (202)..(202): n is a, c, g, or t
  misc_feature (210)..(210): n is a, c, g, or t
  misc_feature (467)..(467): n is a, c, g, or t
  misc_feature (505)..(505): n is a, c, g, or t
  misc_feature (622)..(622): n is a, c, g, or t
  misc_feature (639)..(639): n is a, c, g, or t
gcctcgtcctcctcggtgccgtgaggcgtcgcggctttgttacccnnnnnnnnnnnnnnnnnnnnnnnnnnnnnnnnnnnnnnnnnnnnnnnnnnnnnnnnnnnnnnnnnnnnnnnnnnnnnnnnnnnnnnnnnnnnnnatcgcactctcaataggkygwrkwgrgtwhhmsnbbbbbhbykbkwkkdykkwdwbwwkkdwnwtkktdwnhytttatwwatwaawagymmcawwaatcagaadtmhcadrrmccdgttwawtgaratakgraagcmcagtaaatmcaamcgcwtykwbawavccacdsgggcadmaraaatytkktgraacdgtwwtctgargttwamcdgtwwaggtcattggvgtcaccarrgvawwcavagkgcwcacatggactthgcwgccgkkgracragchwgcwhccmaagactgryagtagcaycmaragccbkggmatatgmmaarnvcycybtrggkyhtaratcytrararaymykkwtgtwnacawavcmarwcchahscwcadagcaascycagggagyctscadtytdgsbhtaarkgtwtytaragsmcmydagramytrargtavatgttwycytscttgkkkgsyccmbbcrwncckyamcmmwrgtbwtnymaawcmrgkktactwavctytymwygwrbsgkhcaagggtcacadraawytgkkgkkkbtcagmcammagcksccctagtwmchcagaascarcagwmcttrwgagradtstkgctagctyttkgrkgkycarwktymragggtggrrtartcttggtcgraavcaatgttctaaagaagactgaccmhcaraccytgttgytmyttgaacgaamtgatatamctgccctcccccatcatgtccaarawcgagsaaagcytttgatraagscatkgytkctgkrasctctcmaaggcacttgragagggagtttgaaatcctgacttcagaagcagggctcaragctttgagragratggtgcagascatycagcaaagcagagtcgtctccgttcaggtgcaaacggggtccmctctttaggaggacttccacttccgtctcaacatcccrtacytgctatgcagsaaamcctccatagttyaytcgaatggtmtmcagattgamctttgcaaatragayaaggttttgattttcttttttcttttcttttctttttttttttttttgttacgtccaatcctcgtg

SEQ ID NO: 1591 - DNA, 1038 bp, Rattus norvegicus
  misc_feature (665)..(665): n is a, c, g, or t
ggccccgcgcagtgctsdcsarsgcccmsgmggakaagctgaggtcamsakcagtttgagatattaaaagtggatacaaaactatttacgccatgcagacaattaagtgtgwtgttgwtggtgatggtgctgttggtaaaacatgtctcctgatatcctacacaacaaacaaattcccrtcggartatgtaccaactgtttttgacaactatgcagtcacagttatgattggtggagagccatacactcttggactttttgatactgcagggcaagaggattatgacagactacgaccgytaagttatccacagacagatgtttttctagtatgttwctcagtggtctctccatcctcatttgaaaatktgaaagaaaagtgggtgcytkrsakarctcaccactgtccaaagactcctttcttgcttgwygggacccaaattgatctcagagatgacccytctacwattgagaaacttgccaagaacaaacagragcctattactccagagactgctgaaaagctggcgcgggatctgaargctgtcaagtatgtggagtgytccgccctcacacararaggyytraagaatgtgtytkatgargcwatmhtrgctgccytsgagcctycdgaaacysaammsarmmgsargtgctgtmtrytntraaccrttttctccttcccccctttgctgctgcttcctgtcccrctactgtagaaagatcatttaaaacaaaggaatamaaccatcctgtttgaaarmmwmwrmrwmwwmwwamwcaacaccttagagcaaactctgtattcattctcgatcatgaatgcaactagaatattctcgtgatcagtaatcacattagactggttaacttctgctgctgaatgctgagctcaaacttggctgatcttatcgcccgaggtggcggctccacgcgcccgggcaaaactaccccgagaccaaggaagcgacctcccgggacggctcccaggggcctcgggcctctgtgcttcggaatatcattttcccaccccccgcg

SEQ ID NO: 1592 - DNA, 1031 bp, Rattus norvegicus
cacgagggcgatatctcttaaattggcctgttttactgaacacgarsgswcttsykkcggacgsrvgwkrhkakctwrsyrvwdckgsmctsrsyargaaactagtaacttcctctggratcaaatagaattttataagaacmcaatggatgsmrakrakwmrrcckakggtggctgtgaaggccctgatgccatgtatgtgaaattaatatcttctgatggtcatgaatttattktaaaaagagaacatgcattaacatcaggamcaataaaggccatgttgagtggtccagrtmmgwhtkmrkwgarkgvvrsyrakgaggtcractytagagagatcccttcacatgtgctrtcgaaagtgtgcatgtwttttacckrcamgrkscgctatactaacagctccmctgaaattcctgawttcccaattgcacctgaaattgchctggaactgctgatggccgcgaacttcctagattgttaaatrraataaattmtaataaamwrwwaawwwwwwwmmrwawwwaawammwrwarwwmarwwagtaawttttcacatgtagcatgttgsctgtatgaagytgaactctaaagtgaatcgctgagcaratttsttctgtcattkgcawagcagagttgaaatttgtttgstacatcaacwaattaaggaagtttcacaagccaaaaaataaataaataatgccagtttwwarrwrrwwwdvwwwmwcctttggatgtgacctttawagttatacctgatatagcaaatcctggaatgtaagcgtaaatgaatatattctacaggtaaatacaggggctaaggatttttatgtttttagtgtttttttaakwmccagttctgatcttaagccactgagcattattagaattatgcaaataattayatgaaaaacatgtttataacttagccgaaccttgatttttgtaactcaaagaataagagttgaaatttcttatgtgttttttgataaactgcagtattgtttaarwrmaaaaaaaaaaaaaaaaaa

SEQ ID NO: 1593 - DNA, 906 bp, Rattus norvegicus
ttttttttttttttttttttttaaytkyaaaakcatttaatatgcaaagkgaaaaactagaatataaaagcatttcacattttttaaaaacaaaataacaccttttaaattatttaacataaggcagagatccacaatcttttatctgaaaccctaagtstagatgttycagaatgagaaattttcagattttagaaaggtaattsartgcatacaccatactatatcaaccctsaaaagagtttgtggcagcacaccccaataatcatacacattaatatttatgcaacaaaataaatgaatattcacactaatgggataagcagattcagtgtcagattaraatacatccagaggcaaatgacttttgttatcaagcttatgaaaaccttgttatcagaacttcttggattttgagactataattacagataaaggaatgcagacctttgaaacttgtwtgayaagacataaaagattgtttaaacaagkgacccatttttacaaatgtaaaacatacraccttcaaatacattataaattracaggcatcctctctgtgatattattaaatgtrcaccttaaatacatatacatatagcacaggacacmattcatttatggtcagctgaatatcaaggcrcatatgtccatcccttatatagaaagagactctatcaatgtggggtgaagatgggatctctcctcatggcacagagagactgctgaagcaccagaggggggtcactccgagcagaatctaacattactaagaccgggattacctatacagagcgtggaaaacaagattgcccaaaacaaaaaagcaatacagagaattatttagctccactcagggcggggcacgacaccacccgccagcaaccggcgcaacagcagcacccg

SEQ ID NO: 1594 - DNA, 1280 bp, Rattus norvegicus
  misc_feature (913)..(913): n is a, c, g, or t
  misc_feature (1046)..(1046): n is a, c, g, or t
  misc_feature (1147)..(1149): n is a, c, g, or t
  misc_feature (1151)..(1152): n is a, c, g, or t
caaaagctggagctccaccgcggtggcggccgctctagaactagtggatcccccgggctgcaggattcggcacgaggagagcccgctcaatttggtccagcgaaacgtgaacatcttcaagttcatcattccaaatgttgtgaaatacagtccacagtgcaaactgctcatcgtctcaaacccagtggatatcttgacctacctggcttggaagatcagcggctttcccaaaaacagagttattggaagtggttgcaatctggattcsgctcggttccgttacctgayrskagaaaggctgggagttcatccactgagctgtcacgggtgggtcctgggagagcatggcgactccagtgtgcctgtgtggagtggtgtgaaygtcgccggcgtctccctgaagtctctgaacccgcagctgggcacggatgcagacaaggagcagtggaaggatgtgcacaagcaggtggttgacagtgcatacgaagtgatcaagctgaaaggttacacatcctgggccattggcctctccgtggcagacttggccgagagcataatgaagaaccttaggcgggtgcatcccatttccaccatgattaagggtctctatggaatcaaggaggatgtcttcctcagcgtcccatgtatcctgggacaaaatggaatctcagatgttgtgaaggtgacactkgactcctgacgaggaggcccgcctgaagaagagtgcagataccctctggggaatccagaaggagctgcagttctaaagtcttcccagtgtcctagcacttcactgtccaggctgcagcagggtttctatggagaccacgcacttctcatctgagctgtggttagtccagttggtccagttgtgttgaggtggtctgggggaaatctcagttccacagctctnacctgctaagtggtacttgttgtagtggtaactgggtagtgtgacattccactgtctccagaacactggcactgcttgcggtttgataaccgtgagctgtgcttgtgggtagaccctacagaacgattcagangcctcatgagctggcgatgaacgtcctaggtcgatgcgtagtctaaagggcgggacctggtggagggataccggcttagcgtaagattgactgacaccgcnnntnngctcgccactaacaacgcgcggagaagaaacagtaacggacaaccatctgcacagacaaagagaagagccgcctgcagccgacgagacaacaggacacagccaccgaccagcgcgcaaacagaaacca

SEQ ID NO: 1595 - DNA, 2440 bp, Rattus norvegicus
tttctcttgatgatctctctggtcattaacattttcccgtctgacaattcaatccttgaaagaggaacgaggacttctccaatgacatcatctcttgaraacctgtcaaaactcaggcckgtkragtgcaggaccagctcttgratgtggggataagggaccccatagaatgtgaaggtttcgtcaamcacggggtccagcgtcttccwcagcactstggttttcactktgtscttsttytctsgtaagrtygtcatcttgatgtatgggtcagaggtcatggaktgttcatccatggctggtaagccctgggcttccktgatgttcaccmcaaatgctytctkytcgaarktgkactctagagacaagaagagmgtgcccagcttctcktgtttctcctctgaagtgagggaagtgctggacttcaagctctcagggragasggcctccttttcsgtctccggaaagagctttggggtgacattttccagatcagaagagctgccagctttgggsttgsttttggggaaattgccattgaggtctcgyttctcgagatcaaggtgcagggaaaggttaggcaaagctgctttacgctttgcttcactcttgtcatctcctccaaacttctttttgctacttaggttttctgggtagatatcaactcctttaagcacgtgcacaaacttgtatggagragtcttgttggacttagcggatcttctctggcagcagatccaggcaaagagagacacagtgaagaccaggccawaagcactgaagatgcccaccactgtgggaatttcatcgaattccacgcggctggtggtgataggagccatgtyttctgcgtgctctgtccgaggtgctgaaagaactccaggcagattcacctggaaggaccctgaaacaaggcttccaggggaaacacgggggatccggggaccggcagcggcagcgggaggggctggaggaaggtccgcgctctctatcagcaatgtgccaccctgcccwgwscwgtkgrgwmytstmaaagckwdyyssggggcgctgagagtccgtgagctgcccagcgcctaaggcctggcttgtagctccctaccccgggctgccggccccgaagtgccggctgccaccatgaatagtgaggagcagtactacgcggccacacagctctacaaggacccgtgcgcattccagaggggtccggtgccagagttcagtgctaatccccctgcgtgcctgtacatgggccgccagcccccacctccgccgmcaccccagtttgcaggctcgctgggaacgctggaacagggaagtcccccggacatctccccatacgaagtgcccccgctcgccgatgacccggctggcgcgcacctccaccaccacctcccagctcagctcgggctcgcccatccacctcccggacctttcccgaatggaaccgagactgggggcctggaagagcccagccgcgttcatctccctttcccgtggatgaaatccaccaaagctcacgcgtggaaaagccagtgggcaggaggtgcatacgcagcagaaccggaggagaataagaggacccgtacagcctacactcgggcccagctgctggagctggagaaggaattcttatttaacaaatacatctcccggcctcgccgggtggagctggcagtgatgctcaacttgactgagagacacatcaaaatctggttccaaaaccgtcgcatgaagtggaagaaagaggaagataagaaacgtagtagcgggacaacgagcgggggcggtgggggcgaagagccggagcaggattgtgccgtaacctcgggcgaggagctgctggcattgccammgccaccacctcccggaggtgytgtgccctcaggcgtccctgctgctgcccgggagggccgactgccttccggccttagtgcgtccccacagccctccagcatcgcgccactgcgaccgcaggaaccccggtgaggaccgcaggctgagggtgagcgggtctgggacccagagtgcggacatgggcatgggcccgggcagctggataagggaggggatcatgaggcttaacctaaacgccacacacaaggagaacattcttcttgggggcacaagagccagttgggtataccagcgagatgctggcagacctctgggaaaaaaaaagacccgagcttctgaaaactttgaggctgcctctcgtgccatgtgaaccgccaggtctgcctctgggactctttcctgggaccaatttagagaatcaggctcccaactgaggacaatgaaaaggttacaaacttgagcggtcccataacagccaccaggcgagctggaccgggtgcctttgactggtcggccgagcaatctaaggttgagaataaagggagctgtttgaggtttcaaaaaaaaaaaaaaaccggaattc

SEQ ID NO: 1596 - DNA, 753 bp, Rattus norvegicus
gtgcgcgcgccagctcagttatcctcttttcgttgttcggccccttgtgtcccctcctgtgtggtgtttgtgttgtgtcttgtgatttttttttagcttcactcgcacgtgatttaatggagtctttgcttatcgatacgaaggataacatgccaagacatgatgaaacggaaatgtcgaaatcacattttaggttaattctcatttaaacctttgctataaaacatatggcaaggccagaagaaaccaaaccaccagctgcggtgaacymagractskctkagtaattyscagtctcagatgagcammcwmcatwtgkatkagtcarcraykttctcagaycttctcatawwtmctggtgcagaccacacccttcattatacattscactaccattttcccatccagcaactttctctttatggttgtctctttaccatcmcacttctgcacttgcttcaaggagcctctctccagcgtcacgatgctcttggattttctgttgtcagctgtagtttcatcaamctcctggcccaacttgaaggagatctctgtatttttgaaggcactytcagttctaatggtgatatagtctcccktcwtsctgatgatcrcactaggcttgkccraatttccaagttttctgttggctaaccccacgcctagagccttcatgtagtcatcraagtgctcgctgragacaagtwtccaggtgcctaggaatttgwtactcrttgtratgsatgaggagag

SEQ ID NO: 1597 - DNA, 616 bp, Rattus norvegicus
tttttttttttttttttttwwyttggagattaccaaagatttatttggaatgacacagcactgagaacacaactgttacagatggtttgtggtacagcatacatcmcctcgttcattttagaatgatctgtgaagatgagttgcataaatagaatgtgraagtatataggagcttttgtaaataggttctttagccccctcatmcagccaatcatataaaggcagaaatgatgactgcatagttgctggtccatggatttactggactgagcarctgggcarctatacaaccargccctgctctctccaaaggggcagcagcgtagacactgtatctgttatatcatcctgaaaactgcacacaacacacacagacactgtcaactaactgttttggcaatgggatgagtggttttgcctcaaggcaaaactgcagctgtaatgtccacgaataagagcaatgcgtgtatcaatgacgaaggcgaagagctacagtggaaagggaaggaatcagctatgtatatgtagccatctgcatacacataggtccagcaggcatgggaactagcttstgcgactcgtgtgtccgtatagatgtatatagaggtgattggaa

SEQ ID NO: 1598 - DNA, 1851 bp, Rattus norvegicus
gwttttttkktttttkttaacagagaawkwtwkkwtttwtktatgktwwwwwkkywhkydwwtgamgctataatktwattkcattattctttagtasatccacaactwtttccacytaaatagatctttaaaataagcatacacaagtatcgactattatctacaaatatttattgkaacacttgaatagaactacaggaagcccttggcactgatagamaatattgattcactgttaggttacaaamatttawacatagcaaaatttaatgctctttacataaaaaatattagactacttcaacaaaactttcaaaaattcctggcartagctaccasaattagaaaagtaaaattaggctttagacactggctcttctagaacactggactctaacagcacctccactgctggaaaaaatagwgaattctgtcatgcaacaggaaaacgaaacactaagctatcttggracagstgttctacacagaagagagsgsctcccaattcaaaggaacccaaataggtgttttccgcattcaccaaaagaaaaawwtyywwwtkwwwtwttakagktgctgttcaattttaatagcatcttcataaaggtatgcttccttkcatttgaatacatttctgcacatgtatatgttttaaaatccaggaracagccaaaccacaagttawctcktaacatgaatatrcatagtthmcmstatagtaygcagcccctktgaamagcrctgatscwcvbsacagttakatggatcrttcsagraagamcaacrcwaaactyascatcwctartacmcagtacctattagtcacttaatgttctggaacacaatgagttagaagrcaagtttcttttgaaaatggcttaaactcaagcagttttcttgctgaatatcaaacattattattccaggaaattaagatttagataagaaaacmatgaaataaatatcamccytawtttmcktatgtattaaagtctataaaagtasgaggtcasaggtctgtggtcaatttgcagttaggttttagatagttgataggaaactgtaaactcactgtccagaccacttaaaaatggtttagaatggtggtcattttaacaaggtaacacttcttaagaaaagtattcatraaacaaaaatctatgaaggatttttgggtttctggttacaatataaattattagaaattgaaagcaaatattaaggcagagctgatatttgtttccaaacaacaatggtgatcaccaaatcctcccattttgttacartgtgatcgactataaamctgwtttygcagakctcgagtcagamyccagcttckscaytgataaatttagcataattacagctcatttkagcatcactaawacatagktttctgagtgkcttgggawatgaatatgacaccgtggggstsctgattttwaagtttggaagaatcacattatctktgatgagccawaggttwataaaggtcagctatcaamacgaacttsacattgattctattttgataacactggaggacacagktggcaaatgtaaatctacagtcacgtcctttgatactggcatgccataggtccccattaagggacatgatgtgattccatgccctgtgttagaactgctctagcagttacctgcacatgccacgaccttctaaaggatgaatggtcattctgccaaagtgttgccttttaaaatggttaacatgaaacctccgatatttgtcctaaagaaaattatttacccactggaaggttttcctagagatccaccccagcagcttgagacagacagtgaaatgttggtacgtctacattagtttgg

SEQ ID NO: 1599 - DNA, 1460 bp, Rattus norvegicus
tttttttttttttttttggaaggcaaagttttttgttttttktttttttttttttwaaaaaaagccacatggtttggtcccaggtgstctccatgcctacagtgttactgtgattaccacctctcctctctctaccaktggctargcakaggttggggagsagggtcatyttgggcatgctgcaaatacascatttgctggtgttgacaccctcctggggctgtggtagcagactgstgtcaggagcccaattcctgggagcagtagggggatccaggacctccagtcagcccacacacctcagtggggtaccttgccccttttctccagtacagttcagcattgaggttgtctattcccagtcggcaataaaacctgagctgttttcctcataggttccamccttactccccaacgtargggagtagkgagagggaatgtcgaggatcactgagggggcaggggaattccccggggatcggtracttggysctcctgcaggttcttcacsagttgtgcaagccagcgtttggtggtggtgtcatcttttarcacctgggcaaaggttgtgtccttcagctsgtsagggargcactgtctgagtgcttcacgtgcmctgggattatctgagagtcgarggtmacatcttactacatgcttcagcagackggyagatggttctttggatwsctgcaggaccattttacccwrkwtyayssmaamawrrrraaaamrctcatatgtctgacatatatarsccagaccagtgtcatctaagaggatcttctggaggatgaatgtggcaaccgttwtagacagttcacttccagattccatgatgcgcaaacacaaaggggatgatttctgttgtcaataaaragttgattacttcktgctcatctgttttaaccaaggccccaataactccaaggctggtgagccgaagatattcaaagggacgagttttgctgactgtgtgcaaaaagkkgtacaaaaagagtgggatgtgtgctgcaagaaaagctgacctggtctctgggtgtgaggccacacactgtagcaatgctagagcattgcaaaccctgttagattggtgtgctgtcaaggttggagggttgatagatggataaatatttacaatttcctgtaaaagtgctgcaatagtaccgaatgaatgccacagcatgggcgcaaggtcagggacagactctcgcttcttgctcagctccagcaaagcattttcccttgtttcaggactggacagttcattgatccactgatagatcttctctctgtccacctgggccagtgcagtaggcacaggcgctgccgttgccaggctgtgcatgttgggagcgggggccgctctacttcttccgctggacgcgccggacccgcgtcccagctttagtggctctgcagccgaagatgaagagccgccatccgtctccggctcgctc

SEQ ID NO: 1600 - DNA, 1186 bp, Rattus norvegicus
ttttttttttttttttttcgatttaactgacatttaatggctcagggttacaatttccagacgtgaccccacagtgaggtgctgttcacatcagtgcaggctgttaagttaaaacacmrgmmgammrgtkytgwgtttkakkkkaatccactattaagcataacaacaacttcacagcaaattaaaataaatactcataacctctaacaatsrgaasywcsyrcmgggaaaatctagttcagtagcagcactcgaaaagyagacagtcttgtaaacacagcagcttgaacaggggacacatggctgaaccctctacactagggagaaagggagaccggctcargctgccaccccgmsycktscmggcaaagggggacacacgatcdcrkrcckcagactcaactctggctgggcgccaaggctgcaaggaatgatgactaagttccccaaatcagcaatgcatgcaaccagggtattcgagggcagctcagcagaataagagacgtggtgtgttttatgttwatgtattcctatgtagagcccagagaacaacccatgagaactggcctctcctcccatcgggtgagttccaggaatcaaaatccgccttgatggcaggtgcccgtacctgctgaaccatcttgctggccccgtgtgtgattgacacactgcgacagagaggctgaaagcaggggaggtctacgtgttaggtcttcctcttactagttcaagcattagtgattagttctcagtgtggttcttctagatgctttgcgatggaaaagtctttacgaggaaccttggagctttgggcttaacttttaaccagtgccccaaacagaagggaagagatcagtagccaatagctgacgtgagggaaacagttacttctagaggctttcctcaccctgaagcatttaccatctgcccagaagttctgattccaccgtctccagtggcccatgtgcaacacgacttctgtcccagaaacctggagcagggcttccttgtgtggccatcaccgtcgacgaatgggcttgtagacacagaacgccataaggaccaccgtcaccagcaggatgctaaagacggttcccatcaacaccaggttctgcccccgcagcaccgtgtagggccggcttcgctccggcggcaccccggggctcggggcctcggcccgtcccag

SEQ ID NO: 1601 - DNA, 1226 bp, Rattus norvegicus
ctcagttgaacacattgttgaacccgaagtctcgtggacaacacagttatgaagctgtaccatagccgcactaatttcaacggatwktwytkwywkttytktdwwwwtkkkccyaagrwagaatttgtttttattdacttgtggttwtgtttttctrwkacaggctctcattctgtaathtacggtaaactcacggtagtcctcmtgctkcagackwakgaggagtacagaagtgatgcctarcmcamaaaaggatktaaagwagatttgagtgattakcaracccagaatcagkttgcmcaggtaaagagggcagakagggaagggggaaccaagcatgttcagggagaaatgtgctcctgtctccttaccacctgagcagcasgktcawatgtgcacttctctcgctcactgtagragcactgttctgaccctgsatgtttctggcctcgtcttctkgtgtgagcytmrwsctcggcactccacagtccatgacaggagtccastcagcagacacctactcacctywagtgscagtttcgctcctcaayctttgctgtctctaggatgcacagtgtggctaaacaaggcagaggttcttctgtgagacggtaccaggaggctcaagttgaagggtggtgggaakwwtwywwywywkwkttcctttgtaaactcagtcaagtgcwywykkttywywtwytytcctgggtataaacaatttacacgaataaatttasatcagsaacataaccaaaacaatgsmcaaccaaattctaatgtgacaactaaggagtggacagtgccctgatgagttcatgagtcagagtcacctagcacagggctttagacagtaagtcagtgacaactcccagtaggcaagtcccctcgccagtggcatttagaataagcacatagcaggagagcaaacagcatgctcactagtgcagagtactgactgcgtgggggagcactgcagctcacagcgctgctgcccacttcactcaggtcactgagtccttcttcctcctgaacggtgacttcagcctcttccacacgctgcttttgggcttagcctttttctccatggccmgtrcyramtycttttctttcttacgaatctcccgtacgagagcatggaaaacgtcatcaatgtagtaacgataggcagcagaggtctcaaaaaagggacaattgaattctcgagccagagacaatccctcttcctt

SEQ ID NO: 1602 - DNA, 795 bp, Rattus norvegicus
tttttttttttttttttgctcttgcaaaacccaaaggatttattatataagagttccagaaaaaaatggagattatgcttaattagaatttcataatgaaaacatacagaatctgggtcttactgaaccaaatcctctataaaatttaataatcttatatttcttacataaatcttcttaatgtatttataatatgatgtttttaaagtatccagtggtatctgagaacatttatagaggttgcaacacctaaaccctctgaattataatgatttatttatatgcctattttgaataacttataggataatcagtttcaagatcttaatcataaatattctgatagtcctttctagatagtgactgaaactaacacttaataaattaagaagaaaacttgtcaaggttgaatctatgcctggcaagaatcagatttcggaactgaaaacaagcaacttcacacagcactaagcatgatgtgcgatccgcacgggtgacttatcaatgtaatacctcctgatcagcaatgacatcaacagccactctgcctaactctacttccccagtgtctgctactcgagccgatgaacctgtggataattgcatataatccagttagaactggtctggttgaattgtaaacagagctgatgaaagagaagcttattttgtagtgcctaawwagactatcacttacgtcaggagacagcacacagcagccatttaagatgctcagtaagctacagtacaaaccggcatctacgctksctagmaacaatgtctttcaccctcgtg

SEQ ID NO: 1603 - DNA, 893 bp, Rattus norvegicus
  misc_feature (773)..(773): n is a, c, g, or t
  misc_feature (785)..(785): n is a, c, g, or t
  misc_feature (861)..(861): n is a, c, g, or t
  misc_feature (878)..(878): n is a, c, g, or t
gctgtaggctaggcggctgaggagcccggggcggggcgcggggcgcggggcgcgggcgggtcttcgctggttactggtcacaagtggcctgacctggctccaccctcggtctgccgggacaagtttatcttgtgactgtcgggctgctttcccttcctagattgcrcagcgttcatgcccaggatgagcttcctgacccccacgatcctgctgctggcgctggtcgmcgccacccaggccgagcccctgcacttcaaggactgcggytctaaggtgggmgttataaaggaagtgaatgtgagcccrtgccctacccagccctgtcagctacacaaaggccagtcctacagtgtcaacgtcacctttactagcggcactcagtcccagaacagcacggccttggtccacggcatcttggcaggggtcccagtctacttccctattcctgagcctgacggttgtaaatgtggaatcaactgccccatccagaaagacaaggtctacagctacctgaataagctgccggtgaagagcgaatatccctctctaaaactggtggtggaatggraacttcmagatgmcaaaaaggvtaacctcttctgctgggagatcccagtagagatcaaaggctaggctgcttggtgccctgtgtctgtgcagggtgagagtacatcggcggagggaggtgaaggtagtagaatcagacctgcaattgagtcggtgccataagacgaacagaaacttcagaatgctgctttatgcctttcaggctncaaaacataccntgcagcctactactcttgagagccagagccatggccccctgagatagccttatgttaggcttcaggaggggaaggngagactcgagagattanattagtgtccatggc

SEQ ID NO: 1604 - DNA, 521 bp, Rattus norvegicus
ttttttttttttttttttgaggtggaagaattctctttaattaaataaattaatattatttcttatcagaataaactgttaaatattgctatgacgaggcccgaggctccagagctcctgctgtagaaaactttgttccagccatggagggactcgggcggtgtctgggggaaggtggctgagcagcatctgtgtggagtagaacgggtgggcctctgagagatgcttcccacaggagtctgtgggaaacccagaatacccttccccctcagcagaaaagacaaggacagtgcttctgtggttccctgtgagtatccaggcaggggcctgcagggaggacagtgcttctgtggttccctgtgggtctcctggcagtggccttcagggagacggtatcctgcctgtgatctgacctgtgacctcattcacttgcacgtatacatctctgtgcgctcgctgcatgtgttacacttgacgtagcagcaccagtggaatttgcagttgcactgccacacccgggc

SEQ ID NO: 1605 - DNA, 1484 bp, Rattus norvegicus
tgacttgaggcggaagcacagcttttggagctgggccgcgggaccgctgtgcatcagcccatggctgcctactcctaccgcccaggcccaggtgctggccctggccctgctgctggagctgcactgccagaccagagcttcctgtggaacgtcttccagcgggttgataaagacaggagcggagtgatttcagacaatgaacttcagcaagcattatccaatggtacatggactccgtttaatccagtgactgtraggtcaatcatttctatgtttgaccgagaaaacrrsrcwggtgtgaacttcagtgaattcacaggtgtgtggaagtatatcacagactggcagaatgtcttccggacctacgacagggacaactctgggatgattgacaagmatgagctcaaacaagcactctcaggttttggctaccggctctctgatcagttccatgacatcctcatscgaaaatttgacaggcawggacgagggcagatcgcgttcgatgacttcatccagggstgcatcgtcttkcagaggktgwcagacatattcagacgytatgaywcggaysaggatggctggattcaggtgtcttacgagcagtatctctccatggttttcagcattgtataaccaggccytgtgaacatccagcacggcatgcaaaaaactgragatgccaaattcsttacctgtgctagaacagggcatggctgcagtgagacgctgcccttyccsktgactgtatagmtaaytyktggggacctggctgtacatatgtgaatactytggtcagtgactctgtagtggcaatctagctccaytgttagaacacagacgttgggswygskgactgattgtvccatgaggtgagacctaataatggttcaggattstgctcccaaactatcatgttcttttctagatgcctctaattctgtagtcgagatgctctccttasccaatagaatgttaatataatatggaacttgcamaraarrmdwwwmawrwgccttactttttaaaacgaaattttatccattggaatatgtaacrtaagcaataaagtaatgwtwcrrahwrwvwmrwwwwrrmwrrtttttgttttgttttgttttgctttaactaaacaggtggaagaaatgtaccctttgttaccactctagttgttgtgtgaacatgggagagtgggacctaaaaataacgcagactgaagtctcacacaatagccaattttatttagagcatcagaaaatgtatactcttgagtgtgaagaagaatcacatgcgagatgttcaatcacaaagacatggcaaaagcatgttttttctgtgaaggcacatgaatgacagctgctgcagtaaactcctgtctgccatagctgggaaaagcacaacaccacatccaggaccaagtctatgtatgaagaacaggtcgtgtagcataaacaataaagtgttgatacaaaaaaaaaaaaaaa

SEQ ID NO: 1606 - DNA, 890 bp, Rattus norvegicus
accccccccacagtccatcccgtcccatgcctcaggtgacctaggtcttttggggagaggaagggagcagggttgccacatcccacccccttctttttaacacacatacacaacctactaaacagttgtaatcgtggcactgttcatagagggttagggaatttgtggtttgsrsygmgatgcttttctttcttttttcctttttttttttcctctgtccatgtgccattttttaactgatacgcttgctagagagttcagctagtcggaacgccagggaaaggcgacagaagttggtggccccacgttattgcataagctaaagcagcaaacacccccaggcgaagttttctcttgtttgtgaatagcccttgcagagtttgtaaatcrgcagatggctccccgacccctccttgttttctccagagataatgtgctatatttttgtatatacgataatatttgcaactgtgaaaaaaaaccaagttgtgctatactcccgtggcacmgtcacaaaatattrtactaatatgctgtacattcggaagaatktgacgatcggtatgttttagattgtattttgccttacaggaagcctttattgtaagacgctgacttccctttggacttgatgtatattgtacagttacmgtaaaattcaacctttattttctaattttttcaacatattgtttagtgtaaagaatatttatttgaagktttattattttwtaaaaaaagaatwtttattttaagaggcatcataaattttgccccttttwtgaggatktgagggttgctgcaaaggrgaggttacagatgctwtgttcaatwtaaaatwgaaaatwtwttaacgtttgawwttaaamwrammwwrwwwwrtcttgttt

SEQ ID NO: 1607 - DNA, 710 bp, Rattus norvegicus
ttttttttttttttttttcggagctgggttgatgatgatctgtggtggctctgatgacagcagggatgaactgcccatcgatgagccttccatggtcgtaggctggaagcctgggccactcctcaaacttgattctctggtagtgcctccttgtgtacagctagcctctctkaargrcacagggcttgggtgggaatctggagtcaagtgccaggaatgcagggtagcaragaggccaggaacactctcatcactctccactggctggttgggacttctctggagttgctggscagcctgggctggagctcttgtggtcactaccagaggctgccatggttcatccccactytgggcactgccagtggtggacatgtaggagttctcctgtgggraaggagagccatggccggcaacctctagcttccaggraggtactgcctgaagcccttctagtctcttgtatacctgggtcatgggtggcctcttcttggcccgacggtgcatgcagcagcaagctagttgagccagggccaggcccaactggggtgggcagggcccaggtctggagtccaggtgcttcttatagatctggccagcaattggaccagtccaagcatccgtggctacacccatccacaaagtaggctgggtcctttttaaggtcactcccacctcttcagcctcatctacaatcaggtctttcaaat

SEQ ID NO: 1608 - DNA, 845 bp, Rattus norvegicus
gcgggactagaagaaacggcggccgggagggggctacgggatcatggggcttctgaccattctgaagaagatgaagcagaarsagcgagagctgcggctgctcatgcttggcttggacaatgctggcaaaacaaccatcctcaagaagttcaatggagaagatgtggacaccatctcgccaacactgggcttcaacatcaagaccctggagcaccggggattcaagctgaacatctgggatgtgggtggccasaagtctctgcgctcctactggaggaactacttcgagagcacagatggcctcatctgggtggyggacagcgctgaccgccagcgcatgcaggactgtcagcgagagctgcagagtctactggtggaggagcgcctggctggagcgaccctcctcatctttgccaaccaagcaggaccagacaggagcacagaccctgtacacgcgacaccaccgaggcccctagagctggactcccatccgcagccaccacaggcgcatcccacggcgcagcgccgccacaccggacgacctgcagccatgccatcgacaggctcctccactgacataccaacacgcgctctatactgcccgcagaagcgacaccacgtacccagctcacgcctaagaccagacctcaacgaaccagcggaggatacgcacagcggccgacaaactccaaccacaggacgcgcagcacgcaccacgagacctcaagagagtaccataccacaggcggacccaccccgacacggcgcgagccggaccaacggggcaccgcccgaaaactcccgcccaacccacatcagcgcccaagggggccgaaccgtacgcc

SEQ ID NO: 1609 - DNA, 1146 bp, Rattus norvegicus
caaaagctggagctccaccgcggtggcggccgctctagaactagtggatcccccgggctgcaggaattcggcacgagctcrkgsyrcdmgkgmykcgcmcwscktcwsrgccgctgtccccgggaagaccttcgttagcattacgccagytgaggttggtgtcctggtaggcaaagaccggtcaagtttttkcgtgaatgggctgacacttgggggccrgaaatgttytgtgatcckggaytcaytgctgcaagackgkgaatttacaatggatcttcktmccargagcmcygggkkagcccccacsttcaatgtcrctgtsaccatgactgccwagmcgctwgtcvtgctkatgggcaaagaakgtgtccmcggtggtttgatcamcaagawatgytatkaamtggcctbtcrcctgcggcgttcccagtactgacbtcwkytgtccyttccsccwccgctccctttggcttttgcaccccyktctttccwtacacacacrcrccattattttktggsccattaccccatttcccttattgctgccawadcmacatggghtgkggvytsggdmtgrwtgvrcdratmcctccccctasccatamcccctcctgtgtgtgtwtgggaaaaaatwgtktwtgggtttcatwtttgtwthactwwwwywtwgtkywgwkcttwytywytwwtcwgawtaawmamagattctwctammwraraaraamraraagcacaacaatcgmgggggggccggtaccaatcgcckatakgagtgatccatcactggcagcgttcacagtggactgggaaactgagtacccatatgttgagatccccttgcgtggtctacaaggtcgcgagctcaagggaccgagatggtgcggaatagaacgaatgaacggtgcaggaggtataaacatgtctaaattctgttttcagtagttttgtttagacgcagaagagagtaatataagcgaatcaagcgaacgtatagtgcgagaggacgagtgaatggaagacgatagcacaaagagacaagagcagatgaggatagacgaagcacgacgagaaagaagatgacgcaaaacgagcagagacaggaacagaatgagcacaagaggccacaagacaacatatgatgacaca

SEQ ID NO: 1610 - DNA, 862 bp, Rattus norvegicus
agtaattactttgggatgccccttcaggatctggttacagctgagaagcctataccactatttgttgagaaatgtgtggaatttattgaagacacaggattatgtaccgaaggactataccgtgttagtggaaataaaacggatcaagacaacattcaaaagcagtttgatcaagatcataatatcaatctagcatcaatggaagtgacagtaaatgctgtagctggagctctcaaagctttctttgctgatctgscagatcctttgattccatactcactccacccagagctatwggaagcagcaaaaatcccagataaaacagaacgccttcatgccttgaaagaamttgttaagaaatttcatcctgtaaactatgatgtattcagatatgtgataacacatctaaacagggttagtcagcaaaataaaatcaacctaatgacagcagacaacttatccatctgttttwggccaactttgatgagacctgactttgaaaatcgggagtttctgtctaccactaaaatccatcaatctgtcgttgaaacatttattcaaacagtgccagatttcttttacatggagaaattgtgaaactgaaatactgtggatgtccacaactcaaatcaggaaatggggggtcaaggacattcattgcacacctggactcagaatcaccagcgagacgatccgggtataccgagtgaggatgctgaacgtcaacactcacgcgtagggaaagatcggcacaaccaaaaacatctgaaagatcctccaataagaaacgagttagataaggacaataatattatattttttcacactatacaccgcacaagaacagccggacacaaacacc

SEQ ID NO: 1611 - DNA, 725 bp, Rattus norvegicus
  misc_feature (4)..(5): n is a, c, g, or t
  misc_feature (7)..(7): n is a, c, g, or t
cccnncnctgttctccctcgcggtgccacctaatactctctctcaggagttgccttatccgtcaaggtgcacgttttgaccggtccctcgcgtgtccgccgtttatgtcctctgccatggtccgccccccgtttttctttgtgttgtcgtttgtgtgtgtttgtgtgtttgtgtgctctggtktktkktttkttttktkkwgmcagtttgtyattttaktgcacagattttacctgaaacaaatgcaccgagccgagcttgcagtgcccaraatcttagacactgacagaccatcggtgtttacacccatgaagccarattcarcagtacaacttatgctaaacmgcwctgcytcaagatcgctaacagaatggagacagagatwgaaggggagaaagggttttyaaatgtgttawttcaaagcatacgcaaccgtagaattaaaaactacagcatacaaacctggaaactgrgggtggkcagttaaagttataatctccgtactattacttawtgcatattaacgtctgcttggttcakttccttcatattggkgaattgagaatttcaggaaacccgtggttataaaaacgatcgatcttgaaaaagtatakacagaaaaatgtaaaatcacaaactaaaaaaamaragagagagagagacccaasccctcaacttataaaagagaagcttctttcccmctsgwgcsgaatgccccgagttcc

SEQ ID NO: 1612 - DNA, 725 bp, Rattus norvegicus
ttttttttttttttttttyyyywttgacaaattattataatttctcagaagatataaaaatataaataacagctaagagtctgacgtttcgaaccggggaaggatccaaggtgtcacatcggacattaaaggcaggaagataagaacaaaagcatgctccgcccaaagggcatggcttaaaggacagtcacatcggctcctgtgtggagctatcagttaacatttacagatcctccaagtcagttaaatccacggccactttcaagaatagggtgtcgtctttaatgtaggtgttcctggaactctccagagtagaatgagaaacaaagcggggacagccagaggcaatgttcatctccccgtccggtcttctgaagctgctgctattggggtcagctttgaaggtctccacaatgtggttcttcttgccactctgatccaaaagcattagtgtcaccctctgcctgaatggccactgtaatagtgagtcgaactcaccccrcatcaccacaaagtacaaagacaggtgcgttcccttccccgacccatccccgttcaggtacgctctggcacagagccggtagccacagcggctggtatagaaaggctggctgaagacggacactgtgtgcccctccatagcctccctcttcttcgccttgtaatctgccaccttccaaatgagcttgccactgtagcaggcgccctccagcagcttaaaccgt

SEQ ID NO: 1613 - DNA, 918 bp, Rattus norvegicus
tttttttttttttttgktwaaaagccatcactttaatgtaagctcctttacctgtgcctgccctcagtmattcttctatgctgaaagttagcactgcataagcccaaagccagctgcaacttgtatttcgcttctccacacttcagacttcaaaggtccagcactggaggccakagagctgacagacaaaaggtgatggcagacgcatggtgtttgtggcgttcttctcacactgacttaaaacygccaaaggaaggtcaagaagcacagtaggcctgcagccgcatcattgtcagctgctaacctcgtgtgcttagatttctaactcaggtggtttcctcctcaccacggaggagggcttgaacactcagccttctccaacagtaacaaagaaccctgcagtgtgagtgccctgcarctggcctgtgggctgcccactgctaccgctgtggggccaggtctgcctcatagccctctgtcttcatgtcattgaggccgagctcctcattttggtcaaaggagcgcttgtaccgctctaccttcatctccgggtcatcttcaggtgcatacacgttctgcagggccaagggggacaatcagcgcccgtgcatcccgccatcccctccactgctaactctcaatctcctagaactacgtaggatttgtggggtctctagagcccatgactacatagtctacaaaagtgtgtgtgagtgtgagtgtctgtgtgtgtgtgtgtgtgtgtctgtgtgtgtgtgtgtgtactagtagcaaacccaagccactgtacatggtatacaagtatttaatcccccagttctaatcacttttatatacgggccttcctataaaaatgtagcccaagctggtgattgcttataatcccagcactatggagactgaagcagaaaggttccc

SEQ ID NO: 1614 - DNA, 783 bp, Rattus norvegicus
tcggcacgaggctcggccgcaggggtcgkaggtcagggcgagcryswsscgggccgaaggaggaagatggcggtggaatcgcgcgttacccaggaggaaattaagaaggagccrkagwasccgatcgaccrcgagaagacctgcccrctgctgctrcsggtcttcrccaccaacrwcgrccgccaccacygaatgracgagttctcccgcgggaacgtgccttcgavcgagctgcagatctacacctggatgsatgcarccttgaaagarctgactagtttagtaaagsaagtctacccagaagccagaaagaagggcacgcacttcaatttygcaattgttkkkmyggaystyrmmwgmccygrvyrycrwgkymrmgrgattrgcwgcaccatgtytggcaggaagggcactgatgactccatgrccctgcagtcacagaagttccaaataggggattatttggacatagccatsacgcctccaaatcgggcaccaccttcgtcagggaggwtgagaccgtactgaattttattgactttcttgaagttatttttcagccagtttgtaaaataaasttacttaatcctttcmwmmmmmvramwwwrmmawwaarmmwwtaaatgttcaatgaattgtaacatttatttaggaattagaattggatgtactttggtatattaaagaaagtccatatgttttaarmmmwwmwrwaaaawatgrwgaaaaaagtgctcttagcattctgtataaagcagtactgtgaaawamawrwrttcattt

SEQ ID NO: 1615 - DNA, 992 bp, Rattus norvegicus
  misc_feature (825)..(825): n is a, c, g, or t
casgtttcgagctgtgctttcgctttcmckwsccgctgcccaccccaggctcgcgtgckgcgttcagcsccggctctggccatggctacactgagggtccatcctgaagcccaagccaaggtsgatgtktttcgtgaggacctgtgtartaagacagagaacctgcttgggagctattttcccaagaagatctcagagttggatgmcttcttaaaggagccagctctcaacgaagccaacctgagcaatctgaaggctccattggamatcccagtccctgatcccgtcamggagaaagagaaggaggagcggaagaagcaacakgagaaggaagagaaggacgaaaagaagaaaggggacgaagacgacaaasgtcctycctgtggtccagtgaactgcaatragaagattgtggtccthctgcaacgcctaaagcccgagatcaakgatgtcattgagcaactyaacctggttactacctggttgcagctacagatacctyggatagaggatgggaataattttggcgtggctgtccaggmaaaggtgtttgagctgatgaccagscttcataccaagctgkaaggcttccaaacgcagatctctaagtactyyyycgaraggggtgakgccgwgsccaaagcagmcaagcagmyymatgtgggtgattatcggcagctggtgcaygwgctggacgaggcggaatmccaggagayccggytratgstcatggagatccgtaacgcttatgctgtgttrtmysacmycatcstgaagaactttgaraagctcaaraagcccygtggaragmcaaaggggatgatntattgasccccctctstcgttvtatgatgggtataacagaamccttcctactcttgaytaggaactytagactgcacccagthttyttcctgvtggggtctcctccctswsthtgccttccamacmcaataaatacwtwkwwrmcshmmmaaaaaaaaaaaaaaaaa

SEQ ID NO: 1616 - DNA, 829 bp, Rattus norvegicus
ctgaaacccaatggcagaaatgtgcctgtcactgaggagaacaagaaggagtatgtgcggttgtatgtgaactggaggtttatgagaggaatcgaagcccagttcctagcgcttcagaaagggtttaacgaactcattccccaacacttactgaagccctttgaccagaaggaactagagctgataataggcggcctggataagatagacctgaatgactggaagtccaacactcggctgaagcactgtgtggcagacagcaacatcgtcaggtggttctggcaggcggtggagaccttcgatgaggagaggagagccaggctcctgcagtttgtgacaggatccacacgagttcctctccaaggcttcaaggctctgcaaggcgcggcagggccccggctcttcaccatccacctgattgacgccaacaccgacaacctgcccaaggcccacacctgctttaatcggattgacatcccaccctatgagtcctatgagaagctctatgagaagctgctgacagcggtagaggagacctgtggctttgccgtggagtgaagagcagcccgtggccacatagtcttgctcacaaccaccagacccaaagcatatggcgtctgcgcgcctcccgcatggcgggcggaggcctgagattccagaaaccgagggaaaaggctcgtctccctcctcctttggagaaggcaggccaggggactttcataggtggctcccacccatttattcctcctttattatagttcgcccactcctccatcacccatccaataaaacgcagccaggtttcgccctcaaaaaaaaaaaaaaaaaa

SEQ ID NO: 1617 - DNA, 2475 bp, Rattus norvegicus
ggcaacaccgcgacctctgaacccgtgcctcagagacaacaccgcgaccctctggcgacctctgaccctgtgaccctgtgtggtgtgacctcacgaccctggcgccctcagcggtgacctttgaccccgcagcgaccccgagaccccaggacccctgcacttatccacaactctgggacctccaaccccgcgaccccaacagcgacctctgaccctggtgaaagcaggagaacccgggacaccagtgaccctgcaacttctgaccccactaagggcaacaactctgagactgtacggtgacctctgacctctgaccctgggctgttcccccgagataacagtgaccccaggaactccaactcagctacaacctggtgacaaccaaggtaacccagggacaacctctgaccccttgaatccacgacttttcacccagtgctgaccactgcagtgtggggcagtctgagagagtgcgtgacctttgatctctgacctctgaccccgacccagccttgcccacaggacgatgctctggccctgtctccttgccctgctcctctcccagctcaactttctctgtgctgcccgtcctggccctggacctaacttcctgctcatcatggctgatgaccttggcattggggacctaggctgctatggcaaccgcacactcaggacgccacacatcgaccgcctggcccttgagggggtgaagttgactcagcacctggcggctgcgcccctgtgcaccccgagccgcgctgccttccttaccgggcgctaccctgtgcggtcagggatggcatcacatggccgcctgggtgtattcctgttctcggcatcatctggggggctcccgcccaatgaagtcacctttgcaaagttgctcaagggtcaaggctacaccaccgggcttgtagggaagtggcatctggggctgagctgccaagcagcctctgacttctgccaccaccctgggcgccatggctttgaccgcttcctgggcacgcccaccaccaacctgagggactgcaagccagggggcgggaccgtgtttggctctgcccaacaagtattcgtggtcctgcccatgaatattctgggggcagtgctgctggccatggcacttgcgcggtgggcagggctggcccggcccccagggtgggtgttcggggtgacagtggctgccatggcggcggtgggcggggcctatgtggccttcctctaccacttccgcccagccaactgcttcctcatggccgacttcaccatcacccaacagcccacggactacaaggggctcacacagcgcctggcaagcgaggctggggacttcctgcgcaggaacagggacacgcccttcctgctattcctgtctttcatgcatgtgcacacggcacacttcgccaaccctgagtttgccgggcagagcctgcatggggcctatggagatgctgtggaggagatggactgggccgtaggccaggtccttgccacactggacaagctgggcctcgccaacaacacactcgtgtacttgacgtccgaccatggcgcacacgtggaggagcttggccccaacggtgaacggcatggcgggagcaacggaatttacaggggcgggaaggccaacacgtgggagggtggcatccgtgtgcctggacttgtgcgctggcccggcgtgattgtgcccggccaggaggtcsasgagcccacgagcaacatggacgtcttccccactgtggccaggcttgcaggggcagagctgccgactgacagggtgattgacgggcgtgacttgatgcccctgctgctgggccatgtacaacactctgagcatgaattcctgttccactactgcaatgcctacctcagcgctgtgssatggcggccccacaacagctcgtccgtgtggaaggcgttttacttcacaccgaacywcgascmmccrgrmtytaakggckgswwskccacacacgtgtgcatgtgccacggccaccatgtcacgcaccatgatccgcccctgctcttcgacattgcccgtgaccccagggagcgccacccgctcacgcctgaaacagagccgcgccatggtgagatcctgcgcmacatggatgctgcggcccgtgcacacgttgctaccctagaggaggcgcccaatcagctttccatgtcaaatgtcgcatggaagccatggctgcagctctgcctgccttccaagccccacccactcgcatgccgctgtgctggcgacgggtgagttgggcatgccaaacacacaggtatgcaagcatgggacactgtggcctggtgatttcacctcctgaactgatacctgacacaatcttgctgacatgtatgaaaacatatgaacatgtatgaacatgtgtatgctgagtacaaaacacaggaagagcccctcagcatgaccctgatgaataaatgatgtggacayggaaaaaaaaaaaaaaaaaa

SEQ ID NO: 1618 - DNA, 761 bp, Rattus norvegicus
ttttttttttttttttttttttttttttttttttttttttttttwaggaagcagccagtctcagatttattgaaatccccttcaaccaggtgagagcttctgtasggagggggagttccaggcccccaaacccgccccccactttcgtgttcawttcastgctggraagaactctcctcagcggycttgctgctgcgtcaggctgtggggcasgagttaatgctcacagyaccactgaccagggctgctttactgaarctcaccggacgcccatcgawcasaaartgacsgwwgcascctgtgmagggtttgctgggagtcaaacggggcgtcagcaadgactcyggmacccctccgacaaacamargctccctgtgatyaaccggstttgggttcakgggkccaactacatggktcacctctgaatctayatccaactgaaccacgttggagtctctaataactgtwattctgtkmcatctgccatcgcagagattctgcttgggggtgactgargtagaaaagtctctgacgccattgttgactttcactatgacctgtccgcttttcatgtgtacgttcaggtattccccgttgacactgtggccatggacaagggtcccggaactgctccggggacggacttcaaatgcgmytyswractttagcccaatgttgaaagactcatctagaaccacatagcctccttctgtggagaaataagtccccgtctccattggcccttcaaagcaagcctcgtg

SEQ ID NO: 1619 - DNA, 689 bp, Rattus norvegicus
tttttttttttttttwttkgkgggaggcartcctttaatggggtggggcacamgakagcadwmcttccakccaasasccacaksaactgaasccarcgtgamgcggcargcttttcggtaacaatagttgaratgkcacaggtgaagggttgkgcaaacaattcarcyctggtgagctctgccamgccccactgacagcatctggtacaractaactcaggcgtggraaacgagccaaagtccagaggcaggagcccacacgacagcacggaaggtgactcatgtgaggctgtcaatgaggragtcccgcatgctggkggsaatggkgctargtttggcttcattcagcttgaagacactctccaccactgacagstctgkgctggkcgtgtccaggscacagraagcacaccartcattcackaccatcccggsagcaatcacckcgckccckcgkkycrcagtgcctgccacaaggggaacctgaagaagggaggacagctcatcctgatcctcgatcgaagttttagggtgcaccagacctccttgattactgaagacacagtagcttccaactaacacctggtcagcaaccgtctgcctgaagacttccaccttgagcacatcagccaggatttcttctgtctccctatccaagtctgggtggaccaaggccacatagtcattgc

SEQ ID NO: 1620 - DNA, 544 bp, Rattus norvegicus
ttttttttttttttttttagaaggagtcctctgttatattgttaccaacactggtttcttaaagctgtcttttcttgcaagtttatctggagcttgtttcctttagcattttaatcacagcactccaggctgggagtggcaccaagtgagaagagagcttcgaacttcctatcattttctagaaaccggtatttacaaagctgaagaaataaattgtgatctakggtaaagaacagtctctagtttcctctgcttccttctttgaagagttgatttatcattcagcagaatacggggaattcattgcagtctcaattgtcgttgggctcaggttttctctcagcacagcatatgcacttggtgacatggggagaaggtctgaaggagactgtggctccgtggaatcacttcggattgttgaaatgggtataaaaacagaggggacataacccttgtcgccccgttctgtcggtcttgaaacttcscacggytgggagctgtagtgtttgccaaaggctttgtctttgggaatgtcagggtagag

SEQ ID NO: 1621 - DNA, 592 bp, Rattus norvegicus
tctggaagtggcttcggatttggtggcggtatttatggcagctctggtaccaagatcacttcttccgccaccatcaccaagagatccccacgatagacaagacaggatcytgatggccttcagccctgatacctcttgtgtatccttcactttacccccatccccagtcttccttcctggtgctcatcttgttagtctccctcctctgccttggtccctcagttccrgsaygasskkmttggmsatsgyswggcctcygcsctcctggagcctcgtagcttcttctcaacttgggccgrgtgacccccctcrwgggrgggkgtsttgatwtcaccccaatggacagagggamtgaagagcaggaactccttmtgcaraagwrcagggtcacyctcggcccctccagtcacrccagcccccacstgatcctggacawccatstgctacaacgacactcaytstccaycccctgacagcaacgggctmtgtccggttgagacaaagmctgctyggtgtcctgttcagcccygckcctctctstactcatccccaataaaaatgstttktgtcattcaaaaaaaaaaaaaaaaaa

SEQ ID NO: 1622 - DNA, 808 bp, Rattus norvegicus
ttttttttttttttttttywwktcaaacargtcactttaattccatacccacaattttacagatctcaktactgaaagctgtcgggcaaragggacaaagtwtaaatatgtctgttccgcagtgtaaaccaraaatgacttgttaatcacawaaagtgtacscaaacactaggtctgggaacctcaatgccagcgtagcgggaagacamtggggttggcctgcctctgggtcagtgcctttccctgcttggamattgctarggttcytgaggggcatccgctcatccccactgctccctggatgcgtgcagaagcagtcatgttgacaggggccccgttgaamagcascttcstcmgacatcctcggtwggcagggggctctggccwggcagcttcaracttgggcgggctcccaaggtgcaaaagcgctggagaatcagccaaggtctctgksaaacggvstgtsrygtgryyscysygtswgkcgayhyctrgccgcagtgtgttcctgcccttgatcactgtcacttggtgccactgtccatcacaaagcttggggtaggtcacccacgtggagaactcccctgccccatcatttgcccgtagcaggacctgttctgttagcaactgcagctgcacgtagggagtagcatgggcctggcccaggtgaaagatgaggccagcagcggccaagggccgcacctccagctccaggctcacatggggcatcttggccttggggagctctaatgtgacggctccaggtctggctgccatccaccacaagctggacctgctgcacctcgtg

SEQ ID NO: 1623 - DNA, 499 bp, Rattus norvegicus
ttttttttttttttttwtktykgckgtccaaatggacacgtmccatttaytgcaattatakgaatggccccarcctgaracttggacacwgtctcacaagccctcagttgagtgctgtcycakatckgaccccaccccaccccacatcacatccagccgtacgatctggcagcaaattctgggatgaaacacagggcrcasatcttttgtctarccgcgccactgagcagmctagccakcarctkgaacatcgctgagytaagtaagcaaggagtcctcagaagtgtcccascaaccatgarggatgaaggctgtcccaggkatctgctctgcamagcaagcttagctgtmgtgaccccaggtcaagatgtgctagagtcccgattacttaaaccatctasaagaacagacgtcaggtcctgcmkmrysttggctgaacctaccarcttccaaaagaagtttakycammwgaaaaacaaaacaaaacaacaaaccagcg

SEQ ID NO: 1624 - DNA, 1494 bp, Rattus norvegicus
ttttttttttttttttttykwwttwackggaggcttggtttactgtggccaractactggggtgagcagtgtgggcaccaraatcccaaacccaggagttcaragcagccctgcaggtgggtcttcatggctgcactactcctcacaggatgttcctctccartcyttgtagtctgcgaracatgcgccactgtgcaccaaatccaccccacatttcagctccacaggtttttatctcaccacccgtttaaaagaaaaaaataattcagcctctgaacccttcaragaaagcarggttktttttttttttgtttgtttsytygtkyyktgtttttccttcctcttcycawaaaagaaggtaatttcttcatctggtttarattgatacgagtggtcttcaragtgccaaaggtattctggggaggacactggtgctgtggggtggcaggtcacaragtcagcgtcagttggtgtccatggtgtaagcctcctcttcccccaagtcctgctgtgagstgctgarcttcgcccstccatcagaacccgggaagctgacaggtgaggaggtgctgggacactcatcatcccgacgctggtaaaacaacacgwaggcsgcctwcgtcactatctgatcctcagaggccagggacacgctgctatcatcaamstmrtrccawttcccattcagtcygttcttcgcatatgcagtatagtgaccgacccccatagcgccatagtgattggacmcagcaatcaggtcatagacataaggccttgctgcccggtcacacacaaactcggacatgttcagagctcttactgggawttccacaastgtgtccaktttatyscgccagtatckgttatargagaamcgtttgagatgawccmccaggwtcttgggcaaagwccmcaawtcmaacytttttgttgcctgttggtgcttcytacaggtggrwcagtwccaggggtcatgctccccaagggtctccatggtagtawagagctcgatgcactcccgcagggctattgcagccttcttcttcttctraggctgggacakgctcgtgtgcttctcacaggcctcagattcttgctcatcaaagtaaaggcttcgggtctcactgtcccagtcaatggccagtgtggatcgagagttgagcttgaggagttttccgtcagtggccagcgagttgatatcagcagttccacaggagttcacgaggctgaaggtgaaaagcctcttgtggcggggcgggcctttcgccttttgggtggtctcagtagggtcccctccctgactgtcctcaccactttcttcctcttcagaaagctgttctttcccttcctcttgatgatccatttcttcttcatctccttcatagctacccctagagccattgcaggccccaggctctaagggagagctgagaaactcctcaggcaaaggctgctttatatagcggctgatacctcgtgcgaattcggcacgag

SEQ ID NO: 1625 - DNA, 1215 bp, Rattus norvegicus
  misc_feature (570)..(570): n is a, c, g, or t
aaagagtacaaagagggcttcgggagccctctgggagagtattggctgggcaacgagtttgtctcccagctgaccagtgggcatcgctacgtgctgaagatccagctgaaggactgggaaggcagcgaggcacactctctgtatgagcacttctacctgtccggcgaggagtctaactacaggattcaccttacaggactcacaggcacggcgggcaaaatcagtagcatcagccaaccaggaagtgattttagcacaaaggattcgsacarkgacaaatgcatctgcaagtgttcccagatgctcacaggaggctggtggttcgacgcatgtggtccttccaacttgaatggacagtactacccacaaaagcagaatacgaataagttcaacggtatcaagtggtactactggaaggggtccggttactcgctcaaggccacgaccatgatgatccggccagcagatttctaaatgcctgcctacattatcagaagaacttgctgcatccaaagattaactctgaggcactgagagacaccaatgcacagtagccccttcccacatcangaggtgctcctgggggcgggggaggatctgtgtgttccagactgacgcacatcacttaggcctgcaccgctaaccaaccaaaggagacccaaaggcaytgcgggtctggagaaatacctatgagaakgccatggttagaatcacagggacagcatgcattcggactctgtcacaagcaagaatgttamgtgggagttcatcagtaaataactggaaaacagaaccctcagatggtgcagataaatcccgggaccacattactcggagcacgtttctacagtgtacacagacacagctcagctgtcctggaaccacagcagtcagtctccagggacttctaagtagtggttacaggttatcatctggataagcacagttcgttgtwccgtcttrtgcttgacatgttcatttggaaacaacacatttacctatctgacggcttagtttwtaatggctggacactattastatacggcaaaaatgcctacatctctggagtagccaccaagcgggcgccatgtcagtgcatgtggagactgtactgtttktgtktkctttytggytgttaaatatgaaggtattyttagtaattaaatataagttattagctgaaaamaamarrahawaawgagaacattgcggccg

SEQ ID NO: 1626 - DNA, 835 bp, Rattus norvegicus
ttttttttttaaccttttcattattttttggcacagctttgtgttcttccttccctgttcagtcattagagcctgttctggatggaaaccaaccatgtaccatgtagctgatggcttgcttcatccttccccagctgagcattctaggtagaaaccatattcctgtgatacaayywtkyktwtkwytttgtatttgtttgtgttttaaacttctggatggagattaggggarggggggaaataatcctgtggccagggacaggtgatttccaagtagactcgaacaagtcaagttcacacagtttggagcccatcataggaaagggtgctgcaatcccacacattcactgctgctccattagaatggttttkttttytwywttttgtgtttactttcggagatctaaaacacagacagagycatcagatgcactggcacccactttgtctcctcgagcattccagcacacctcaaatatgccgcctgttcctcggtagctgtggacgagacttccactctgagtattccagatatggacacacttgtcaaaggatccactggccaaatactttccgtcagggctgaacgctacactatagacaggctcctgatgcttggtcagtgtgtggatgcaaacgcctcgctccacatcccacagtcgaaccgtagagtcaaatgaagcacttgctaacatgatgttgsmgttcgkgttgctggtggctggtcctgtgggactccacttgatggtatatatctctttgctgtgagcttggaggtcatggacacatgcatcctgcttcatactccagatctttaatgtcatgtcatcagagc

SEQ ID NO: 1627 - DNA, 1410 bp, Rattus norvegicus
crckwgkctgaaaagagcatagacaacagattctcaacagcaggatgtgggtgttcaagtttttgctgctacccgtggtgagctttgctctatccccggaggaaacgctggacacgcagtgggagctgtggaagaagacccacgggaagcagtacaacagcaaggtggatgaaatctctcggcgtttaatttgggaaaaaaacctgaagaaaatttctgtccataatcttgaggcctctcttggtgcccatacgtatgagctggccatgaatcacctgggagacatgaccagcgaagaagtggttcagaagatgactggactcagagtgccaccttcgcgttccttcagtaatgacactctctataccccagagtgggaaggcagagtcccagactccatcgactatcgaaagaaaggctatgttactccagtcwaaaaccagggccagtgtggttcctgttgggctttcarctctgcgggtgccctggagggccaactcaagaagaaaactggcaaactcttagctctgagtccccagaatcttgtggactgtgtgtctgaraactatggctgtggaggcggctatatgaccactgccttccaatatgtgcagcagaatggaggcattgactctgaagacgcttacccgtatgtggggcaggatgaaagttgtatgtataacgccacggcaaaggcagctaagtgcagagggtacagagagatccctgtggggaacgagaaagccctgaagagagcagtggctcgggtaggacccgtctctgtgtccatcgatgcaagcttgacatctttccaattttacagcagaggtgtgtactatgacgaaaactgcgaccgtgataatgtgaaccaysccgtgttggtggtgggctatggcacccagaagggaaataagtactggataattaaaaacasctggggagaaagctggggaaaywmrgrckatgttctcttggctcggaataagaacaatgcctgtggcattaccamcctgsccagcttccccaagatgtgattcaagccagccagcccatytgttytcacattccttcctcaacagtgcaagcgaacggtggctttggagtgacacctbtgvttcccttctctccacccaaggccctttthtttgtggacacaactgggcattttytgagagttgtggccyctgtgmtgatagacgctggagtcctccagcaggctggaggactaaggtgaccttcccaagcccctgtyttctatatacaccmgtgcagatttcagtcttccmctgagatgcacaaatctattcatgattctttgacaaacttacatgatgtaaaaaakgtttccttctttgcatttgaaayaaagtatctcgtttmcwawwwrawramraaaaaaaaaaaaaaaaa

SEQ ID NO: 1628 - DNA, 528 bp, Rattus norvegicus
ttttttttttttttttttcagctgataatgtgtttattgtattactttastacagttggcctgcctcaccccacactggacagccyaatctgttcacagctttctcctcgatgcccaagawagagaatgctttccccakggctgccacccaagacatctctctggttccgctccactctggagccccacttcttgtcscctccctccaggttagatcctgaattgagcttgggccactcttccaggaatacattcacgggttatcttgttaatamataagctacacttgggccarggttcatgtatgggttagttgtctccgttggcccaacgatctcagtgtgccccagccacaactcatctgtcttcctggcatctatctgccccctcttcggtgtgtcatatccagcctggtccccagtatggggacagccgagtcaccagtgagctgcgctacgtggtccacgttcagcacgcagctcagagacatgcatccgcctgttgcgacccttacgacgtgaatctgct

SEQ ID NO: 1629 - DNA, 839 bp, Rattus norvegicus
ctgctccggagcagtagccaagctgacagggtaaagggatgaggaaagtttgcagacggaaccttcccgcatgggtcagttttgtaagggagcatgtgctgacggagcacttgagggcgtcggcacagggctactgatgagagaggaggctctgctcagcctggctccagckctgttgggcaaacgragatgaccacaaactctcagcttggcatccmtraggttccgctcttgctcctccgaggccttttctgytawtkcrgasgcasrgcctcaccaarctcagtgctgatwggcyagtkmstbyakwakrakgycmccastwhmacakkckgrycrsrgwtgcaasmwwmtggbtgacaggccaccagcatcctttgggtcagctmtactccagcgmtggtgggtggggtgttttggtttgwmttmbccatcgytgwyggtmtatttttaaaargaattttatttytaaaaatgaaagttatttacaagatgataccttabtacactcbtgcgacacagccattcattattstattgtatagtbccaataatctgtattttatgtartaaaatggacaggatgkstgstgtggaatgccgggtgtsacccwgaagwgaktgttttywtyctacccccacctscatggaatttcyctctaamtgtggcccttytaaatgtgcsttcaccttagctgtttgccttaactttacagtcttccccacagggaggttaataaagcgcaacacttggcgttytttatgtttwaaaaraaaamarwawwttatttataataaaatctgaatattkgyaammmwwwaaaaaaaaaaaaaaaaaa

SEQ ID NO: 1630 - DNA, 671 bp, Rattus norvegicus
aggtttctccagggattcctcagacttaactgtagtgcttcagccagcaattgtagagtgctatttatttgtgtctgtgagtttgtacataaccctaacctcatattgttgctgagtttcattttgaggaaggcaagtwtgattttctttcctttaatgtagatgctcgggtttccattttgttgctgcaykgcasdwggcscatggccctgtgggtgtggtccttctgattctagcacagcgtaaaaagagcccacagaggccagagaggcwcacttggatttcttwytgtttgtttgtttaacttagttcttttwacttgtttgttcttgtgattgtagtgatggcttcaaagatacagagtaagtggaggagtgggctgctggtctactgggcactctacttcctgttacaggataactgtaaatgtacatattttaattgcactggtaatgggacacgccagtgtytagaccactgcaccaacagcctctcctggctacagggtgcctgataataatgtcttgattttcctttgggactcagctatgtaggtcttcccccgcccccgccccccagtargggagtacaggtgatcactgtcattgcaattgcttttcttttttaataaatttataaaaatwctwaaaarwaaaaaaaaaaaaaaaaaa

SEQ ID NO: 1631 - DNA, 766 bp, Rattus norvegicus
ttttttttttttttttthyywwtaaataactgawtctggtttatccgmaacccagtgagcttacacagtacctggrgagagcggccctcakrcsakgtgccasgtgggctgtggggtayygaaccggggtgactccagttaggttcyaraagtgagcagggaytggcgaraaakccaaycagatgcastcctccctgycyaagactggagccacagatgccacggtaacctttcagtgtcctgactargtcyttaactacaccagctggggtcctcccacatcccctggactaacayaggtgactgttctcattccatggtgacaacaacatcttccacatctctggggactgcactctgaagctcacgcctsrtkyccgrrkatarctgkkggtggggctgcagccgaagcagttctaggagggcctccttctgctccgtggccaggtcagccttgtagcgctgtgctagtgtcagtaggcactggtgccaaagcacgggcagctggcgcttctctgtccggaaggccagaaaatggaagaccagagcgtckagcacccggtagggcagtgcatacttcttatcgagcagcaggcgcaggaagatgctgctggcaccactgtactccatctccgcgatcttcagcatggccgcactggagtgcaacacagggatggagcacttgctgatgatgctgcccacgatgatggcttctcggagggtacaggtgccagactcacacagcgggatcaggattcccctcgtg

SEQ ID NO: 1632 - DNA, 702 bp, Rattus norvegicus
tttttttttttttttttkkwywktwgaaaataatcaaatttattctctctagggaatggggcaggagcaccggaattcgagtcctggggtgccacccatccttaaataaacagtcagagggccacctgcttactcggcaggtggtaggcaatcaggarctgtgggtggagtttctgccagtgtgggctggccctcagtcccatccctaggacggaagaccagctytccagcctgcagcatctgcccggctggccacgcgccacctggcccgtactgctggtaraagtccgcatccgtctggaacatgaccartgcctgtgctstktksmyycgrmcgwrytgggccargctattggcatccaggaacttgtccccacaggaatcacacgcatacadgatgtgggtgttgggakswtmwtcctgcrctkgmwtgacagctktgctgatctcagcktkgararcctscgwykcatcagckktcactgcggccccgactggtaccactgtgagctgagtgaccgctgtcgctgccagtgcctcagtggccagtgtgaccatgtcgtccacagtgaccacgctgacctcaccaccctcttctggctccaggatcttgatgcccgccttgccctgatgcacggtctttacgtgagaacgcaggttgtctacccggttgaaaccacggccacacttgtccwcrtragt

SEQ ID NO: 1633 - DNA, 654 bp, Rattus norvegicus
ttttttttttttttttttgcgggctccacrctttactccagyttyytyyywytttyttawwaaatatatctgaaatatattartsgtagaaaacagtattaacacagtgtcccatgagtacaggctgtggagtaaacaaacccagattgcaaaagggtgggggtgggggtggggcgcgaaactctggagagtgaggtgcttgggttgtgtcatcctctgcctgtctacaccagggaaggtacaggaagccaggagagaaccaggaggccacggggtcccattctcaaaggaccatctcagtttcttgtggcagcgtgagggcttatgggagctcagtccctgagcaggttttctggcttggggtagccaaagagaacaaagtcggsctcgtagagyytmkwgwgcygttgcctccaggccagggggatgttggcaaaccagtcttcctcccagctgctggcggtcctgttccggtaactaggagggaagtggagttgggagtctaccttgagggacctcaggagctgggcagcatcctcatctagggtctccagcttccccacgaagtcgtagtctatctggcacgggtggcagaggcggtacacctgtcgccagtgctcgttgaagggcgcagcttctccgtgtgtgggtcca

SEQ ID NO: 1634 - DNA, 596 bp, Rattus norvegicus
ttttttttttttttkttyywywktcccaggttcagctttatttcctaatacaagtccartctttggaacattaaaaggaactgttccaaagcttaattaaaacacaatttacaaatagttactatcttctgaaagcacctccaakttcggaatgaaaaatatgtamataatatatcaaatagcaggcgagttcagctcgcggcgggcccactctcggcagtactggdctccttagggtcttcgcactcttctgtcaaatmtacgaggctgtgtcccatgatgggggaaggaacasaaatccccattgcttttcggactccgtgtatgcttacaacatcgccgggagtcacttgctgtgtgagttctttaaggktattggkcacttgttcagcaaggtacatttctctgtwagaaggrmccaagagacagatcatattggraggaggcctagtgctcagccgctcgktctgtgcctcctggagctccctgarcaatcttgtcgtttcatcaagcttcctctggaacacctcagcctctkccgagtcgaagacttcagccggagcaccgaagttcgtcactgcttgcagtgctgtgag

SEQ ID NO: 1635 - DNA, 652 bp, Rattus norvegicus
ttttttttttttttttttkytcagggtttttgtgttttttttgttttctgtttttttgttttttaaactctgatgtccccttttctttacagaatatttacaaacagggayaggtatcagccaccaaatgggcctgaaagcgggggcartgcttagatgcgcctcagcgcagggragacgtcctgaggaaggtcactagtatgacccarctgctctgargggccargcagtcccaagcaggtccargmkggaactcargcaaggtcagtagtgggtgaacccagctgcttagaggccaggagcaggcgggtggcggcactctctgactccgccagcarcctctggttgttgtgtctgaggctccgaacctsttccycymrkgcygycctgtccgccttctccctctgcargtcctmctggagcttcctcagsatggactctaggtgagagaccttttctgacargctcccaggttctsgykcagaattacactttgaagtttccttggggtctccactctctargatgggctgtccctmccgggacagtgactccagaattgtgttgcaagtggaggcgatctctgagatggactgccactcatcctccagggtctcgctgccggcttctgacataattttactgatggaat

SEQ ID NO: 1636 - DNA, 644 bp, Rattus norvegicus
  misc_feature (623)..(623): n is a, c, g, or t
tttttttttttttttykwacctttkagatttttattagywktyctctgaasaakcaaaatagtkrgcrrattvctttagattywwkwytkywkkwkwtyytttgkwgdtwaaatctttaatgttgaagaacataatacawwywwwyswkwkwkwytggkttctatgcctaggtgttattcatttgtcatcctaaagcarggctggagaaggctgytcaacaactgggggttagtgctgagtgacaagtcgtggcctgtttcctcaycaatgtgctgggaagragccgatgattactcaaactgcttacagcttyctagcasaggggstccaatgccctgggcagcagaggattatggtcyaagccmwmagwrmcrgtctgaakaggggcacatgggmwctgcctggcagaagaggcagactttgccccatgaggaaaagtgcatctttgtaccgcagagacattcmrgaacmartgkrwcmctmrkgsctgtgtgtgrbgkmaggckggccccggaagaacctctcagttgcattccacttgggttagagcccagtctgccagtgaagcagcagagaggacagcgtctagccccagagcagcagcaatctgctcctgtcttcncactcttggtagccaggctag

SEQ ID NO: 1637 - DNA, 382 bp, Rattus norvegicus
tttttttttttttttttwagyccaagcctatcttttatataactgttcatttcaaaggctagagtcccaagggtagagagtgtgttccagccacactgacatcccaaagccagtcctccctcacgccctgagttcctcaggctagctatagttccagtttgcatatcttggcctgtatctttttcctataccaragatggggaaggggctcarccctcaggtccagtagggggagcargaggagccggagggctgggatcttccagtttcacatcatgtagatgcactgtgggagtggtagggtctttgccaacaccttggttggggtcagcctggtcggggtggtgcctacgcacatgcttgaccacctggaacttttgct

SEQ ID NO: 1638 - DNA, 499 bp, Rattus norvegicus
  misc_feature (435)..(435): n is a, c, g, or t
ttttttttttttttttttagttgcgaccacatctttattgcatacccgggtgaataacttatcacataacaaatgcatcccacgccaagaatagacacttacggaggtcagggtgaacggattactttagataaagagcagcggttggggaggagcaagtgccaggaatttatggccagaacaaagcccaaattctcctggctggaaaaaactgaccttgtctactacagtgatgtccggaagagcttctggcaaaggacacagaggtctggggttggcagcaagtttagaggtgagatgagatgaaaatatggcccttataagtcggtgtcggtgtcgacaccgcgaggccatcgtggggcagtgcacagagggtagacacgtgacctttagctgctcctcctcgggcagggaagtgggggaggggggcacggncagattagcttccagtgtggactgagatggacaagggggagacccagacctttctggatttatc

SEQ ID NO: 1639 - DNA, 506 bp, Rattus norvegicus
ttttttttttttttttttkywgaaaaataaggatgtttattaaggacatttccagcccacagctcgggctcatatatggctctatgagcaactgtctgacctcatccccattcaatgtgaatgacactagggaggccaggccacaggtagatcccactgtcttgaataaaggggccacagcaaagggccctctcatgggtaggcattgwcaggtaaactgctggggatgaggagggaaccattgaatacattcttctaccccttccctggaccctctcttcctcacctcccaggttcataggtcagaggtacmtagtacctagtaccataggggggtaccaaggaaagcccctttattaggccccaaaactatgggaaagagatggatgccctcccctttcggccattccaatcctgaggggccactgaggtagaggggtaaggggccaggccacattaatccccctgtgggctgtgctctaaggcttgtccctcggcgaagttag

SEQ ID NO: 1640 - DNA, 725 bp, Rattus norvegicus
tttttttttttttyttttykbkkgaaaatttccatgtttaatgtaaaagatttagcgcattggattatttacacgtgcattagaaaagatggcagaggccgagggtcctcctgarggctatgaraagacagttcatataaaccccattaaatagaagcttccatgtccaaagaggagctccaaacaggccyttggtgtaccagcaccagcttcagatgaggtcagccacattcataggcatctcatctatcygggtggagtagtacygctcaatgtccctkaggatgcggatgtcatcattcttcacaaaattgatggccacacctttgcgtccatatcgacctgatctcccgattctgtgaatgtacmstystcygttgttgggcaggtcatakttaatgatgagggacacctgagggacatcgaggcccckcgcccagacatcystvgdghygavywctysgctgkyacctgmccskmrykccttcatgatgsactcacgctctttmtggggcatgtctccgtgcatggacgacactgtgaaattggcttctctcattttctctgtcagccagtcaaccttcctcttggkgttgcagaagatgacakcctgggtratggtcagcgtgtcgtagagatcacagagagtgtcgaacttccattcctctctttccacggccacgaagaactgtttgatgccttccagagtcaactcatccctcgtg

SEQ ID NO: 1641 - DNA, 839 bp, Rattus norvegicus
  misc_feature (701)..(701): n is a, c, g, or t
  misc_feature (736)..(736): n is a, c, g, or t
gcacttcwcgrvdcswsgwgcccagtgcttctagatcctsagccctgaccagctcagccaagaccatgaccgagcgccgcgtgcccttctcgctactgcggagccccagmkgggagccgttccgggactggtaccctgcccacagccgcctcttcgatcaagctttcggggtgcctcggtttcccgatgagtgktctcagtggttcagctccgctggttggcccggctatgtgcgccctytgcccgccgcgaccgccgagggccccgcagcagtgaccctggccrsgsccgccttcagccgggcgctcaaccggcaactcagyagcggtstbwcagagatccgacagacgsccgatckytggcgcgtgtcmytggacgtcaaccacttcgctcytraggagctcacagtkaagmccaaggaaggcktggtggaratcactggcamgcasgaagaaaggcaggatgaacatgghtacatctstsgrtgcttcacccggaaatacacgctccctycaggtgtggaccccaccbtggtgtcmtcttccstgtcccctgarggcacactcacsktgraggctccgctgcccaaagcaktcacmcaatcagcggaratcrccatkccggtcactktmgaggcccgtgcccaaattggaggcccagastcggaacagtytggasccaagtagaagchttcagcttgntacccatccccagtagcmgtcaccagccytccctntctgtcaatytgaatgctcttttgatacatgtactttytkwwwwwctcaawtaaaagttggaaamtahwrmwmhmmvvmmwmaaaaaardamaamaaammttg

SEQ ID NO: 1642 - DNA, 975 bp, Rattus norvegicus
agsrgywcrwsragaaaaycaactatgacatagagcatgtcatcaagaaggagatgtctgggacgtcaaggacgcatttgtggccatcgttcagagtgtcaagaacaagcctctcttctttgctgacaaactgtacaagtccatgaagggtgccggcacggatgagaagaccctcaccagggtgatggtgtcccggagtgagatagacctgctcaacatccggagggaattcattgagaaatatgacragtctctacaccaagccattgaargtgacacctctggagacttcatgaaggctttgctggcgctctgtggtgragaagamtaaaactcatggccttggaggrtcccccytgccatgcagtgsccaaccgcmccagccaccgtgacctgaccaagccattgctccagcttmagagactaaggaagaagtgagggswsgagktggactgtgatccggctggggtgctctcttgccattgagggtcccaggcggtcccttctgttatccctcctgctcatggctaagtggctggtgaaccacagccatatatgcattcaaccykgcwcsscstytgcctyctyctccgcccaccbtagcttmsatccctcyacacaatcchtgcstgaktwaagcyttgtcacatcthtaaacacaccaaacctctgtywhmraarwrarwramrwrwawrmttwkgaggrwrrrctrwrrwammwgrwrmmarrmawrcattytkggatagcrgagatgatgaattaatttgatagagaggtgatctccccgsccgtcaccattcaatbtgataaaagtaccgagctcggaawwwmmamrwmmarrwwtcgttttgtatctatgacatccttggcctcagaccttgggcccatcccttccttatacccagttttgttatctacaaaaacaagacaccaaaaaatagcttggcttcccttctaaaaaaaaaaaaaaaaaa

SEQ ID NO: 1643 - DNA, 686 bp, Rattus norvegicus
gagggcttgtagctgcctttcattcagcctgcgagggagctgcggctgagaggaaacgctgctttcagcactgaggctwtagwrgssacmkgraaamgtctgtcccagtkwkmwcwatcrawrmttcaayhhcrdrmdmvvdsyrggagttggcttcsccmccaggaaagtggccggtwtggccaagcccaacttgatcwtcmgcgtaraaggggacttggtygtcatccggtcarrgagtacytttaaaaacmccgagatttycttcaaamtgggbgtggaattygatgaawtcvscmcmratgacaggaaaktgaagrgcmtcatamccctggatgktgggstcmtggtacatgtgcavaagtgggatggaaagtyghccmccmtaaarrgrrsacgrrwtggtgmcaagctggtggtggaatgtktcwtraaaggsgtgacttytmcaagagtttacgaaagggywtkagccaagggacrrgsccctggrmtsaaatttgcatcaaactbtmcaawagttgatkggatyygttggktytgttttttttttttttaarawacgattttscmctaattagcaagcawtyacttttttytgaagctgggattttattggatwtggttakgctgkttawrtaaamcctttttrgmcttddwaavhwvdddmmraaaaaaaaaaaaaa

SEQ ID NO: 1644 - DNA, 1251 bp, Rattus norvegicus
cggccgcggcggctacggtgaacgggacaaccggcgtttcaagctccgggcccgcggccacctcgggcgggatcctacaggcagcggccggcatgtacgagcaactcaaagacgagtggaaccggaagagcccgaatcttagtaaatgtggagaagagctgggccgcctgaagttggttctgctggagctcaatttcctgccaaccacggggaccaaactgactaaacagcagctcattctggsccgtgacattctggaaatcggggcccagtggagcatcctatgcaaggacattccctccttcgagcgctacatggcccagctcaaatgctactactttgattacaaggagcagcttcctgagtcagcctacatgcaccagctcctgggcctcaacctcctcttcctgctctctcaraaccgagtggctgagttccacacagaattaraacgattgcctgccaaggacatccaaaccaatgtcyacatcaaacaccytgtatccctcgagcaatacctcatggrgggtagctacaacaaggtgttcctggcyragggaaacattcccgctgagagctataccttcttcattgacatcctgstggatactatcagggatgaaattgcaggatgcattgagaaggcctaygrsamraksctttttgctgaggctacccggatcctcttmttcagcacacccaaaaagatgacagactatgccaagaagcgaggttggctgytgggccctaacaactactacagctttgccagccagcagcagaagccagaagwcagcaccatcccctccactgagcyggccaggcaggtcatcgagtatgcccggcagctggagatgattgtctgagcctcggccaaggtggtgggcatggctggtccarcagtcttagcacgggctggccctcaataaaggcagattaacctcmwawrrrmmmwarwmwmmmcagtgggatggtggagataagaatttgggagtttgggggcctctgggccttctgggtgagtgtttcctcccagttgtcactgctytgggttttcagcatagctgcccagtggcccgcaggagagcacaggccctgactgaggtgctcttctagccagctgtgggtgccttttggtactgggcaaggggattgttttccagtgaagcaccatgtgtctcagtttttaaaaaatgttggccatggattaaataatttttaaaatgamamawraaaaaaaaaaaaaaaaaa

SEQ ID NO: 1645 - DNA, 542 bp, Rattus norvegicus
agtggatactgaaactaggccaaaacttttcccctccttttctctttgccactagactggattgtgccccatggagccccatggagctctgctttcttaagcacaatagccggactaattagatcatagaggcaaggcagcgatactgtaacaagtagcccaagaggcaaaagagggaaggcccgaagaaagcgaaagggggaaagtttgcagctctcacacttaccgatcaagcctcccaccagaaaggcaacgatttggaaaaccagaagaatccctccaacaatgcagagcttcttggtgctcatgttttctataattgccccagccatttctgcgaccccttttctttcctcctttaagtaaatgttttaggatatgctttcgcttcccctctccttccttgccctcttttcctggtgctccaaaacttcaagggtgcgaaagcagaggaggtgggacccagaccgcgggcgcccgcgcgaatgcctgggcgaagccgcttgggttccccagatgcccagagctgagactgcggccgc

SEQ ID NO: 1646 - DNA, 549 bp, Rattus norvegicus
aaaatggaaaatgggaatggggccctttgtgggtgacgcatgatgggttgggtmrgyyacaaaggctgctgtcagccccttcctcccctgtccgctctgcattctccagtcacagaagtggttcttgcagctgaagaaactcagaaggtcgcttcctcagaggcggcgacatttcagttatcatggtacggacaccgatcaccttcccacgggcttacacggtttgactggttgtagctgtggcccgtgtccacagctacatgccagaagtaacaattatgacaccacactwggccacagcagacaggacaagaggggcagtgggcaagkaagaaamgagagtatagaattcttggcactggggaaacatggcttccacacccccattctgcactaggaaatggcataaaagccgggtacggtgggttttaagcacttttcactgtctaaaagcacttgtatgtgayctgtragatgagaaatcatttcaattgtaaaatttttcaattaaaaggtttttttttcttyhwwaaaaaaaaaaaaaaaaaa

SEQ ID NO: 1647 - DNA, 678 bp, Rattus norvegicus
  misc_feature (513)..(513): n is a, c, g, or t
tttttttttttttttttywwkkthywwkyytkkkgaggaractggggaagtcttgtgcccyccccaragatgctttattgcgtggcttcaccagtcatcagkgaggagaccctgggcccattcsagatgatgggaamacccgcgcagtacccggbaratggwcccaratgctgtgcagtcagatgggacagggtgaggagtggtactcggcctctctgttccagggsagacctgggatcccagyaggyagcaagtaagtctggmaaactgggaggaggcagtgttcaggscycagtgacctccatgktckgcagstggktckccarggkgacctcttttgsttkctttttgctgccttcatgttgcttcttctgcttcttagatggctcctggtcaataggtgctggcttcacaaatgggatcagttcttgsmgtcstgssgrmwtswwctccctcaacttctctggcacsacgatgcccttctctgtctggtagttctccaggatggcgcanatggtccgggtggtggcacacattgtggcattaagcatatggacaaactccaccttgtccatcatcttcttggtctgcccgtatcggattcggagccgacgagcctggtaatccgtgcagttagaacaggaaaccaactcacggaaggcaccggagcccgggaac

SEQ ID NO: 1648 - DNA, 766 bp, Rattus norvegicus
  misc_feature (747)..(747): n is a, c, g, or t
ttttttttttttttttttggctgkaacactttctgtttattggttggggtgccctggtgtggccagtgagcctaagagaagccctgtcttacttatccactccctcttstccaactccccaccacagctctgaggggtacccaraaagcatggaagcggtgggtcaaaataaaatcaaatcaaggctggagaaggggcaggaaatgtacattacaatgaagattagggccaccggctctacacaatacagcgtgtagggaaggccgcagggtcctgcatakagactgtcttaccccaggcagggccccaaggaggaatsgtcacttcaagtgtcttggtggaagctctggtyccctggcccactgacaggaggcagtgggagactggcttaaggagtccaagtctcctacctcctgacgacgcctggcccactggsccagtaggtcctggtgcctgggggtgagggacaatgcatcaccatctgcctgtcaccccccgtcccccgttgtccartctgggtgatctagggaagcaggactccagttcccactactgagcgggagccgtggtcacttcctgctgtggagtstgtcctggaacttggtgcttgtgtaccgcaggtgaaagcctttcttggagatggtgtcatcagagtggaacttcaccaggacagagtctccgggcgagtaacttcctcaggaggcccagagcacagtagcgcccagtctaggagctgtgctgtcgtanccgtcgaagagctcatgta

SEQ ID NO: 1649 - DNA, 887 bp, Rattus norvegicus
tttttttttttttttttcaattcaacaatgatatttactttgctaacagttcaagaattagaggttaacaggtaattgtctccatgcctaaagtcagtaaaaaatggcaagccagaaaatgtccaatgtgaggaacatgtccttagcaagcatatggggaacagttcaaaagaggtgggggacagggtagtacttaaatcatttwtywwwwktywttttattgacaaaatagaatacttatatttgttcttacagggtagcctctaaactttttacaaataatgtacacattgtatatctttggatatatacawaayytwywyytttttttttacaacttaacaaataattakatwwwtwywtyytttaatgtaagaaacccgtatttacttggggtgtataattaagacatttattgtttatttaaggcatctgcctggtcattargaatacccaaaccgtgcagtcccacaaggtagcagttgtccctcctctaggatgtatgaagggttgaatttatgctgaagaagtcgagggtgaagcagtcccttgggtgaagtttgtagtggtattacctcaagactcatccagggtatccaggagggttccaactatgctagcccactgaaaccattgtctagssymkscsctccggagcatcggaggggaggggctaggtctgggaggcttcaatgccaggtactttgttctaagggaatcatttaagtccctgtggctaatggrtaccattaagagttcattatcatgctaatagcagtcaacacggtgaaggggtgrgaaccccggccgatctggggtcycttcgccgccctcggsytcgtgccgawtycyysrccyckmkccgccccttctgggcttccgttcag

SEQ ID NO: 1650 - DNA, 690 bp, Rattus norvegicus
tttttttttttttttttktttgcytctctgmraactttttaatgtmmacacaaaatatttgaasaaaggcttggaaaaagtaacaagggactctgtaaatgwatttttaagkaggctwtgaagtcggcatagagacatatgtgaagkgctaactyactmacccacacactcctgcttcactggaaaaccaratgcagccgccgrcctggccgadaggcctcctgagcactgggtgagcacaggcmaarggcycargttggmcttgaaggaaacctggccgtgggtggtggaagcctgrgtggtatgtggtatgtgtgtcctctgcggctaaatccgacggcactgaagcagacaggaagggtgagctatcakccagagcgtctgcactgcarkctakctctkgwycakgacacatagcccagcctgctgcagtagctctcggcacacggggtgtcaggctgggargtggaaggcggtgacagtgtggcacactcaccactgagaggatcgtggtttctagatagttcgtagcacttggtgttccakatcccaccgagtgaggctggggcaractgagccctyacacacactakgcatggtgtccttcacacactagctctcaacagatatgcagtcactgggycacctattcacawgggtgaagcagcgcacagctttacacctggcttc

SEQ ID NO: 1651 - DNA, 656 bp, Rattus norvegicus
  misc_feature (33)..(33): n is a, c, g, or t
ggcacgaggttttttttttttttttttycccangaattgcaaatttattgackgagtaggcackggaattgggagggaaycattcaraamccaaraggaaaaatcgacagaacaagatacamcttgagcgacycaaaggcttcttcttgggggtgagggtragggggtrascytmrarbsgggrgtttgrrrmccycggkmaatttcatgaraaarktaascccawaggcgyccacggaraactcttccarctccgytgtctccgctgcagcccggggactttacttgcacggccaggtgggygcctgtttctgctgggtctggtggcagactggcacacccttgccacctccagagccgcccccykmgkagccgcctccgcarctggaaccgccgccaccacctccggagtagccgcctccgcatccaccgccgctgcccccggaagagccgccgccacagccaccgccgcctccggagtagcctccaccgcagccaccgctgccgccgccaccaccgctagagtagcagccgccgctgccgccgccgccgccgccggaggagcacctccgcagctaccacctccgcctgaagagcccctccgtagctctgctggggagcgcaggaggtctgactggactgctgcgaggagtaat

SEQ ID NO: 1652 - DNA, 714 bp, Rattus norvegicus
  misc_feature (682)..(682): n is a, c, g, or t
ttttttttttttttttttwaaagtggaagcttgtttaawattgttctaccatcctcctgaaaggcataataatttgagttacatatctgaactgattggagtcacasaatcatarctcctttttgcatttamcaatatatacaatataaaataaatacatttacacaaatggacatttgctggagcacacagtatggtacacatcacaaaaatatacaattgattgctttacagatgtgatgcccatctacagctatagacatggtttcattattattattaattattattatcattattatttttactattggctataatgcaactcctggatcattgtaagcagtttaaattttgttttgtccatttaggatctttgcacataagactgccataaaatgttgtcycaggcaggtaaacagagatgcttaaataattaaaatacaatcaccaacatccattttctcttctataagaaaaatagcagttttaaattttttatatcttttatgtcatcatttaaatgcaaaatagtggaataaatacaacaatctgacttgattaaaacacgaagagtcactacaaggagccaaaacaatcatatcgccttaaataagaacaaacctaaaaggaaaataaaactgtaaattgcatggctaaaacatacaccttggtatcttcncgacagctggcattaactaaatggtcttgcta

SEQ ID NO: 1653 - DNA, 1051 bp, Rattus norvegicus
  misc_feature (934)..(934): n is a, c, g, or t
ctctctgtatgcggtcctgtaatacatattcataaagatgtaagtaagagtagttatgagttgagtctctatttggaatgatggaatgttctggaaatgacttggatgagattacacaacagtgtgaatgcactaaaggccacagaatcaaattataaatgaatgaaactgtcaatcttatattaatgagatttcatcctggggccaggaagggcatgtctaatgtctaagtaatgtctttaaagttctgtctctcaacggaaaatgttttattctaaattggcttttgtgataatkkwtkwywwwtttkwtwyywywywwhcacttaraaatttttatttcaaaacaactatggaagtttgtctagatctccagctggtgacttattgcttgattttacttctaggccatcggtcaaagcgaactaaagctctttgcccaaactgagacagtcakacagggaaagctggagggagaagagacttcctaaacaacatcactatttccaggaaggctcttctgcmytcsyraaacctgtactttgattcctaatatcaaagctggctttggktttttgtttygkttaaaatgacctttacactatagagaaacagtactgcaaatyaaggattcttctcctggcmswmrtgyccggcmaagctttcccttaatcaagcaaacccactatgcctatcyatgtcacatggtctgctatggsggaaagmckctgsckcttctaggccttgtctcaggatccacacatcagacactcctctctgttctccaaagagcacaccatggctgctgtgttcctctccttctcttcttcctccttcagtgccttttccttatctttcagcttttcctygtkcmgagtgaactggattggattagcggcaggtcttgtccttaaataatacatcccagtctttanaccctgcttccaaccgtagaagtgcatactagtgagtttgccatagttgggctcagcgatatggatgtttaaagactggctttgatcgatgaaagcactctctcggctgcatcttga

SEQ ID NO: 1654 - DNA, 1323 bp, Rattus norvegicus
  misc_feature (514)..(514): n is a, c, g, or t
  misc_feature (555)..(555): n is a, c, g, or t
  misc_feature (581)..(581): n is a, c, g, or t
  misc_feature (601)..(601): n is a, c, g, or t
  misc_feature (665)..(665): n is a, c, g, or t
  misc_feature (669)..(669): n is a, c, g, or t
tttttttttttttttttwkwytgtcttttgatggtcatttgtcccakccacccasaatccattattcatccacccttccataagtgtcccattcaagccactaggccatctgagagcaccttgccctgattggmagcttaggagacagctcacartcacrgggtggtaattttagcctggtrttcactggctggggtagagtccatgttgaggctgtgctaaatattcattakggacagtgtggcaccttttgyagttcctgtccccatgaagggtggccaactggagccggggatcakggaacaatggattctggccggcgggttaaatagcccaagtgtcatcctagagcataaaggagacctagtgtggtacctgcctgggatamggcccyagtgrrywywkwywbtkkbdwtytkkhwkywkywkkgrkgctcaaaacctwtattgggccattgggcatrtgacatggkgctctyaragktgatctcmtgagatakgaaataacgggtanmrawwkacagggccctgggcacaactggygcaggccttyanmagggaytadsggwtgcatgaaggmnwmryggwartggaasggmanwkgctgtkggaaatgggcartgsgaadactytgggghcctcmaktgtttgasagyaaggtatangymnrcwkvagatgkkrrsaggggaasysamgggakcckawsgtsgggaaggggctttgggttcaragtccttctgtcctgaccttgggagaagggctttcactttctavaaagacccaagtgtaccgtctagctgggactggctagggtcctagtarcaccacagatgggaamtsgtcmagagatggtakagcatggcggcgcymwcagwycsarykswtgracctgtcgaagaagctgggctgggctagactgtcgaagtctttctcccggaagatggccgccctgtcacccaggctgatcttggtaagtacatccatgtccacatcaccacccacagcgaccacggtgggcaccacattctgcttacgcatggagtgtacggactcctccargctgtcgttgcccgtgacgccgtccgtgaggragacgaaggacagctccgcgtgacgccgggccccacccgtgccccccgcaccacgttgttgatggcgtgcacgatgcctgtgcccacgtgcgagaaagaattgaggtaggtggttctctccagggcctcgtggatggtggtcacattgtaggtcaacgggaaggccacctgttgctggttctggcttccatctgttccgttcttgcctgctagacccggagctcccttccg

SEQ ID NO: 1655 - DNA, 680 bp, Rattus norvegicus
cttccccaagacagagagctgaaccgcgagtggccaccaacagcgaaytggtgcagagcggcaagagcgagatctccgagctccggcgcacgatgcagaacctggagatcgagctgcagtcccagytcagcatgaaagcatccctggagaatmachkggaggagaccaaagsccgttaytgcatgcagctggcccagatccaggagatgatcggcagcgtggaggagcagctggctcagctgcgctgcgagatggagcagcrgaatcaggagtacaagatcctgctggatgtgaagactcggctggagcaggagatcgccacctaccsccgtytgytggagggcgaggatgctcacctttcatctgcccaattctcctcatcgtctcaattcycctctggctmtcaatcatccagagatgtgacctccaccaaccgccagatccgcaccaaggtcatggatgtgcacgatggcaaggtggtctccacccacgagcaggtcctgcgcaccaagaactaaggctgctagatgctgctcargcttgaggggctcctgcgtcgatgcagatactgktggaagagcccctscattgtccmkacatgcttcaccccctgcttgaccctcgtcmtggcaagcaataaagcttctttttytgwgttgcmmaaaaaaaaaaaaaaaaaa

SEQ ID NO: 1656 - DNA, 679 bp, Rattus norvegicus
  misc_feature (660)..(660): n is a, c, g, or t
gccacagcattggaggtgcttcagtgctggcagtggcagaggcatcagcagtggactcagctcctctggtgcagctcttccaccatcaagtacaccaccacctcctccaccaggaagagctacaggccatgaattctgtctctaagagctttacyyywrwsccagakcacaggctgcagagcctttgctcasagycctgtgctcagggscttctccttgctagacaccaacctytgctstyttctyktgytgaggaaawtgkgtcsttgtgcycatctstctgtccccackgcwcrwsscttgatagtcatgctctgagctcacrkcaygakkcrsacacrmkkggtgyttcatgytgtatttggtttccaggctcctgcctyyytacctytaacmctgaggcykcctgtgaaagggtgtctctgtcattttaawtcttgramtcattgtctgggtcctrytcaagaaatgagcmcctcttywttagtktycaatggcctgtgaaaccccatttttcaacmtcwtaaacctttttrtaagtaactgtgacyscccagtcactggtcctgtgakgtrgamtytgwgctcawgtgatgtcwktgctkttcttgrtgctstttgyttysttrtawtygytaaataawgswgrtyyhtrahhdnddawmaaaawaaaaaaara

SEQ ID NO: 1657 - DNA, 1007 bp, Rattus norvegicus
atgcggacccagcagaaggtgcagatgccccgcttggccgcccggtctcgggcccggtcccctgctcaacacctaatttcagcgggacatcaagtttagggagaattgtccacaggatcgggaagaattgggtcacaatacctggcctttccttcatacgctggcctcctaatacctggacatgcccaggccagaacaacassaggatatggcccagttcatacatatattttccaagttttacccctgygaggagtgtgcagaagacataaggaagaggawagrcaggagccagccagacacaagcactmgagtgtccttcagccagtggctgtgcygcctkcayartgargtgaaccggaagctgggcaagcctgattttgactgctcaagarttgaygagckatggcgtgamgsctggaaggayggctcctgtgactaaggattaccacagaccgtgcagggcaacgccgggttctatgggcaacagcctgactgacgattaaagtgcatctgagccaaagcttgtttctgtggtgggggagggatccctagaacactgcctatgggaaccctacccacagactcagaaacggaggtgcccactatagacagttgggtggcttcctcaggtcttawagccccatgggactgaagatgagaggcaggagtggtccagggcaccccataccccttatgatacccattatacatttgggacatagttgcctcaaaggaaggtgggctagaccattgccttcctactacatatccccagctgcctacagaactgtgaccctggcaactctgccatttcagaattgaagcagggttccagctctagttgggtttttctcttagggtaaaccaaccatggtgcccactgtcagcctggcacatggtcttctgcagccaggacaaacatgtcagcagaggatcctgggaagggcttccttagcgtttgagaccaaaataaaatgaagtgacttaaaaaaaaaaaaaaaaaa

SEQ ID NO: 1658 - DNA, 709 bp, Rattus norvegicus
ttttttttttttttttttgcawtcaaattttattcatcagaaaracatgattayttcaastcaraataasggacattattcaakttttgttccaactcggyacaccagctgtgtattcctatggtatccactctcttcagccttcctggtggycacsakggtgggtggtcaggcaaggcagggctgcagtcaccakcaggatacacacattccacaattctgtaccataagggtggkccacgtakcaagagtakggttgtgtgcccasaggatcagtcgtcgcavgcgggtcagccctgagtcttgaccaractggvctgraaaatggccactgaggwcagccaatadccggrgtgtcarcaaactctactgtwcatagctctagggtcccattactgcagggtgacgactccagttctagcactgtgatgttgtttggrgctgaagtggtcargatgttcctyggcacaaacaaggtcatttgtgggccctttgtgggccagtatcgcccgaggttaaagccattgatccatacttggcccttgggccatccgggaaactggatgaaggtgtcctgcggcaggtctgggatgcccgaggggatggagaagttgcccacgtaaaaggtggggagtgtgaaatttgaagaacgtaaggtcgagtgtccatcgaggtgaccctcatcagcgggctcccagttcccaagatg

SEQ ID NO: 1659 - DNA, 1325 bp, Rattus norvegicus
cacgaggcgatgatccrtmsacttcttcysyccwgcagcgaaggacagcatgagcacagctggmaaagtaatcaaatgcaaagcggccgtgctatgggagcctcacaagcccttcaccatcgaggacatagaagtcgcacccsmcaakgmmcwtgamkttmrcmywmakatggtggccaccggagtctgccgctcagaygatcacgcggttagtggatccytgttcacgcctcttcctgcagttctaggccacgagggagctggcattgttgagagcattggagaaggggtgacttgtgtgaaaccaggtgatamagwcatmsmgctgwtctctccccagtgtggaaaatgcaggatctgcaagcacccggaaagcaacctctgttgccaaactaagaatctgacacagcctaagggagctttgctsgacggcaccagcagrttctcctgcaggggaaagcccattcaccacttymtcagcaccagcaccttctcccagtacactgtggtagatgacatagcggtggccaaaatcgatrcggctgcaccrctggacaaagtctgcctcatcggctgtggcttctcgactggctatggctctgccgtccaagtcgccaaggtgaccccaggctccacctgtgccgtgtttggcctgggaggtgttggtctgtctgtcgtcattggctgtaaaacagcaggagcagccaagatcattgccgtggacatcaacaaagacaagtttgcgaaggccaaagagttakgtgccactgactgtatcaaccctcaagactacaccaaacccatccaggaagttctccaggagatgactgatggaggggtggacttttcatttgaagtcattggccgtcttgayaccatgacttctgccctgttaagctgccattcagcatgcggtgtaagcgtcattgtcggggtgcctcccagtgcccaaagcctytccgttaaccccatgtcgctgctgctgggaygcwcmtggaawgswgcwwtmytckkcgggtttaagagtaaagatgccgtcccmaaacttgtcgctgacttcatggctaagaagtttccgttggagccgctgattactcatgttttaccttttgaaaagataaatgaagcatttgacctgctccgtgctggaaagagtakcyktasmgtmytgacgttctgagaacacatgaatgccttcccggtttctgactcctccgcctaccgaatcaagcgccagccacatcacaaccttaaccttgctcttcagagacacacagccaataaagcacctgtgcaagcwwwmmrwraaaaaaaaaaaaaaaaaa

SEQ ID NO: 1660 - DNA, 1150 bp, Rattus norvegicus
cgcatatggagctgaagtggaaagagcaagtgagaattgctgagaatgtaaaactcgaactcgctgagctagaggacagttacagtctacagttggcagagaaagacaaagaaataaattgcctggcttcatttttggaaaatctctcaagggagaaggaacttacaaagagtttagaagatcaaaaaggaaggaaaatggaaggccagagccctcaacaagtctcacggtgtcttaacacctgctctgagcagagtgggctcctccctacactggcggctgtccagccagttcttcagtatgggaacccttacaccgcacacgagacaagagatggagcagatggtgctttttatmcagatgaaatccagaggccacctgtgcgcggcccatcttgggaagacaacgttgtctgtasccagmctgctcgaaaccttagcaggccagatkgtttagaagacccsgmggatagcasagaagatgagaatgtgcccattcytcytgatcmagcaaatyagcatttackaggkyatggagcasgcttttgctttgawyccagctttgatgktcacaaraagwgccccctctgtgaatwaawgttccytcctaactatgatcagatcaaawktgrrgmacasgktgawagtcactggaaggtgtgcccaatgtkcagcgagcagttcccacstgactwygaccascagggctttgaaaggcatgttcagacccattttgatcagaatgttctcaacttsgactagtttttagtgwsaggtagtaaaatttagcagttaaaaarcaacccaaaactcagatagaggctaaggagactgcgggcctgatgccctgattgagaactttagrgcgwgstktcrrtagggccagggtmcrgctttgactacaataaatacaggtttaatctgktaaccttgtctgctwtaaggaaagagtttstgcatttctatctctaccctgttagcaaargtgtatgaagaacacaggagktatyttaatgtwaaaaytgaaammatatatgtartagttaattmcctarcacaatcagatttacaagttcctgttcaccttggtgattgagcatgactaytattatgtaataaargcattgatcwkramaaaaaaaaaaaaaaaa

SEQ ID NO: 1661 - DNA, 656 bp, Rattus norvegicus
ttttttttttttttttttkkywgaamatcamgaaactttattgaakcatctattctttgtvrtaragacattgagaarccaaagaatakwragaacarggtakggaggaagaggattccawtcaagagagatgggggagggtccaccctcaggggggrcaagrggactgggmttcacatccttcagtcctctcatcctamaggtgsyawcarctctcctcctgaaggccagggaarggacgccaggctgarttaatmctykygsmaatccgggcgaccaraarwggwsggggaggyggwtgtsttgkwkgtggyavyrctwtkksytccagtgttgaagccagtcatcttagcatcctggccctctarcaggctgcggtargtggygatctcctgctccagccgtgttttgatgtccagcagcatcttgtattcctsstystggcactccatctcgctgsggagctcgctcasctgggcctcgatgctgctgatgagagcctggatctgttgcagctgcagggcgtagcggcactccgtctctgccaaggtactttccaggccggctttcatgctcagctgggattgcagctcaatctccaggccctggagtgtgcgccggagctctgtgatatctgtcttgctggtctcctcgtg

SEQ ID NO: 1662 - DNA, 1089 bp, Rattus norvegicus
ttttttttttttttttttkcgcwdtywywwywttttawywcmctggrrawgktctccakcgtrdagcagtttatttctttcagctaagaaacctaaggaaggaggaggagcarccadcggtgaggtgctargactcarggtgctaccarccarctcgggtttgggctgcadcaragcarggctgtgtggakcadgcadagctgctgcgtgagcaaaakgbcgccatgaagayattccaagcggcttccaggmassagvctgagcgctgacacgcatgtggactgakcastctggttggytgtctctcawcactggtgtttsctaragctttccattggyaawtgsagyctcctggaactgagggacaaaggttttgaaataagcctttgctctcttggccatttcatttccatcccatctggggctgtatgggtaattkttctgtgcttgggagtaaagctgtccactgttggtaaagtggtagacggactgaaacgtgagggtyggctgatctcgagggaaaaacaraggcaggtcaatgtgwacaagaaaacamawctctktccacatcagcagcagtgtaagttttgtgaagccttctgcatcatattccacgacacctgtgccaaagtgactgaggaaagcagcgatgtactctcttcttttgtgatagccttgaatcacatactgcaccttgttggtgagcaggtggcacacttgaggcacataatcaatgagacatcctcctcctggaaaagcagggatatggagagccgmskmgyscccgagggcatgctcaattcggggtgacaagtacaacttggggtacacctgggtggcttcagtatcctcaaagctgacagaaaggagagccacatcttctccgggatcttcgtttacatccttgagaaggtacgtgggaatgttgctgaaatctactggtaacttcaacagaaaacgagctgaaaattcaccagtccagttgtttttcttcccagcataaatttccatgttctctccatactgaggctcttccaggagcgtctggtactcaaacatgaggcgtgagctctcacgggagggcgsccg

SEQ ID NO: 1663 - DNA, 668 bp, Rattus norvegicus
ttttttttttttttttttcaggktgcaaagacagtactttttcattgagaaccgacggaggagtagggaagggaaatttacatttggctagttgcccctgacagccatggagaaacaagcakcttctgttctagggagggcagggctatgaagctgcycttcaggccagtacagcccctctctactacacttcawwcaggcagggccaagtttgtaractgcagccgctctgtctcttggcaratgtactgctccactgtatcacactctgctaggaacacctgaacctttttcaccaaattcttcctttttagcctgctgtctttaaagttttctggtaggaccattgtgtcaatctcctccaagatcttcatgaattgctcaattgtggcctttattttcctatcaagtctgcagagagcctccgcttgtaattccttagccagaaaaccctgctggatgtcagaaagctctttattcaactcttccaggtggttagctgtcttctccacagatacctccaagtccttcagctttttcaactcagcctcttcttctggattgctcttttcaccaattaacatgactcggcaaccattttgcattccaagtgctgacaagggtgtttccatttctttcagagatttgcccttaaatatgagcttctg

SEQ ID NO: 1664 - DNA, 5102 bp, Rattus norvegicus
ctaccccttacccctcactccttccacctttgtcctttaccatgggacccacgtcagggtcccagctactagtgctactgctgctgttggccagctccctgctagctctggggagccccatgtactccatcattactcccaatgtcctgcggctggagagtgaagagactttcatactagaggcccatgatgctcagggtgacgtcccagtcactgtcactgtgcaagacttcctaaagaagcaagtgctgaccagtgagaagacagtgttgacaggagccactggacatctgaacagggtcttcatcaagattccagccagtaaggaattcaatgcagataaggggcacaagtacgtgacagtggtggcaaacttcggggcaacagtggtggagaaagcggtgctagtaagctttcagagtggttacctcttcatccagacagacaagaccatctacaccccaggctccactgttttctatcggatcttcactgtggacaacaacctattgcctgtgggcaagacagtcgtcatcgtcattgagaccccggacggcgttcccatcaagagagacattctatcttcccacaaccaatatggcatcttgcctttgtcttggaacattccagaactggtcaacatggggcagtggaagatccgagccttctatgaacatgcaccaaagcagaccttctctgcagagtttgaggtgaaggaatacgtgctgcccagtttcgaagtcctggtggagcctacagagaaattttattacatccatggaccaaagggcctggaagtttccatcacagccagattcctgtatgggaagaacgtggacgggacagctttcgtgatctttggggtccaggatgaggataagaagatttctctggccctgtccctcacccgcgtgctgatcgaggatggttcaggggaggcagtgctcagccgaaaagtgctgatggacggggtacggccctccagcccagaagccctagtggggaagtccctgtacgtctctgtcactgttatcctgcactcaggtagcgacatggtagaggcagagcgcagtgggatcccaattgtcacttccccgtaccagatccacttcaccaagacacccaaattcttcaagccagccatgcctttcgacctcatggtgtttgtgaccaaccctgatggctctccagcccgaagagtgccagtagtcactcagggatccgacgcgcaggctctcacccaggatgacggtgtggccaagctgagcgtcaacacacccaacaaccgccaacccctgactatcacggtaagcaccaagaaggagggtatcccggacgcgcggcaggccaccaggacgatgcaggcccagccctacagcactatgcacaattccaacaactacctgcacttgtcagtgtctcgggtggagctcaagcctggggacaacctcaatgtcaacttccacctgcgcacggacgctggccaagaggccaagatccgatactacacctatctggttatgaacaaggggaagttactgaaggcaggccgtcaggttcgggagcctggccaggacctggtggtcttgtcactgcccatcactccagaatttataccttccttccgcctggtggcttactacaccctgattggagctaatggccaaagggaggtggtggccgactcagtgtgggtggatgtgaaggactcctgtgtaggcacgctggtggtgaaaggtgacccaagagataaccgacagcccgcgcctgggcatcaaacgacactaaggatcgaggggaaccagggggcccgagtggggctagtggctgtggacaagggggtgtttgtgctgaacaagaagaacaaactcacacagagcaagatctgggatgtagtagagaaggcagacattggctgcaccccaggcagtgggaagaactatgcgggtgtcttcatggatgctggcctgaccttcaagacaaaccaaggcctgcagactgatcagagagaagatcctgagtgcgccaagccagctgcccgccgccgtcgctcagtgcagttgatggaaaggaggatggacaaagctggtcagtacaccgacaagggtctgcggaagtgttgtgaggatggcatgcgtgatatccctatgmmgtacagctgccagcgccgggctcgcctcatcacccagggcgagagctgcctgaaggccttcatggactgctgcaactatatcaccaagcttcgtgagcagcacagaagagaccatgtgctgggcctggccaggagtgatgtggatgaagacataatcccagaagaagatattatctctagaagccacttcccagagagctggttgtggaccatagaagagttgaaagaaccagagaaaaatggaatctctacgaaggtcatgaacatctttctcaaagattccatcaccacctgggagattctggcagtgagcttgtccgacaagaaagggatttgtgtggcagacccctatgagatcacagtgatgcaggacttcttcattgacctgcgactgccctactctgtggtgcgcaatgaacaggtggagatcagagctgtgctcttcaattaccgtgaacaggagaaacttaaggtaagggtggaactgttgcataacccagccttctgcagcatggccactgccaagaagcggtactaccagaccatcgaaatccctcccaagtcctctgtggctgtgccttatgtcattgtccccttgaagatcggcctccaggaggtggaggtcaaggccgccgtcttcaaccacttcatcagtgatggtgtcaagaagatactgaaggtcgtgccagaaggaatgagagtcaacaaaactgtggctgtccgtacactggatccagaacacctcaatcaagggggagtgcagagggaggatgtgaatgcagcagacctcagtgaccaagtgccagacacagattctgagaccagaattctcctgcaagggaccccggtggctcagatggccgaggacgctgtggacggggagcggctgaaacacctgatcgtgaccccctctggctgtggggagcagaacatgattggcatgacacccacggtcattgcagtacactatctggatcagaccgaacagtgggagaaattcggcctagagaagaggcaagaagctctggagctcatcaagaaagggtacacccagcagctggctttcaaacagcccatctctgcctatgctgccttcaacaaccggcctcccagcacctggctgacagctatgtggtcaaggtctttctctctggctgccaacctcatcgccatcgactctcaggtcctgtgtggggctgtcaaatggctgattctggagaaacagaagccagatggtgtctttcaggaggacggaccagtgattcaccaagaaatgattggtggcttccggaacaccaaggaggcagatgtgtcgcttacagcctttgtcctcatcgcactgcaggaagccagagatatctgtgaggggcaggtcaacagcctkscckggagcatcaacaaggcaggggagtatcttgaagccagttacctgaacctgcagagaccatacacagtagccattgctgggtatgccctggccctgatgaacaaactgraggaaccttacctcaccaagtttctgaacacagccaaagatcggaaccgctgggaggagcctggccagcagctctacaatgtggaggccacctcctacgccctcctggccctgctgctgctgaaagactttgactctgtgcctcctgtggtgcgctggctcaacgacgaaagatactacggaggtggctatggctccacgcaggctaccttcatggtattccaagccttggctcaataccgggcagatgtccctgaccacaaggacttgaacatggatgtgtccctccacctccccagccgcagctccccaactgtgtttcgcctgctatgggammstggcagtctcctgagatcagaagagaccaagcagaatgagggcttttctctgacagccaaaggaaaaggccaaggcacactgtcggtggtgacagtgtatcacgccaaagtcaaaggcaaaaccacctgcaagaagtttgacctcagggtcaccataaaaccagcccctgagacagccaagaagccccaggatgccaagagttckatgatccttgacatctgcaccaggtacttgggagacgtggatgctactatgtccatcctggacatctccatgatgactggctttattccagacacaaacgacctggaactgctgagctctggagtagacagatacatttccaagtatgagatgsacarrgccttctccaacaagaacaccctcatcatctacctagaaaagatctcacactccgaagaagactgcctgtccttcaaagtccaccagttctttaacgtgggacttatccagccggggtcggtcaaggtctactcctactacaatctagaggagtcatgcacccggttctatcatccggagaaggacgatggaatgctgagcaagctgtgccacartgaaatgtgccgctgtgcmgaggagaactgcttcatgcatcagtcacaggatcaggtcagcmtgaatgaacgaytagacaaggcttgtgagcctggagtggactacgtgtacaagaccaagctaaygacgatagagctgtcggatgattttgatgagtacatcatgaccatcgagcaggtcatcaagtcaggctcagatgaggtgcagkcaggtcaggaacgaaggttcatcagccacgtcaagtgcagaaacgccytaaagctgcagaaagggaagcagtacctcatgtggggcctctcstccgacctctggsgrsamragsccarkwycagctacatcattgggaaggacacgtgggtggagcactggcccgaggcagaggaaygtcaggatcagaagaaccagaaacagtgcgaagacctcggggcattcacagaaacaatggtggttttcggctgccccaactgaccacmacctccaataaagcttcagttgtattttmmmmrwmaaaaaaaaaaaawaaaaaaaattggaagc

SEQ ID NO: 1665 - DNA, 1205 bp, Rattus norvegicus
ttttttttttttttttttwhdawcbaaacaawagkgctttattgaaaaaaggttattttaaatggawacaaagttkragtgtraaatgttttcaaaatacatttctacaagtwmcttctwagtraaaragcaagtatttgtwagcaaaagcagtaammytgaagggrattrraattgtggctgmaaracytmacatgtacmctgccatcmtwaratgymarctggtcytaartggcaccyttaactcacaaatgggactcacactgaatgcttgggaattccttcctwtttgkkgghytttgwtttwaaatctttcyccaacaaaactaakatcaaaataakccammmaaaggaccscacgggtccactttarartcactgacacttttcctcstarggacttcamacagtgaacwtccctgmctgckcacagtgatgckacktkaakagscaaagtgagcmrmtgcatatcctttgtmattgatamscmytyktrmscttcactwtattcgtcmtattgaktttkggcytgaattaaatgtaaatcymtgcctcatcawcmatyargcacttyytyytgcagcawatggaaacacacagctagcwccggctstgcttctycacaccmtgcytmcttcacckgcctmttcctttctcagaccactgactgacwtgagaagacatggtaraaggraagtgccgragtgtaamccaggcctgactctgctcacctgcttggggcacagatctgcccctttcaatcatgtcatgaagacatttatactacwcaaactgaagaaaatgacagtsytggaaaacagatgagacagtctgcmcatkaaaaamcaaamcaaavcaaamcawavmraaaaccarcccagcdctgttatttccctttcaatagragaatcactgaaaaggggaagagttagaggaaaacctggcaggcatttgggctymaagtggctttttgtgcaagagcacacccaatcacaaggctgggtttgtgcaagagcacacccaatcacaagcctgggtttggacccacgccagccgaagactatgatttccactgccatggctgatcttttgcacctagttatagaaagtacattaaagtgcagtataaaatataaaaattttggtttctttaaaaaaagtattgcctttttagttgagtaaaaagtttactgactcttccttat

SEQ ID NO: 1666 - DNA, 872 bp, Rattus norvegicus
tttttttttttttttgacagcattttgtgtgacttaagctggcctcaaacctgttctgtaactgaggacaaccttgatcctcctgcctccacttgtcttcctatgtgctgagattacaggtgtgtgtacctccaccactcctggtttatggggtgctggggatcaagcccatggccctgtgtacattaagccagcaccctacaaattgagctacatccccaggctgaacaggttttctatgcctgactggggcctgggctgcaatgggcaaagggtcatgggctcaccagctggggccacatggccaatgggtggcaargagctgtgctatgggcatgccactgggtgggmagcttcggtcagggatggtcttcctgasgaaggactcgaaggttcccctggcatggcccttgccagsccttgccaccctttggctggttctaagacytgttctttcatgctgtgtcccaaccctcacccaaggcattasgrcaagaacatacagattaaggagtgcgagttgccatggacgtggatgtgggatcaaggacgattctgggacccagaggattcccagaagagctggcagctctctccagttctttactctttgatctcattacacaggaaggctctgttgatactmacctgtccttggaccctgtccccatccctagtgacttcccctgtgagcccagagagcctgtaagccagcagccatggctgtccgggggacacctgcccctgggggtgatggtgctcactcstktctgtttactgccactggggccacctttccttctgcattgcctatttaagctgtcctttaaaataaacaaatgtatttcarwwwwaaaaaaaaaaaaaaaaaa

SEQ ID NO: 1667 - DNA, 833 bp, Rattus norvegicus
ctccttccccgtgcccctgcagctcgagcctttgcatcctctgggtctgcggagcgcgggtgctggtaggggagccggtacttycacaggctcggggctgccaagaaaaggcaaaggggtgggcagtacaggatccctccctyctacctcaggcctgatccatcatggacttggtatcctaacgctyyttagcggactctggctttcacacatgttcttcacagagctcacsgctgtgggcagaggcagaacgcctctccctggccattgaaagacaagagagtcacatyctagcttttgcacaaggctcttgtggttaggaataggttagggaaaggtcactcctgatttcccagcagccagtctgtctgtggagatttcttgactccttggggactctgagaactgttcccaatatcagaagktccctcttgagttctccttctttcagctctcggcatggccacagtgtgcgtcttggtgggcagtgccatgctggagagcagatctccgtgctgtggggcccagggggacctacttaggaggggatatgggagactytattactggkcatagtgacattgccctcaccacaatccctctccaaagwggkcgtctttctttaccttgtgtcttctcttgtaaaaataaaactcaaaataaagtgtcaagtwaaaaraaaaaaaaawraaaaagctacaccaactgtgtgaagtgcataacgctgtgacgcttacctgcattgtgaatgctatcttgtatgtggaccctgtcaatgcgccacacacgtgccgaataaagactgactcagactaaaaaaaaaaaaaaaaaaa

SEQ ID NO: 1668 - DNA, 667 bp, Rattus norvegicus
ttttttttttttttttttgbcytgkgaactttaatgtctatgacgaagtcctttgagtaatgccccttccttgccaatccaccccttatcagtctgtggctagcaggctccavagtataagtcccatgccaccctgtggtaaaacctattctgtccccaaaaccagcagcgtcagaggccagggccatcasggtadagtgcagggatgcgtctcgtcaggagscacctggctggggacggttcccacaracctggtcctgtgtakgtgacctgcagtgcccctcavgatgctakgcgttgggccastgggaggggaaccgtggcatcccatggktctgtcttcaggcctggkcagagctctttgaaggtccaatgctcasctgyksgyrmcgwmwtgcctcatgcgctgtctctgggaagaaaagctctcggcmtcgttkymsagtgtcctgargggagaccacgctgtggccgactgtccgggggkycgcataratctcaaagtcmytcsyrccaggactggtctcatttccaaagaagtggatsrtgycgaagctgtcttcatccagactgtccaggcagtagcgcttatcccagccctcagggaagacatcgaagcttatcatacctcctcgggagaaccttagccccttgccagcaaactctg

SEQ ID NO: 1669 - DNA, 960 bp, Rattus norvegicus
  misc_feature (425)..(425): n is a, c, g, or t
gcccatttatactgtgcgcagccacagggtggttccctgtggttctccacccgtgccccgtgatgctggctcccacagcttgtcttccagtgtccaacatcagggacgcctcagcctggacctgagccacagggcctgcagtgactactctgagatgcgagcctcccagrgkwccarctskctgccckmcagtgccsgcmwkggrtcttcccagcgtgagttcaatgggctgggtgactgtctcvscamgaksttcaagtctgatggchtgaagggtctctaccagggtttcagtgtctctgtgcagggcatcatcathtacagagctgcytacttcggagtctatgacactgccaaggggatgytgccagaccccaagaatgtgcacattmttgtgagytggatgattgcccagagtgtgacanccgtggcggggctggtgtcmtatccatttgacactgtccgtcgtaggatgatgatrcagtctggccggaaaggggctgatattatgtacacggggacagttgactgytggaggaagattgcaaaagatgaaggagccaaagctttcttcaaaggtgcttggtccaacgtactgagaggcatggggggtgcttttgtattggtattgkatgatgagatcaaaaaatatgtgtaatgctcaagttcacaggttcacagatccattgtgtggtttaacagactattyttarggawwtaaaaaaagacagmksmygsdtaaammmrrammawawrraawamhwmrraaaaawrmwwmawdrrdwattcatttaaccacaaaagtattttgtatttattttacatttagattcccacagcaaacagaagatagcttatcatacttgttcaattaattaactgaagaactgatgctgrataagtaactcaatgtgactcattaataaagactactcagtacamwmaaaaaaaaaaaaaaaa

SEQ ID NO: 1670 - DNA, 1320 bp, Rattus norvegicus
caaaagctggagctccaccgcggtggcggccgctctagaactagtggatcccccgggctgcaggaattcrksrcggccgmcttakctgttcgtggagccgtctctgcaccggcctttgggccgrwggcgctcactccagactgggaaaaccgagaagtctccacagggaccacgatcatggctgtgcaatttgacggsggcgtggttctaggagcagactccagaacaaccwstgsgtcgtrcmkcgccamkmgrgtgmctgmcaagytgacccctatccasgatcacatyttytgmtgccgytcaggytcggcagctgatacccaagcagwagctgatrctgtcacgtaccagcttggtttccacagwattgagctgaaygagcctscabtagtgcacacagccgycagtytytttaaggagatgtgttaccgsyacagagragatctgatggcaggaatcatcatcgcakgywgkgaccctcaagaaggagggcavgtgtactctgttcccatgggaggtatgatggtaagacagtcctktgccatcsrakgctccgggagctcatatatctatggctatgttgatgsyacctatcgggaargcatgaccaargatgaatgtyygcaattcaytgccaatgctcttgctttggmtatggaacggsatggctccagyggaggastgatccgcttggcarccattcaacagtcgggggtagarcggcaggtgctttygggagaccmgatccccaaggtcaccatstcmactttgccacctccctgaagcctaggattcccatcccgacgcrcaagctawtaaacagattgtcamrgmvmwarrammaammmamaammwcagrsrrsrcmcrrwaccmmayycsmccayasyacacaaagacgacacaacacacaaaaacccgacggggcggcccggcacccacacgcctacagacagcgatacacatccaggccgataatacacaagcacagactggaaaccccgctatacaccccaacagcaggacaaccccataccgcgcgtaaggaaaggcgccgaggcaccaaagtcacaaaacgcagggcctgaccacctcgacaacgccaatggaaccccaatccaagcgaagaaccgttccgaaccatgtttgaaatgaagccccagcccgagaaaagggaaaacccaaggcgcgccaaaccaggccgaaaggggacgtgcataccgccaccccaccaccagccagccagcagcgacccagaagccacccccgaacaccgcccacccacgcgcacccacccacaaaccacaaaccagacgaaa

SEQ ID NO: 1671 - DNA, 784 bp, Rattus norvegicus
ttttttttttttttwhytgggacaaacaccatcttttawttttactattcttccagctctgacaagagaggcgagagatttgcctgaagtcacacagcacttagcagtagggttactgggtctcttcctcacccggttagtccccttgkatctgtaacataccactacttctgtaaaaacttaccatttaaggaaatgkktwwwkwyywwwktyttaagtcaaaatgtttaatcatgacctgagggactgggggacatggagacagtgctaggagttaagcaagactcaaaggcttttagctcttcttgcccaagtgttcargatggcctggcakacatgacaggaggtcttcaccttccattcagaaggacgtggggttggaccaccakccttcctcacaaagggaccatytttctcagctgcctcagaaccctcagcctgccttcctggagaaggcaaccaggaatgagtgagtcattagccctgggtggtcctgggaaacaggaagaagggctggaggtgggaagctaatcaccaccacaatatacagccaaactggagtacaaggtcctagggaggagcagcccaagcaggagtwagtasgasaggtttgaaagctggccgctcagsmtystgmmcggtcacagccctcgcytctkccaagacctcatctggagcagacaggatgtgcagtgagcctggttgcatcttcttccagaggccagcattttctctcccatcacaggctgcaagtcggtmwggrtgwrgrwagacagcctcgtg

SEQ ID NO: 1672 - DNA, 663 bp, Rattus norvegicus
ctcagtgctgcctcaaaggggccccaatggcctggccattctcagcctctttgtcaacgtggctggcagctccaacccgttccttagtcgcctcctcaaccgggacactattacccgaatctcctacaaaaatkmkgcckactttcttcaagacctgagcstggagctcctgttcccggaatcctttggcttcatcacctatcagggatctctcagcactcctccbtgctctgagactgtcacstgratcctcmtygrcagggctytcaatatkacctccctccagatgcactccytgagaytcstgagccagaatcccccctcccagatsttccagagcctcagtggtaatggccggcccttgcagcccytggcccacagagccttgaggggcaacagggacccccggcaccccgagaggcgctgccgaggccccaactaccgcctgcatgtggatggtggtcctcatggtcgctgagactccccaacgaggattacgcccgcctgttctgagtttcctcaccaggggaggggaattcaccccaaaacaaagctattaaagggactgaatgtttmmarwwwmwmrrwrrwwwrawwawcagctgcgattgagaaatatctagatattaaaaaataatccttcccgaaaaaaaaaaaaaaaaa

SEQ ID NO: 1673 - DNA, 711 bp, Rattus norvegicus
  misc_feature (103)..(103): n is a, c, g, or t
tactggttgacatatcaaatgactatgcagccacgctgtctctgctgctcattgtgctggtggagactatagctgtgtgctacgtgtatgggctgaggagatntgaaagtgatcttcgggccatgactggccggcccctcaactggtactggaagaccatgtgggtgtttgtgagcccactgatcatcatcggcctctttatattctacctgagtgactacatcctcacgggaacgctgcagtaccaagcctgggatgctactcagggccatgtggtgattaaggattaccctacatatgcactcgctgtcattgggcttctggtagcctcctctactatgtgcatccctctggtagccctggggacttttgtcacacgccacctcaagagcagagaacagtttcccgaggcctgagaactagaagtcccacagaccacctaagtttcacagctactctctctctctatgtattcagcagtggaagtgctacagccctcttttagagccacaagtattttctgctccctgaatttataaaacaaaaaaattaattctaactcacacttaggtttttacttttgtttttgttttcaagacaaggtttctgtgtacccctggctgtcctggaactcgctctgtacgaacaaatctacctgtgtcccgagtactaggaataaagatttgtgccactaaaaaaaaaaaaaaaaaa

SEQ ID NO: 1674 - DNA, 992 bp, Rattus norvegicus
cacgaggcgcgtgcgcaggagacaggagagggacgaagccgaacctctgaaccgccgccaggtccgcttcggctccacgccgcccgtcgcgcctccacccgcgtccttctcctccgccaacgccgccgccgccgccgccgccgccatgggagtgcaggtggagaccatctcttctggagacgrgcgmaccttccygaagcgcggccagacctgcgtggtacactacacgkggatgcttraaratgggaagaaatttgactcctctcgggacaraaacaagccttttaagtttacactaggcaagcaggaggtgatccgaggctggramraaggrstagcmcrgatgagtgtgggccadagagccaaactgawaatctccccaraytatgcctatggagccaccgggcacmcaggcwtcatcccaccacatgmkactcttgttttygatgtggagcttytaaaactggaatgmcaraagtggsctcctcccttagstytrcacatggwtytgcmatggaggaatytggtacctccaratgggtgcacatgaatccatgggagcttttcctgatgtcccaccactctttgtatagacacctactractgaatgtgttccgtcactcagctttgcttsggacacckbcaygksctcttcccccttctgtatgtgtgttgacctwaactgtatgccataaacctcaarwwamwwwrwwwwrrrrwraaramwmarwwwmtgtctytgagatctaagtttccaatgaagtatattatcaagtgttaamarmamaarmaawrrattaactctagaataggaattggtgttgggggtgggatttgcaagaatttttattttattttatttttattttttggatgaaaawrrwawmwattatatattaagacattctgctactgtgctgcaaagccatagcagattcgagatgctgttgggggctggatttttctccagtgagggaagtcctgttaaacc

SEQ ID NO: 1675 - DNA, 811 bp, Rattus norvegicus
ttttttttttttttttttgctagaaaccatttattcacacacaaaaaaacagtgactcatgcccaaagatacatttcccagagtttaaataatctgtgttcactgaaggggaagaaagggatttcttaaacttaaaacaaaacaccgactccttttagccccatggcctaactccctacagatctcgccgcgtccacgaggactaggagagggagaagaggaacaacagcacattggcggtaaaactgtaaagggatgtwtgcatttaccatgttcccmtcattaggatccgctcagccaagttccaggcstcttcctcaggctgtagtggtcgcagkgaggtcccgagttgaatgcgagaaggaatggtgaagttccacagagaagaggcgtcattgaacccaaggacattgggcctgcggagggcargctgatggggaggagggtgggtgagtggggttctggggaggggagtacatcctggagctctcaaaataaggggtttccagtgaaatactgcagacggtccctgttcagtttcttttctttcattctgcgattctggaaccagattttgacttgccggtcagtgaggttgagcatccgggagagttggagtcttttctctttgtttatgtatacattaaagaaaaactcgcgttccagttcgcggatctggtacttggtgtagggacagcgctttttccgggacctctggggggccacgtgaagacccgggcgttgtgtccttgtccttgcttatgccgtcctactcgaaacacagggagcactcagggccttcggcctcgtg

SEQ ID NO: 1676 - DNA, 571 bp, Rattus norvegicus
  misc_feature (558)..(558): n is a, c, g, or t
tttttttttttttttttkktaaagtwtwwwwywwwywwtwwwwtwagatgaactcatttatttgacacattaagttatgcaaagaaaaatatatgcaactgcataaaaagaaccacgttttcatattattaaacacagcagtggccgaaaatgacgaattgtagaatgrmccccaggatttaatgcaaaaaatcacgccgtaragaaaaacgtcaggcctctaacttcacagaatccagcactatgcgggcttctttgtactcctcagcttcttccaagtccttttcgctctytagtatctgccggagatcagtgtaagcagcctytaaccggcgctggcagtctgggatcatcatccgggactcttgcaggatctstgcctgcttcttaatggsatagttctcaccatcttcagccttcattttctcaatcttttcttcttgckgcyktgcttctttttcatacatcactttttcytygrccagtcgcttcascactccggtcttgatcttgatctgcctcacgcgaggatccgccmtvgtsccbwmkgygccgcangaagcctcgtgcc

SEQ ID NO: 1677 - DNA, 869 bp, Rattus norvegicus
  misc_feature (815)..(815): n is a, c, g, or t
  misc_feature (843)..(843): n is a, c, g, or t
tttttttttttttttttwwywyywytywkbwgacatctgaatagttwaatcacttctcctccatacaggycacctggcakggctgtgcakcccaggcasgccctgctccagtgcgtgcctatgtcscagagcgcttctctcctgggctgcactctgcaggcgcatgcctttcctgggcagcccctgcctcttycccaaaggctgggctggggaaggccaatcactcttgctcctggtgcagctcttgaggctctctcttgagaggccctttctgagtaccccaccaaagggtgtctcccttccccagacagaaaatacagcaagagaagatccccagctggttcccccaggaccctgagctcagctgaccctccaactcagtttwmcagttgaggaccaactggaggctccttcctgcctgtctgtgtgatggtgattggctttaggctgaggtcctccccggcattcggcattcacaccaaacctgcccaccctcgtgtgggaaggccctggctggcctaatgtgacagcycgtcactgarctgctgctcttagtagggtggctaragtcctgtcaggtccacaatagctttgatgaagatgscgtcatcccgcacgtaggaattcttggcctctatcttggacaccgggcagaagagggggcagccactggcgatattcatgtcactgacaggcctctggaaggaggacgaagttacatcaggcctgaatgcgtcgatcacatsctckyggttgttatggtccagcaacattaaagtcaccttctgattaaaaggccattgtaagagagcatnattgggacctttcatcaccacgaagaanagaaacagatgagttccccgcccagt

SEQ ID NO: 1678 - DNA, 538 bp, Rattus norvegicus
tttttttttttttttytktkwwaaggcttcaaatgtwttttaataaggkgatgctgcattactgctccatttctcaraaaaattttcaaattgaaggtwtcaggaacaaatcttartacaccaataaaaatgcacagcgcaactacctaarataggcaaractaaragctactgtcaraccttcaacacacagcaaccctgtkccsaagattgtactaggcctatcaagaaaagctgtggacagcaacagcagacgcacgaaaktrtartccttacccaavaaraagatkgmgscwmgtkmmsacaagatttaagatatactaaaatgaaaacctckwrsmgaaaatgtcttssttacgacatgaaggggtcatatatgagatataacagaaccgtatgtwtgctgtgacctctgyskacrttgtctgaaytctcacctgggmstsratgsmsgaattgggctgggtcattggagcatgtttaggttttgtggtatacatggcartgtcyctsgkgyygaggggaataaagatgaaaa

SEQ ID NO: 1679 - DNA, 1439 bp, Rattus norvegicus
  misc_feature (517)..(539): n is a, c, g, or t
  misc_feature (1221)..(1221): n is a, c, g, or t
  misc_feature (1257)..(1257): n is a, c, g, or t
  misc_feature (1434)..(1436): n is a, c, g, or t
caaaagccggwwktcmggcagtcctgtcctgcagtcgcctgcctcttcttttttgcttcaacatgacagatgccgctgtgtccttcgccaaggacttcttggctggtggagtggccgcggccatctccaagacggcggtagcacccatcgagcgggtcaagctgctgctgcaggtgcagcacgccagcaagcaaatcacggcagataagcaatacaagggcatcatagactgcgtggttcgtatccccaaggaacagggagtcctgtccttctggcgtggcaacctggccaatgtcatcagatacttccccacccaggctctmaacttygccttcaaagataaatacaagcagatctttttgggtggtgtkgmmragaggacccagttttggcggtactttgcagggaacctggcatcaggtggtgctgctggggccacatccttgtgctttgtgtaccctcttgattttgcccgtacccgtctagcagctgatgtgggcaaagctggagctgaaannnnnnnnnnnnnnnnnnnnnnntgcctggttaagatctacaaatctgatgggattaagggcctgtaccaaggbtttaatgtgtyagtgcagggcattatcatmwaccgygctgcytayttcggtatctatgacactgcaaagggaatgctcccggatcscaagaatacycacrkcwysakmagctggatgatkgcacagtctgtcactgctgttgstggcctaacttcttatmsttkksacamgkttcgccgtmgkmwgmtgakgcagtctkkrcgcaaaggarcygatatcatgtatacaggcacgyttgrcwsswggcggaagwtcgmtcgwgwcraagraggcaaggsctttttcaaggsdkcayggbccwacgktytcaraggcatgggtggygcctttgwrswtgkcwwrwwwrrdrrrakcaasaagkrcrcataattatgycctaggtgtyctccccsrgaacasgsatgktgyawwawarvmmatattcttgaacattytggamarawtctytgggsywgtctgktttatyaatggsaacyatttaccagktgaaaagwgggaagsawtawtattyatbtgaccagtyttstyttaaagccattmcgatacatsmcartamtgatgsgactcaatyatatttyktatttcagkcactcstgataataaaaaatkgaagawatmamaatatccmvanbyhrmwvarhwhrawmarrrrrrmmrmwamaatsgnctattgagcgataaacaacggcgcgataacgctggaaggaacccggctcccatatgcggaaaaccttgccggtaagagggcccgagctcacaggcgaggagaagacgactgacagagtgtgcaccaagcagcaccaaaaagggtgggaccagagacggaccactcaggacgcggcgnnngcg

SEQ ID NO: 1680 - DNA, 1559 bp, Rattus norvegicus
  misc_feature (1211)..(1211): n is a, c, g, or t
  misc_feature (1227)..(1227): n is a, c, g, or t
  misc_feature (1235)..(1235): n is a, c, g, or t
  misc_feature (1238)..(1238): n is a, c, g, or t
  misc_feature (1251)..(1251): n is a, c, g, or t
  misc_feature (1281)..(1281): n is a, c, g, or t
  misc_feature (1395)..(1395): n is a, c, g, or t
  misc_feature (1458)..(1458): n is a, c, g, or t
  misc_feature (1474)..(1474): n is a, c, g, or t
  misc_feature (1511)..(1511): n is a, c, g, or t
cagatgggtgcgagagatgccagtggaacgagtgagaagaaggactgtcctccagagagggggatgtgtccctgcctgggagcctaagcctgaatgcactaagggccaccccaaagacgcgccccagcccgccatgtcccggatccttcgggcatcctgcctcctgtccctgctcctggccgggtttgttccgccgggccggggacaagagaagtccaagacagactgccatggcggtatgagcggtaccatctacgagtatggagcccttaccatcgatggggaggaatacattccttttaagcagtatgctggcaaatacatcctctttgtcaacgtagccagctactgaggtctgacagaccaataccttgaactgaatgcactacaagaagaacttggcccattcggcctggtcattctgggcttcccttgcaaccaatttggcaaacaggagccaggcgagaactcggagatcctgcctagtctcaagtacgttcgaccgggtgggggctttgtgcctaatttccagctctttgagaaaggagacgtgaacggggagaaagagcagaagttctacactttcctgaagaactcctgccctcccactgcggaactcctgggctcacctggccgcctcttttgggaacccatgaagatccatgacatccgctggaactttgagaagttcctggtggggccagatggcataccaattatgcgctggtaccaccggaccacagtcagcaacgtgaagatggacatcctgtcctatatgaggcggcaggcagccctgggggccagagggaagtaactgatgccctaccccaccccaccccatcccctgcccatcatgcaagggctggggaggggcdmkkcaggaaggaagcaraawwcggmaysaktstacasryacaksccagrywcsmkkcmtwdttacataaaagrcamgmkkggcacastgtgtgcykgyacsastgtgcacaycgtggcaactgtcccactgtgtsccatgcactgcytgcctggaacccakggacagaccatctgtgctcacggtttgrtacaacacckkcacactkthdccagcttcmcgwkbsawatrarcccawdgcwrrsvmragktbtaagkcsvrbgrksytgmdcaaachtraacatcawtyttggggccagmrkytsscayrwgscmacatgacacatccgggywmankawgmmhycrgchtcnwkvaksmnksntgaaggassctcntaagtsdccarscmcrwvscacagkgykcnygrrrarabccgrgmcaaykgtgagcmckatgrccatgtgcyccamgtcagrggtggtgtmycyatgaakgaggggcccvaagccyttgtgggcggscctcccytgagcccgtntgtggtgcsagccmttastgcattcaggcttaggytsccaggcagggacacsatccccctstntggrggacatgcsttnttmtcamthtgtcmmstggcatytbtsgcaccccatntgmcmartaaacgtctttbtgcmrmraaaarwhwrwmwwrrmrgccgc

SEQ ID NO: 1681 - DNA, 550 bp, Rattus norvegicus
ttttttttttttttttttydhagwttgcatgagtgagaaagtttattgarattcattartaaatgagaaattcattagyaratgarawwkttttyttttttttctccacaaaagaacactttctgataaatgaaaagaagaaatacagaaaccacaaaacaccttttagacccttaatttcaaggagcgaacctatttccatakaccattaagacasaagtgttttcctggacattttgttttccacacgtctgtrcagttggsctgtgtttagagactcttctaakcagcttakkagaagwsyttcktgsyttctgaywcarwcayagacgaaaggactctaccctcaggtgtcacctcctcaataawmgtcttgatcactctggytttmytmgyvycktgsscctttagacgattggtccccgccaccggacccggaagtcttgaaccctccgcttccgctctggcctccactggaacttccgccgccgtagccaccaccggaactgccgccgtgaccaccgccgctggaacttccgccgccgtagcc

SEQ ID NO: 1682 - DNA, 845 bp, Rattus norvegicus
gagctgacctgcctctctgaccgttgcgtgagtcactttgagaccgacgggccccacgtgctactatactttgactcggtcccgaccacccgggagtgtgtgggctttggagccttgcaagaggtggccgtggggctggtgcakccagccagtgctgkcctatatgactactacagccctgatcayaagtgctctgygttctatgctgcacccaccaagagcaagctmctctccaccttgtgctctgcagacgtmtgccagtgcgctgaakggaagtgtcctcgacagcgaaggtcactggagcgagggktggaggacaakgatggttaccggatgaagttcgcctgctattatccccgagtggagtatggcttccaggttaagkytctccsasmagacagcwgagytkccttyygcctctwtgagmycwmgakswcyywrktcctgcatttcacaaaggatgccaaggyctccataggtcagacccgcaactttctggtycgggmytcttgccgcyttygtttggagcctagcaaagagtayttaatcatggggatggayggagtcaccagtgacmtcaagggagaccyccagtacttgytggactcaaayasttggatygaggagatgccatmtgagcrcctgtgcaggagcaccygtcagcgggcagcctgtrccagctcawtgacttyctgcaggagtacagmagccaggggtgccargtgtgagggcgtcggactctggatccytgagctcagcccmagggtcagggcctctcacgawgcagggcctgcttaacagggtaaataaataaaacttttgmcmrwaaaaaaaaaaaaaaaaaa

SEQ ID NO: 1683 - DNA, 775 bp, Rattus norvegicus
  misc_feature (727)..(727): n is a, c, g, or t
ttttttttttttttttttwwwwwwtgaawatctccaawatcactttwdtacattaaaaagggaggttcggggtgrtttrtaacgtadatcaaagtgaawkwttttyttttttttctggdgccggggatcaaactcaatgtcatgayaaggtctctaccatgagctgcatccgcadaccccaaatttargtggatgattgacaggggattakggraggtctgattccktgkmsatccatccaagtsmattcggtctcacccamatcccttctcttctggstgabgcmgctccacttcctctcakggatgrraacwccctctgggttartcararayctccwtgstgsaggktgcaaggaracccwcrtkccavgattccttarmaaaggggcagggtgagcccttggkgtcagygtctcrtktccgrttcaatggctgwggtttmtcttcttcttaattttckttagtttcaaaccgtgtgaaatcttctcgtgcatgtaaaagtggttcttagagacttcatccggggagtatgggaaattggcttccaccaccctgttgtggaggggctgcgtcctgcggtaaccatttcgaatggtctggttgtggtgatccattaccgcattctctattctctcarsctgggccttggagatggtggcggaatcctgaaacacaaaccacttgacgttctccgtgcaagggggagtggtgagcgagcttggtangtgtagtagtgtctaatgtcctcgggcacatgttccggatgttaacgt

SEQ ID NO: 1684 - DNA, 676 bp, Rattus norvegicus
tttttttttttttwwtytwhasaaaasaatattttattgaaacagtttytcaattaacaatggaacaaagtacrmtttgattcamacctgtccaaccagcctgaactgctaatgaargaactcaaacacacaggggggwactgtgtasgacctttaagtytytytgccaatgtkrmraaamaaaaaaaaadaaggyggwvaggggtgggggtggggtakawmakryahaacaastgacatsrggtttgctttgcccctgcactggggtgsscctacctcctgctacaggtgcaatactggaggacrkrcmcwcwrkgcmtggywryagwssscaasrrgcyctcmywmctsscaaaggacactgtcaasttgaaccctgacccctctttctttacccacawagcttgcctgaragtgaggtggcatttttacattcacmycrtgmyctctgtcccacagggtcttgggaaaggggctcacagtagatagcacatttttggtcagcccagggggaagaaggaaagagcmtgaagggtagatwtyacaggarctggggatgaccaggatggctagtgcctgcagtatactcccaccctgccaaccattyttggggcttgtactgtcctggacccaacaacccacagggggttacagggcttttcccttcttgcctgct

SEQ ID NO: 1685 - DNA, 642 bp, Rattus norvegicus
ttttttttttttttttttgaggctggaccagctttttattcagttaggtatatatcataggtgcaaggaaaaaggaagggtgccatggagagcaagtgcaggtcttgggacctgagkgacctcctaraggggacagtccygctgtctccttcttccttccctgggagacactctttcttctgactccctaggtctatcccagggaaggccgctccgccatagaagaaagggacgrccatgcagatgtgatggttgaagcagacaagggtgtgacaaggccagcatgaggtgactgctctggggcccctgagtctttmtgctctstagctccctctttgcctgtgagttggactgtgaagcactcaggttgaagttcacggaggacttcmtggactmcaggcatgtcacysksrtrccstcttggagtctstctgttcagtccccttgcagcctttggagccccttcctttcttcccagacttagaggttcctcgattcttcctgcagttttgtttccctggggctggaggctggtccaracgtcgcatcagcttctgcmcccaggcttcctcaggggtttgcgcatagctcaggctgagattgcttccggggtgcgaacaggattgctgggatggggcaact

SEQ ID NO: 1686 - DNA, 1107 bp, Rattus norvegicus
tttttttttttttttttwmacakkgaaagctttactttggctgctraaatacaaagaaaggtaactcgggttgtcatgtataatcttagattgtggtttcacatacatagtkytktkttwwywwkykwtkwscacyttcataaaaaaatttatttcacacttttatacaaatatccacaggtgttttctaattatgaaataattttacaatgctagttagtataaaaacstatcaaatgcaaacagaccagtgacttgacttgagatgacattttaaacaactctaaactcaaacagcacaacattcttgtttmctcgttgttgaactccvtcstaacccwtaccaggacattcatttttttttataacaaaggtctacaaacactgtcaagatatcagcttcctggctgtgtcctttaaagccagtgtgctaggctmcaagatacccaagcaagaaactgacactttacacactactagaacctgtggtagagaacttttgtaaacaaggcatcatttgtaagaccattttttgagtgaaaaagcagaagtaggaccagaatgaaagtctttrmkrysykaaggttgtaatgttttatgaaaggaaaaaaaaaaraawwaaaactcaaagcaacggtgkcacatttmgsmaygwkktgttcttttaaaagatggagaagtggctgggatctagcttggtcgccacagagtgctggcctggcatgcacaaagtctggggttcaatcccaagcacacacctgcaatcacagccctggggtggggaggtatggggatcagaagttcaaaactatcccaagccacataaggagttcaaggccagcctgggttacttgagaccaagttttaaaatmmgatcgwgmmctgcttatccaaaccaattakcaccagctctcggttgccttccatataacttaatgattgtaaaacacaatttaaaaaaagttttgataayatattcamtctctgttgactakatataaaaaamamawaattgttttccccctcccatcatttttacaaccaaccaaccagggcggggccaggcacgctagggcaagcacgttttgcaatgagctaaccctcctg

SEQ ID NO: 1687 - DNA, 765 bp, Rattus norvegicus
  misc_feature (489)..(489): n is a, c, g, or t
  misc_feature (739)..(739): n is a, c, g, or t
tcccagtcacgacgttgtaaaacgacggccagtgccaagctaaaattaaccctcactaaagggaataagcttgcggccgcaattgttttttytttkttttttttttttycaraycckgamggtttattgaracctytayttcccaccactcccascccccaragttctytgbtgcctytytcatgacaatccctasggaagtaggggaccaaattaagctgyttttccgbggctccttcaragtcsatgggcavcavctgkggkgagtgtggtcttggdgttraattttgagggatkadtraaggcmdatgggtttgggcyccatgrkgctcacttaagggagttagttgatgavaccaaggtaggaaktwttctgmggarakctktggsakwgctggggtgtkactgyggccatgcctgagctgattggcaatgccawaggtgctgtatttcyctgycgakkstwgccctaaacadatgggtctgcantaaggaattggytgaggtgggatgtataagctggcagctaraaggtagcttctggctttcagctgtcgtgaaagggtagaagcaacytggagttttatggatttcagctagatycaggctggratggtttggccacagaaaagcctggagggcgctgacagcctaacctcaggtagagtgctacagarcctgcctgtatgtggggcagggatttgccagggcatagctggtgctcaagatttgtgggtanagcatggagggagacatggagacttg

SEQ ID NO: 1688 - DNA, 754 bp, Rattus norvegicus
tttttttttttttttttgatggctatcaagtgcgttttattgaatccattgtggatagatragyrkyasrsctgcgkrtcsggwsgrksagaaggacgaggagccggtggaggagcagggcgcagagccggtcgaggagaaggacgaggagccagtcgaggggcagaacggkgagctggtcgaggagcaggacgagaatcaggagctgaaggaccagcctctctcggggattycaggacgtcctgcagccgggactgctgcggccaatgcgaacggtgcgatcaagaagctgtcggggcctctcatctctgacttcttcgccaagcgcaagagaactgcgcaggagaacaaggcgtcgaacgatgtccctgcagggtgtccctctcctaacgtggctcctggsrygrgsgcggtggagcagaccccgcgcaaacgtstgcgatgagktagtttagagcytaacggccagagagaacttgctgggcwtctgggcagcggacgatggaagaactctgggcttcggctgggacctttcattcatgtagcakgaaccggagatggctgckcagagcagcccacggttttgtggaaatctgaaaactgtgcaatgtattgagaacactctgtaccatgtgcaaggagtacgctggtcccaaggtgtaaagctttaaatcatttatgtaaaatgtttaatctctactcgctctcagtgcaaaaarrwaaaaaraaaaaaaaaaaaaaaaaaaccctcgtg

SEQ ID NO: 1689 - DNA, 701 bp, Rattus norvegicus
attacaggctgtacaagcccaggcaaaacagtgacaatgtcgtccgagctctaacaaactggtgattgaggaagctgagcgctccattcacgatgctctctgwrykakscgatgcttggtgaagaagagagctcttattgcaggaggtgtgctccagaaataragctggccctcagactgacggagtactcccggacactgagtggcatggagtcmtactgtgttckagyttytgcagatgccatgkaagtcattccatctacactggctgaaaatgctggcctgaatcccatctytactgtaacagagytaagaaaccgccatgcccaaggagaaaaaactacaggcattaatgyccgaaagggtggratctccaacattctggaggaaatggttgtccagcctctgttggtgtcagtcagtgcgttgaccmtagcaactgaaactgtgcggagcattctgaaaattgatgatgtggtaaatactcgataatytggatgaggctggctgactggcacgagtatggagagaagtattgtggctagagtggaagatgatggccttgttccttgtctgggagcttgcttcttcagagtttttggacattgtcttgcagttggcatttgttgggaattgtattgaaacaatttaatgaaaatattaaatacytggtttymamstccaaaaaaaawwaaaaaaaa

SEQ ID NO: 1690 - DNA, 896 bp, Rattus norvegicus
attctgtcttctcctgtgcccattggaacctcgccgctttgtaccctgttagacgggtttcccaccatttgtggaccccggcttcccacacgcgtttaccccgccagtattgaacgccccactatggcgaatggtccccgcccccctcgagtttttcttgtgttttcgtcttytkttttyytytyttktcyytcyahgckgctwtatttttgtaagrmtacattgamacattcgatggamacagctaatgacaaatatggaaatgaggtgtgggcatctaraagcactcctacagtaatatakgagtgtattttcattacatctttactttgawattggctcgttatacatgtggtawaatggrgagtacgatcagggagscaatcctgcatttcrrasgaggasgaaacccagccctgcctgtaaagggtgagggctaccctgacagccccadagatctaactcaactcwgcagggaaagttctctaggaatcacaaggaaagggactctgcactcytcctgaacgcagacaaagagcakacwatggttatgctacaaggacttcaccttgkcactactttgaaacgtattcttgktgatgacarccctrtgcctgctcagctgccactctaragcttttgtcacttmtacaggatcaatcgcaaaactgcaggaacgtttgaggaggctcatatattgtcatgcaagtttccaactccataaactattttactactcattaaaamaaaawwwwwaaaaaaaatgaaaaaggmcwskwgmskwaktcttgttaagcttccaraagtagtcaccgtggcgagtttgttctgaaacaggcttgtttgctcagatctgcttaagtgctccaaatcacctgtgttccatggtttaaagt

SEQ ID NO: 1691 - DNA, 957 bp, Rattus norvegicus
ttttttttttttttttttbcavaytthamamayttattttttwaaahcaaraggaaaggytwawawagtccttcatttcmaaccctgcctggaggtatggggaaaagggcatagcamgctgakaaggtgcctayccccctcaggaagagcggacttcccagagttggtgaggacaggggcaggccctggsccttcctgcctgcccctccttaggtagctgrcactgctatacaagtcttatgagcaggtatggagtggaaaaccaaaggcttcgtccacagtgcctccagccagccttcaktcgscwcwgcckttgggccwcrtgsyctcgtccctgtagcytatgttgtttgtcaaccagcaggacgcactgcaagtctgctatggagaccttcctaraaacctcctgcwatctggaggggacctctaatctccamctcktgssgtctscctkyyrwattccccascctcaggctgagtggagtccaggacaaagcactaagtggctgtttgctacaaaacacctggagatgccagagggatctcatggcctgtcagccagtccaggctcccagtcacacagtcatacacacagcgttaagscgtctgtgccagcakgcatggccaaactgggcccagcttctctctctccacytgcagtgggtacaggggtagaacccctgggtgctgtgggaacaggttgaagtgggagaagctggcaacggaagattaaccaggcctggagggggtaaggggagagaaggcaagggctttcaagacctctgtccaggcctgcggctgcccttgggaataacccaactcaggttggggagccctgaccataaaccccctggaaaatgggggacagagaaaggagaagagggggggggctagaacattgggactttggaggaagccagtgctattagtatttacaagcgcaaagccccatcttct

SEQ ID NO: 1692 - DNA, 852 bp, Rattus norvegicus
aagagaaaggagtgagcttctgaatcaagtgtggcatagagaggggttgaagaaaaggagtcctagagccaaacaggtattggattatgcttcctgcctgctggtcatcccgtcatgggcaagacattaatccatcctttgacctggaagcactcaagccagcatcctaaataggcagttcctttactactgtgagggccagtcccctcggccaccatcctggggtgactggggcgaatctcatgcgggggacccatgttgtatgtttttcctcaacccaggttggagcatagcgagtgggagtcagcccggaccccaatcattggcgcctgtggctctcaggagcaggtgctgttgatggatctcccaggcagtagctgtcggaggacccggascagtgctggatggaagcgggttctgcgttctctctgccgttcccggacccgcgtgccactgmtmgcagccatctamttcctaatgawtcatgttttactggttctgtgtttcacgggycacctataaacttgttacttgvmaamwmwmrmamwwrwaattccttcatctgtagtgtcaggattgttgatcccagggcggcctctcgctttgagcccaccctcttggaaagtgcctgtgaaaagaggtggctgtgaggacaggcggcggtaaggcctggcctgccacatccgctctccttaaacacgtcggcttctgagatgtgccgtgttcactgcttcttcagatgatgcagatccacatcccgtgtggccttgcaggatgctgagagaggctttctagccgtgccaacaagatggttccaataaacacagtaatctggaaaaaaaaaaaaaaaaa

SEQ ID NO: 1693 - DNA, 559 bp, Rattus norvegicus
  misc_feature (543)..(543): n is a, c, g, or t
tttttttttttttttttkkwwytggagtataatttgcyttttaattggaacaacatgtgtaaatgacagaatgccgccrtgcagagagcggccrcagaatacgcatcaagtccattctgcccaaggaagggagggggagggcacagtgccgtgtgccggwkcccctgccccccagtcctgcgtatggkggggccaccgccttggccggcacatgcctctgggacaggaagcarakaccaaagcacagsggcagtaacacgggtgagtccttccttgtgtgaagcgactgaattaactcattgaaggtaycaaaaatataccctgtwagccaacaccatttamacctgccttccccgccatcgccatakcgacaggccgggaatgaacggtccggttcctgcaaacatccgtkccccaggccatacccggccctttgtgcacccacctggtcygatgggctcccagtcytgtgggctgggtggcctttggggactgcgatgacagcgatggggcaggataagctgggaacgtctgtctgtccanagcgcgagcgggctgg

SEQ ID NO: 1694 - DNA, 556 bp, Rattus norvegicus
tttttttttttttttttkttgaaagtacaaacgtttatgattctgaaagcccaatgaatattagggagagttctgtcatgttcttcaggcttggagaccacgatcggaggttaggattcatgctcagggttggggggcttcctagtctgcaagcttcagcatggagggaacgaacatctgatttggccaatggctggacaagcctgacgctctcgggccatggtgtacttgggtcaggacagggatttgcaatccaatctaattcttgctattaggatggcgtaagaatcttcctccacctacagcctaacaatttstgttaaatgagtgtcacagacatcccacttggcacagctctgtgaccctttctcagttcccacggmtgtgttctctcatagccgtgctctcccacttgctcactggstgcctgataatgatgcttatcagctaagacgactgctagaaatccatggttgsytcstsctccaaagaccctgattcagtggatgactcacagccaaggcagagtgtgacctgtacccaggagcttttgtgc

SEQ ID NO: 1695 - DNA, 770 bp, Rattus norvegicus
ttttttttttttttttttaawacagcctgctgtgacattttaatttttttatgcccaaaatgcaaacccacaaacactatcaagtcttcaacagaaaactccacacccaccaagttccatctggaaaactcagkwwwkkwkwdywkkkwtwyywytgacactttagaccatttaatakaggtatcygttatccatctggctttacttcaacatwaatacagcattttcctctggaaatgcaacctgagctggaatgsgaatgaargacgcttgacttcacagactgttctcctcaaggcactggcgatrattccaagggaaragtctggcggcagatcasggctcargccccgggcaggagtkagggaaaactccstsgaggtcaaakgctctgmtcaagtccaaggattgcacctgtgagcctmtgctcagstcgagattcctcacacagcccckgaacrargmccggctgctcaggcasttctgtttgacstgggcsgggtagccacccacataaatggggtcgttagtgtctgccgaggtggagtgggtgtgagggctttcmsycstracggcgtccccatccacagtcaggacgattcggtgcctgcttttgtgggcatggagcgtgtgccwyktsccrtcacagagagttctggtggctctgggtttgtaggtggctgttatccttccagcaccgttgttgacgtgaaatgagaccttgccgtctacaatctctagaccaatggcatccactttggcactgctga

SEQ ID NO: 1696 - DNA, 946 bp, Rattus norvegicus
gggagctgacagcagccacgcggggaagatggctgaggacttcggcttcttctcgtcgtcggagagcggggcccccgaggccgccgaggaggacccggcggccgccttcctggcccagcaggagagcgagattgctggcatcgagaatgactcgggtttcggggcacctgccgccagccaggtggcctctgcgcagcccggactcgcgagcgggggtggttcggaggacatggggactacagtcaatggagatgtgtttcaggaggctaacgggcctgccgatggctacgctgcgattgcccaggcggacaggttgaskcasgagsytgagagcatccgcaagtggagagaggagcrgargaaaaggctgcwkragttggatgctgcctcgawggykaccgaacwggaktgscsrgagmagsmcarrwwagaccwggagsmgtgrrascakcsccaaagtgaacaggtwrasmwgwmcwmkmtcamcwwcagggcatcggaagaggcttttktgaaagaatccaaggwggagaccccaggcacagagtgggagaaggtggcccagctgtgtgacytcaaccstaagagcagcaagcaatgtaaagacgtgtcccgcctgcgctcggtgctcatgtccstgaagcagacgccactgtcccgctagtgcctgtcaccacgggcsttggtggggcagagcagcagctgcttcagccagggtggaacttytytkgcagytgccacacacgcytgttytgttccyctgagtcthtgggagytgggaagcgggacccttacccctttcacccmccstgtcmttcctggtcccctkttccagcccctcatgactcctgtcagtccacttgattgtgactgtcccycctgatgtatttttcttskcktaaagggtgtgttaactcttwwwmmmmwwwaaaaaaaaaaaaaaaaa

SEQ ID NO: 1697 - DNA, 782 bp, Rattus norvegicus
ttttttttttttttttttwwktttaagtaataaaaattttattgagacttcctggcatggtggttatctccccccattcasggagagggacaacactacaggaaatcactgagaaatcacactgtctcctgtcccccccccttcccagccaatacaagaaggaggaaaacccctctgaaagggttggtcttcagtcttcmttaatccaagagagcagatacagaagaatccatcacatgatgcttgggtcasggtggggtatgcttgaccccytagctggcccctccaaactggagaagtgtgccarcttctctggtggtggggttcttgatgtccacactcacttcttacccttaatgaggctgtcacttccccsagtaaagctttcatcctgcagattcagcacaaggttgtcagctgtgagatasatccggttctgtgatgtggcgatcgttttagagatgttctgggcagcccggatctttcggagcttgatatagccaggattyktgctcagtgcttctccaagcatyttagcagcctccgsctycccctcagcctgcacaatcttctgtcgttgttcctgctttgctttctccaccaaaaactgggccctctgggcttcctgctgggccacttgtttggcttmtacagcagctgtstactctcggctgaagcttagctctgtgatagctacatcgtccaggatgaggctgaagtccttggsacgctctgtcagctctcttcggatcaacagagacacctgagcccgctgcctcgtg

SEQ ID NO: 1698 - DNA, 968 bp, Rattus norvegicus
tttttttttttttttttywywgttggkaaagagtttattaagcggstgggaagctcttcccactctaacaacagaaaaacactctccacccctcaccctccccagtgttggbcactccgactcatggkggagcctcacactgtaaacacctgcctttcagagttcagtacagggacatgtcttcctctggmaataaaactttcagtctcaactcaaaagggaacaamggcatatatctcggcttctgcaacatttggtacaagtttgcaacaaaaycgtacatagcagcatgctgctaaccggrrasgakatggggctagcctgggcaagccttgcakgaatgctttascawctgttatcactgcagttttcacatatggcaggtggggctgcaccacaacgcaggagtctcattgctccagggtcagacactggactctccagcacaggaaatgtctcttggaagttagtaaatatacaagtagaaaaaaaaaattgccttaagaaaatttcacwwwykwytwtytkwwwtgktttttawcacagcttttatatatataaagctccccccaccytatggagtctttgatgaaatgaacctagtcgctatcatctgatycatgttctgagsctcggtctgaggcstcattgtttgagccctctggtkccgattcatttccagagccttggccagaacmttcgttgtcagagccmtgctctgattcgtgsyycgwstctgcacttggagaaaccgggcgagaatcgttctcattctctgagcctccggaggggctcctcccggactgcgcagactcattgtcygactgctcagagccggagcgccttctctttctggacggctggtcactgtcggaatcctcatcggactcctgcctaccagacctccgggggctacccgcctcgctgccagacttgttctggttgtcatctgagtcgctctccgatga

SEQ ID NO: 1699 - DNA, 993 bp, Rattus norvegicus
ggccgcatatgtttttttttttttttttttkkkytttttttttytcamacaggaaattctttattgcaawgatacaaaagcagtcacggsgacatgtacagcaataaattasgtggkggccatgaggcakggtgcadacggggccaamagtctgtgatcttgatcycttcbcaataatttataacatgggggaaamawmgcacamawwwaaaataaatattgaaatgaaattgccaaktggmaggcggctgaggatgccaggcctyggmatgatcggcatgtgtccctgamacctyktgmmrtagttaaagcttgctttaagaagtcagaggaacaagacagaaaactcacttttayctttaaataaaaacatccatatattaktaastygtgmcaatgaaatttcagtgacacraagccatggggcatgctcacacccttcccagccccctcctggvaggtgtcctctgcaggtgctccagtggtactgacagccctgtctcccctggccgccaagagtatggggcctccacccaggaggaccaccagaggccaggagcgggcagcaagccagtcagtggtcacytgcctaccctggagaccactcatccagtkacccggcctgccagcaccaccacagaaagactgakggaggctgttggcaccctgggcctccgttccccaccccactgtccaacctactctgcattaataaagatctacagtatcaaactgggaaagaaaattgttatgaaaaatctgtacgataaaatgtgtgtataattatatatatatatatatatcttctctctttaaatatccatggtccttattgatatccaatatggattacctaccaaggctatggttccaacagtgctttctaagtgcctggctgtagttcagcctgcccctgactccctgtccaccatattccccaggatctggaggacacaattccttcagttaaaaaaaactgtcgtgcgcggccgc

SEQ ID NO: 1700 - DNA, 670 bp, Rattus norvegicus
ttttttttttttttttttaccttaaataaactgtktawtcaggaggaacaattaaagaaagtgattttgrtgtggattacaaaaacaaagaagcacaagtwtkwycargttcaaaractaratggtcctgctgccataggtactgccagctccaagctgagtatgtgagtgggccagtgtgcatgtgcgtgcacgagcgcacacacacacacacacacacatacacaaactgtctacaacggggtgtggactgaaatgaatgaccatgtgtgtctgcarcttggkcccttccctgccccccaaaccaacagtggctgtgtgagacgtacagcagcaaaattgargccttcatctttccctccctyccccttakctctcgagctgagaccccatcttctccggtggcagtttgaccaccctcagtcamaaagagtctcagtgatcctgtcaagacatctgggggargaggaaagaaacagccagggcaccagacgtgtagctgggatctcgctcattggctcccagmyyyrtgccctcccaagtgacactgcccagcaaaaagccacccagagaggctgtccctgtggatgtggagagcaccactgtgtctctgggtccaaccccacagctccaaaaggtctaagccctagtcagagagtcaaagtggtca

SEQ ID NO: 1701 - DNA, 663 bp, Rattus norvegicus
  misc_feature (24)..(24): n is a, c, g, or t
  misc_feature (392)..(392): n is a, c, g, or t
tttttttttttttttyttwwwwknywkwywywktywykktttawwtaacctttaatatactttaattaaaaaaaattaacastwcattttggtctgaaatggkccctcgccgaaatgccarktakctgtavwtctggctttgcaactgaaaccccaaatgttcaatamataacagaactagttgcccttctactccacaccarcttgtcttavctgaagggaggggaaaagggaggccaraaatakgaggcagtgagatctadgaaccatggyccctgrggtavggtgagggyatgtataccctscttcacttaattgacttgtagwtaabgaakagaaammgbkaaaagtakstsarctwtswwtyttgrsctctgavctmsgsmkcktrnmraggtggmaccttggwccagctttggcasaatgaggcccadaaaagggacagtaaggcacaaccctggcttgaagtcagggagtcaaaggcaaacagctagctccagattcttaggaatgaagaatgtgagttatgactccaacccttagagctgagaagggttagcaggagaaagggtarcttggaaggtagagagggaaatgagaccagacagtcccgtctyaacaggatacagccaagcctcctttctacctggagaccggctgttt

SEQ ID NO: 1702 - DNA, 771 bp, Rattus norvegicus
ttttttttttttwttttytcargaaakgagttttatttccaaacccctargaaggcattaawaataatawasatataaacccaaaccaaaccctaaaacaaagacaggcctgtgcrgttaagcccaggaacaaccaracaggcaakgacacaggasatkggtgtckcacttakcarcctgkgtcggcatatccatgtgactaatccaggaaaggggactgggaaccagagatcttyacccaacccatamccatgtggccctggatgaraggaagaraasatakcagtacaasggcaaakacggtaccaartctgatcttggmamccactgttstgatccccaatagcgcadacaggttatcctgtatgcctcaasgattraggtggggsggggtcctsccggtcaargcctctkaaaraaggggcggggcarsctgtatkgggcggagtcakarcagaacacagtytgactcagtyttcgacctctgcctccgctccccagctggssgtccagatgtggctcctyyacccggggatgaaggggccctggtccgcacaggttgaactgcttgctgttgctggtactcttcttgttgaagttgctgggccagttccaggtcaytgagacccagcatgccctgtggctgctgctgctgctgcagggrcaaggcaataaggtagtcctggtckacctgcagttgcttctytggagarccactcccmccttctgctccatggcttttgtytaggraatgacttagstggaagtcag

SEQ ID NO: 1703 - DNA, 3640 bp, Rattus norvegicus
  misc_feature (2998)..(2998): n is a, c, g, or t
  misc_feature (3076)..(3076): n is a, c, g, or t
ggatccgatcgcaaaacaacttgaaagttgtgctcagtaggggtggggatagctccccctcccaagattatacatccggcaaccgccagaaacaggacagtagcatcaacacttgggttcccagggcttgacaatgtatggcttcaaatccattgggagccaccactgaacagctcctgaaggaaaggagcatgtccccagcccggggatggggagagttcaccgtggcagaggaatcamyamagaggggccagggctaaaactcagttttcaycccagaagctgagcctcttaacagatagagccccccacctatttccatttaagcctccagcccttttccgtacaacggaatgcaccagaccccgcgggaaaggggagaagcagtactcagtgccccagcaccaaggcctggattattcaatgaggagtcagctcctttttggggggggggggggtcacaaggcatcaaaactccacctctttcctctgccctgctgtgaagggggggggggagagcaacccgcctcgtgacagggggttggcccagcccgccctagccctgaggagggggcggggcaggggggagtcctataattggacaggtctgggatccggtcccctgctcagaccccggaggctaaggagttgtttcggaaggagctggtaagacaagcttgggctggcgattcacccagggggcttggtaagacgtgggcaggggaccttgaaatccgctggagtccaggaaacaggcacaattattagaaaagcaggaagcccgatagaagacttagggtggcggggagacaaactaagatcgtgaggtaactagcctttgccggggtcagaacagatggaggagatggaggggtcatctccaggagtatgggactgtcggtgcackgcatacgggctcaactagaaggtagtatcaatctttagcgaaaggacccgcgatgagccttaggttgcgtttatrtaaatacctactgatttccatcacagtccccaaaattaccctgggccagtttcaaagcgaagaycctcatgcctgagcgtccgaagttctggggtcgcgggagggtaccacttcgcagggatggaggacgattaaaarcttacattagtactaaaccgagagcccggcttagcagggaaggtagaaaggaatgtaaattggaccaccggctgtccctctgcgttgtggaatttgaaccctaggactgggagctggaatttttggcagcgggtccaccccggggtgctgagatagagataggagggggaggtaaatagacctttgggcagatgctctattgtggagatgtttgtgatgactcacagacctgagaagggaattaaggtgggggctctttgggtggcccgagtttctccacccctacccactggtgttcaaagacagcttttccttccgcagactggccaatcacaactgggaagatgaaggctctgtgggccctgctgttggtcccattgctgacaggtatggggcaaggggtggctttccctgctggcaggttggggttggggcagttctgagacctctgagattcaatagccctgagcagctgttttacatgcaggccttgtctttccctatccataatatgagaggattgatgctcagagggtaaaggtgcttgtcataaagctcgaagacttatctcggagcccaacatggtggaaggagagagcggattctctctagttgtcctctgacctccaagggtacacacacagacacacaattaaaaagttgaagtgtgtaatttcttagtcgcttttaaaggggaggtatacattttctaaccccataccagcctagtctcagctctgttctacataggatactagacagtgtatgcttgtagtatctaaacagactccacgactgacttccagacgcactgktgcttcaaagagacccaagagcactgtaggtcctgacccagccttaaacttactactctacacaggatgcctggccgagggagagctggaggtgacagatcagctcccagggcaaagcgaccaaccctgggagcaggccctgaaccgcttctgggattacctgcgctgggtgcagacgctttctgaccaggtccaggaagagctgcagagctcccaagtcacacaggaactgacgtgagtgctcagcgcttcaccctccgcacctgstgagtatccagatccaggggttcctcctatctgggcacctacctacttcttgtttcctttctccatgagtgtgtgggccaggttggccttgaactctcaatacttctgctttctttagccttctggatactgggatgaacaggcattcatttatgttcttggtcgaatggcttttggctttttgagacaggatcccaatctaacttaagctggcttcgaaggctctgcaattctccttcctcagcttctcaacttctgggaatacaagcgagtaccaccgcacctcgctctgtggtttcctcccaccctaattctgaccwyywkgtctcwgsawkcakctcsmkctysyrwktccwcwggrmctgcasggtactgatggaggacactatgackgaagtaaaggcatacaaaaaggagctggaggaacagctgggcccagtggcggaggagacacgggccaggctgrctaaagaggkgcaggcggcacaggcccgtctgggagctgacatggaggatctacgcaaccgactcgggcagtaccgcaacgaggtaaacaccatgctgggccagagcacagaggagctgcggwcgcgcctctccacacacctgcgcaagatgcgcaagcgcctgatgsgggatgcggatdatctgcagaagcgcctrgcggwgtacaagsccgsggcacaggaggscsccgagcgcggwgtgagtgctatccgtgagcgcctkggvccactggtggagcagggtcgtcagcgcacaghcaacytaggcgstggcgccgcyymgschcygnrsgakcgcgcccargctttgagtkwyykbwtyykwdkdykgytggagvamktkrbyaacmagscccsagamygsywanagraggtgsstgagcagatgrarvaggtgygytccaagatksrrsassmkrmccagcagatacscctgcagsccsagrwytkycaggcccgcatmaagggytggttygagccgytmgtgkaagacatgcagcgccmgtggkcmaacctaawggarwagawacmggcctyygkggytaccaactccattgsctycacyacakkgcccytggakaawcaatgatcmtycytyacstaygccstgycgcammatccatgaccagcyaggksgccctgtcmcaagcaccactytggccctytggtggcccttgcttaataaagattckccargcamrwwmwrarwmwmwrwrarwrattccacacagcttcagcctcagtttatcgtttctgcctgacatagcacacattccatggccatgtctgtagaaggaggtcatgtgctttagttcaagtctagtttggtctgctctgctttggttttgcagtaatagagataaaacctaggagctagcaacgccaaaggagaagtgctctacctctgagccccgcccgcaacccttcaccgg

SEQ ID NO: 1704 - DNA, 618 bp, Rattus norvegicus
ttttttttttttttttttccttgtcaaacagatgaacactgtcatcagttttaatccgccatatcattggtttatattttttaaaaagtgtgtacgcttgtatatgtgcatgcagtacccctggaggccagaagagggcatcacgtctccggagttggaactgggtctgagcatcatgatgtgggtgctgggaactgaactgtccttacgagggcagtgtgtgtgctctttactgctaagccatctcccagcctgaactacccgttcttaaagcacagtagcagacacagaggaaaggtttcatgagtgagtgcagtgttaggtaactaagtagctttgacatcctatgctgctattggctgtggctgagtgcgaatccatttactgccttcaagctatataaaatgtgaaagaaacctaagtctcacagtatattgaattggtgcatgaaaggccttctcatggtgtttgtgtcctatgtcagagatgaatagcgtttctaatttgctggtcgcttgggcaaagtttactttaaggaggaagccagcttcgagattgacggtctcttgggaaaaactactggtgaggcttaacactttttgaaatgtgcctcgtgcc

SEQ ID NO: 1705 - DNA, 693 bp, Rattus norvegicus
ttttttttttttttttttwagcttttgkttggcctttartctgaaaaagtgttgcttgaaagtgtacaacaragagcgggtgcaagcggmtaggggtcacaragccgccaataaaaaagaatgtccttaaataaagtgttcacagagtaaaaatcaraactaccagtccttcsctccaacacaacagagcacaggyacagaaccgatagtcgatgagcccaaggagtaaggaggaggctggagaggacarcadaggctcccaggctgccgcgtccaragggagagccctctttggaatgggctgaggaaagccgcccarccccckasacacctcakrsccactgstaaggctaaaaraaaaggacaaaactcagtctcgggtccaagggstcagaacagtccaggtgggcagggtccggttgactgctaktcccgcttggccttcttcttgtcactgttrccattctcttcagccccctccgtggagagtgcytcctccagtttcctcttgccactctctggstgaagctctactgtgtttcggggcttgaagcmmwygatgatgcacgtcatgttgtcacaccctgtaccatccccagaagtgtctggggccagacactgatccagcagctcttccacaatggatgacaataacgaagctccccattttcatcacgttggctgatctttgat

SEQ ID NO: 1706 - DNA, 1087 bp, Rattus norvegicus
tttttttttttttttttkywktywwytyytkwywwwcacaggaataataaatttattataagaatcatatgacagagtagtgcacatataaaagggggaatttctttccaccagagtgctacccattgctgctcggtgtggcaagtgccatctggtgcgttctgaaggaaacccacactcttggtggcggtacagagagtaastatgaggctgaggctggtgggtcccaatgacagtttctggctagccgcctgtgtctcacagcactgacagctcrtggcccaacactggtgcagcartgtcaggggcagcctctgccccagctggctgctctcctcccatgactgggaggaggcccacaaagtggaagttttggcggmagagaacctgctgattccttactggcctttcttccagactgaaatctgtgccctgaattcagactgagtcctgcaccgtgtccgcatgccttargcggsacagcctgaaccccagtgtgactggagaaccgtatgtatggtgagggtttcctgtgtcctccacattctccagatatgagcacaatgggttgtaacacagagatgctttgatggrmccctgagttctcatgctgctgartggacatggaagcccagaaaggctgtagaagtgtggggactgacctctgggggaaaacgacaatggaaaaccttgtgggaacacccccagcctcatgcagccagctccacagctgcctggtcaatactgcacaagatggggagagcgggcaggtctccaaggcagaaggtaaaagcaggaaaggtaacctagccccggccctctaagaagccaacacctagtgacgtttggtaggtggtatgagaccctcagccagaagggctgctggccgtcctgaagttcaagtttgctaggcagctgagaggcaggcctggtggatgctctgggcccaggtgttgagcagggctgtgactgagtgcttgtcagggagctgcagcagcctggaggtcatgcaccggtgcactgactgcaggaaggggttggcatccagcttgcagatcaggtggacagtaccgttgttgctgcagtc

SEQ ID NO: 1707 - DNA, 605 bp, Rattus norvegicus
ttttttttttttttttttwwttttttttattacatcagtaacamttgtccaagttgtgtaatcccctgcctaagtgacaggaacagtgagaaggttccactggakggcattgggacaccacctgctattcttccttctgagcatcaggaatactagactaccaaagggccatttctggcaatctcttgatagcagcaggggaatacactcagagaagctcctttccaatcagaaattatcagtggtatgtagagggagggtaaagggtggggaaggttcttctgcatccatgagaggttttgaagggaagatggaggtgttgctttggaagtacatgatgcaccttgtcttctcttggtcttgatgattgctaaagctttcacttgcttttgggtgggcatttctgctggcatggtggaggagtttggacaggagggcatttctgctggcatggctgaggagcgcacggttcagggcactttggaggaggacatggctctgggcacttttggggaggacaaggttctgggcactttggaggaggacaaggctctgggcactttggaggaggacagggctcaggacacttctgggatgggcacaca

SEQ ID NO: 1708 - DNA, 985 bp, Rattus norvegicus
tttttttttttytttttkkttttttgggagagtwgcgtttatttggtcctcagagccatctgagacaacatactgaactgaggaaraaattgggttccaaaagagctcatcaagtaaagaaagggactrcacttyccagtggctcaacagttactgkgatcagtaaggccgggaatacsgttgctwccaaatcgctctcgtgkgtcgccattacaaaagtacaggtttctcatcacaaattgtcacaaacccaagttacaaaagaaaaatcacatggtgcatatcttaaaagacagtgccccccccacctcataagctacggtaatatcaagcagggagaaggtagcttttgctacccctcggcagtcatcttycccaacagcggggagaaggcacargaaggaktggggcggggcgctaatttcccctcagtacaagatgacaggtgaagcttggtgggagactggagctggtgaggcttgasgggwsgwggctccaggccctgtgttcagtcagagtcactgctggaggaggaggaggaggaagaggaggaggagtgcttcccgtgcttatgatgcttgtgtgatttcttgtgagctttcttcattttcttcctagtcttcttgtctatcactattcctgggmytmccatgccasragyyrgwksawtcmcggggcacatgccaggagcagctggtgggtacgggggagggtagggacctgagggttggtatcctggacaccctggttgcggtacaggataaggaggtcgacacggagggaaagctgggtttccctgaggaattccgggaggacaggggccaggaggaaaggcaggattttgggatggtgggcaggcaggattggaacctcctggacacacaacttggggtggatatggatttggcccagcactaggattccacatgtccacaagttagttcaatccttcccaagatcgctggtcctcttcccgtccctcgtg

SEQ ID NO: 1709 - DNA, 702 bp, Rattus norvegicus
  misc_feature (25)..(25): n is a, c, g, or t
tttttttttttttwttttwkttwyngdywcaaattawttattadakataycawartkgcacrasktgaggctggttaaakacaattgtttktcaaaatctstttgaattahttcctagatwatacatgcaagtgaccatgaaaatatttggcattttgaaactttgaaactytraacargcacttgcaagamggaaaacatggmsattcttaraagtccacatttgcaatarcygctccargacagggaacgtggaatctctgrccavggctggwtgctggmcamtttwtyaaagtgscamcawarkaaaaagaadgkttaaggraayadagtcsggctgsccadcttcctcaraaygtaaggstaactcacacccctgcactgaggcggatyaagaacactgcagtgtacagaggccabcagcccvssksgwgmsggccccaccacagcgcaggcgtcccctgccccatgtacctmagcagtgtgtctgcgctcagctgactgcaggcttcttcagagcaactcaacaaacgatgtgaatttagtgtttttgttttgtttttttmmatacactaggtgaagttaggtctgaactagccaatattccagttaacatgaaaatgtctggctacggacacttgtatatgcagtggctggttctccaagctcactcattcttaggtgactatttgcatatacatg

SEQ ID NO: 1710 - DNA, 1637 bp, Rattus norvegicus
  misc_feature (1508)..(1508): n is a, c, g, or t
  misc_feature (1610)..(1610): n is a, c, g, or t
  misc_feature (1612)..(1612): n is a, c, g, or t
  misc_feature (1614)..(1614): n is a, c, g, or t
gtgtgctggagccactgtcgcsgatctcgcgcacgctwctgctgctgctcgcccgtcgtcccccatcgtgcactaagcggtcccaaaagattcaaagtccaagatggcagccctcaaggaccagctgattgtraatcttcttaaggaagaacaggtcccccagaacaagattacagttgttggggttggtgctgttggcatggcttgtgccatcagtatcttaakgmasgasktggctgatgagcttgcccttkttgatgtcatagaagataagctaaagggmgagatgatggwtcttcagcatggcagccttttccttaagacaccaaaaattktctycwgcaaagrttatagtgtgactgcaaactccaagctggtcattatcwmcscrkksgsccgycagcamgaggkagagarccskctcaatttgstccagcgaaacgtgaacatcttyaarbtcawcattccaaatgktgygaaatacagtccacagtgcaaactgstcatcgkctyawamccagkgsayatcttgacctacgbgscytksaagawcagsgsytyccccaaaaacagardkatykrragwggtkgcaatctggattcsgyysgkttccgttacckratgggagaaaggytgkgagttcatccactgrgctkkmacgggtgggtyctgggagagcatgssgactycagkgdgcytgdktggagtggtgkgaacgtcgccgrsgtytccctkaagtytytgaacccrcakytggscmcggatgcarmcaaggrgcagkgraaggatgtscacaagcmggkgkttgacagygcatmcbaagkgatcaagctgaaaggttacammtmctkggccwtkggcctytccgkggsagayttkgcckmvrgsayrwwgaaraaccttargsggrbgvdkyccawttccmccatgattaarggtytytwtggaaymargraggawgtytycctmakcgtccmatgwatcmygrgrcaaaawrgaatctcrraykkkgtraagrtsacrctgmytcytgacsaggaggccckcytgaaraaragtkcakataccctctggggaatccvkmasgarbtkcagttytaamgtyttyccagkgtcctarcactthackgwcsaggctgcagcagggtttctatggmgaccacgsacttctcatytkagctgtggttagtccagttgryccagktgtgwtgaggtgktctgggggaaatmtcagttccacwgctytrccctgvtaagtggwacttgtgtagtgrtaacctggttagtgtgacratcccactgtbtccargacacactgccaamtgcatgcaggctttgattaccctgtgagcctgctgcattkststkvtacgcaccctcaccaaacatgcctagrccatgagttcccagttartwataagctggckccagtgtgtaagtycatcgtgyatatcttgtgcataaatgttybacaggatayyykctgtattatatstsyctgtastgnacabygcamtmyyaygtgaaatgtaagatmtgcatatggrtgatggaaccaaycamtcaagtgtcatgycawggaaaacaccaaataarccttgamcvgtgnrnrnwmaavmaaaaaaaaaaaaaaaaa

SEQ ID NO: 1711 - DNA, 824 bp, Rattus norvegicus
ttttttttttttttttttkwktktgcacctcagctttccctttaagacagtcgagttgaccaactggtcaggaacatttgggtcacatttcctattcctgtttggtcagtgggaarggcaasaagggctgttgaagtgtgtctccacgcatgcgcacagccatgtgtgcggccctctagcccagggccaccttcctggagactgtctggtabaggacaccacgtastagggcctggtagttcggtacacggaataggtggcgctcgccgaaggccacgtcgtactcggcggtcttaccggtgacgagtacacggatgtggggttcattcacctggggtcccaccaccaycacamagatctcaatgcccccacgctgggcctcctgcacagccttctcaatggcctctgctgtggscccctgtgagttaccatctgagaacaacagcactctcttcttggtggcacctgaggagttttcccggtagaaacgagttacatagctcagagcgtcgttgacatctgtggcgtcgttgatgaaatccatgctgtccacagagctggccastaccgtgtagttctgctggaactgaagagacgctcgacctggctgttgctggmcttgaccactatactgtaccacggmcacscgcacgacctgggtgggatcttccctgcccgctgacaggaaccgctcggctaggcgcttggcgaagaccttggtggtttcgaagttgtggctgccgacactggccgagctgtctagcagaatggtgatgtcggtcggggaggagaatgtgattggacaggtataatctggcctcgtg

SEQ ID NO: 1712 - DNA, 935 bp, Rattus norvegicus
ttttttttttttttttttkwwwtgaaattatgatttattaatttacataaaaatkrctttttacattaaggaatamtttttccaattgttaaaaacagtttgaagcggttcctactggggctcgtggggaarggtctgctcytcsatcacctgcttcacaacctctgccagctttaatcggtccactttatctgtgaatccacgaccattccagctaaaactctgcagcgcgtcccgcaggagtttgcactcccggttgtacttccaggcctcctgcattacctcattgagcttctcrtmttcattcyctmcagcctggggaaggatscactgggcaatgacatcgcgaagctttyccaaggcaacatktgaatcctcgactccattctcatggtcgtggatataaacaccatcctttggcttggagcyyagtmgcwtcmtcwtcctcagaatggggktgttcacavagtgcavgggtttgaggctgactttgaggkcctggatcctcatgtttgccagctgctcggsatgagcctgctggatccctgcaaccactgccttatccatcatcagctgagcagasggtakcacattatccagsgcctctgtcgagttgagccasggatggtccaacaccccctcgattgtgrgtctttcctctggtttgacctttagragcytcstsmcsamktctttggccatctctgagatctggctccactcttcctccgggaactcaaaactccctgtcatgatctttttccgcatgtcctttgggatggtccgactgtggtgtttggagtaaaaaggagggtatccgcatagcatcacataaattatcaccccgagggaccacaagtcacagctcttgttgtaagygtagggcgttggcgaggtagggatgaggccagacttctccttctggtgccttctct

SEQ ID NO: 1713 - DNA, 843 bp, Rattus norvegicus
ttttttttttttttttttwyycgagagcccaaaatattttatttaacaatgtgaattttggaaaaatagcagctcccagggaagaagcttcttgaatcaawagtggttggcagtcaacacagagcctgggcaaggttgcaccaraggcaagggtcctgcctggtcccagcaaggaaacacrttgctaatgacccagggacaggcctttcttaatgacaggaacaggaggctccaagtacactcatctacggaacattctggaaaccattctgtgagtcwtccttccctaratgatgtggggaaccagaaaaccaggaagggctrtataattccatgtgctacaatttctaaatttaataacaaaccatttatgttttctacccaaattacctgctgatttgtataaatattttaaatctctttcccctcctctttagagtgtaaggatagttttaggaacagtcagtgaagccttaaagctctgagtttgaacgtggtggcagctccttgaagtgatatgggtgagtcagtgagtagctgctcaaggtccttggtgggctttggggtagagatgcaaggttccagagtatctgctaggacaccgtaagccactccaagataccaccaagtctctaagtgctgtctgcaggtgacatgagtcagctagaaggcttcacacaaacccttggctagaagggcaggactttgcagcatgcatccagtttttgacctggttaatcagatcagcagctttagcatgtcagctccctggaactctgcccagtgactggtccatgaccggaagctctgagcagtaaaagtcacccagctctaatcctcgtg

SEQ ID NO: 1714 - DNA, 620 bp, Rattus norvegicus
gagcgggcagcgtgtcccgccctgtagssacgaagrsgckcckgsgsygmrgygacrgmrykwkykggwtkggskysgggtggcsygtgcswrsagagacatgaggctgagctggatcctgacagtactgtycatttgcctgagtgccctggtcacagscacagggsccgaaggcaagcggaagctgcagattggagtgaagaaacgtgtggwtcactgtsccatcaagtstagaaagggagatgtcttacacatgcattacacgggaaagctagaagatgggmygsagtttgacagmarcytaccacagaaccagmcctttgttttctcccttggcactgdbcaggtcatmaagggytgggaccagvgrctactggggatgtgtgaaggggaaaagcggaagytagtgatcccgtytgagctgggrtatggagagcggggagcccccccaaagataccaggtggagcaaccctggtgtttgaggtsgaactgctcaagattgagagacgttcagaactgtagcaggctgcaraggggtaggaggcccctatcagggaccagactgtktaaaaacaaacaaaaaaacctttaaaacccmwrraaaaaaaaaaaaaaaaaa

SEQ ID NO: 1715 - DNA, 604 bp, Rattus norvegicus
  misc_feature (593)..(593): n is a, c, g, or t
ttttttttttttttwywtagaaaagatcattattttattgaaaatgtaatttgtaacttcacaacatttataagcttatgaagtgtccagatatctcctaaagcaattagatgattatactaatcagttttaaaagaaggtmtgatttttctccagctcacttaacgcaggtcacagattcatgttacagtagaagaaactgtgtttaaacatcccttcatctgtttgttgaatttttcttcagataatgtatgtatatatagaaaaaagaaggaaagcaagaagggatagagataatagagctmtccttccctcactaatgcattcttagtagggactctgagatagaaaagaaaatgaagcgatagaaacttgttyccaggctaaagtagctgcagcaactttgttatattttctggacacaaggcacagccaccacacttaaggagaagacattctgccaaagaagaggatgctgttggtagcattgtgcttgatgaggaataagaaagggtgatcacaattgaagtcttcggttatctgtgctgatgttaaactgacttctaccyccgtggcagcagcagcttctgtcncccctcgtgcc

SEQ ID NO: 1716 - DNA, 667 bp, Rattus norvegicus
ttttttttttttttttttgcgtaccatgcatgtttattaattccccacccctattataaaaatctcttaattttgttcttaaagacagagaagggagataactctgttgagtcaattgcatgctgaagaaatgaggatgctccttggtggcctacagagtggactggagcaaatgctcagaggggctggtaggttgattgtcgtctccgggtaacgcagaaggcaatgagcaccagggtgaggaggcccargaggaccaggccaatgatgagaggcagcaagagagattggtcactggcgcaagagaagcatggcccgaagtgtcccttgtccggcaactgagcagcctgcagcctcagggagagcaggtccaggtgaattgctggagaaagaactatgcttgtatttccgcaacagaagctttggcccargggagcttggagctcttgaagagatgaattctgcgctgagaatgtccactgtgctgcttgtgggaaggacacattgtattccactgccatgtagttaaggtagactgtmctgtgsctctgatgtcggtcctgtttgaatccacaggtaagctgtccgtaagggaatgagagagccaagtggggatgggcactgtcacagcccccctggaccttggttttgttcgggttcaatacag

SEQ ID NO: 1717 - DNA, 1954 bp, Rattus norvegicus
cacgaggcggcacgaggggaatgtggcgggaaggctcccctggtccgttctggtccagtctcctcctctctgccccctcccatcaccaccaggggccgcctccccaatcccctctcctcccctctgcggcagccgggccaacgctccctccccgctcctccctctccatcccacgttttccagccggacccctggagtggggctggctgagctgaggatcctgcggttcggtgttggtggcggtgacctgttgccacccggcagccgcacaccctsgagccatgtcctgggccgctctgctcggccttctggscgtgttattactgttgctgctgctgctgagccgccggcgcgcgcggcgacccggtgagcctccgttggacctgggcagcatcccctggctgggccatgccttggagtttgggaaggatgccgccagcttccttaccaggatgaaggagaagcacggtgacatatttactgtgctggtggggggcaggtatgtcactgtcctcctggacccacactcttacgacacagtggtgtgggatctgcgtacacggctggacttccacccctacgccatcttcctcatggagaggatttttgatctgcagcttccaaatttcaaccccagcgaggagaaggccaggatgaagccgacgctcatgcacaaagacctgcaggcgctcacggaagccatgtataccaacctgcgcaccgtcctgctgggtgactccacagaaggaggcagtggctggcaggagaaaggtctgcttgagttctcctacagctccctgctcagcgctggctacctgaccctgtatggagtggaggcctcaccacgcacccacgagagtcaggccctcgaccgtgaccactcagccgacgttttccgcaccttccgccagctggatctgatgctccccaaactggctcgaggctccttgtcagtgggggataaagaccatgcatgcagtgtcaaaagccgcctgtggaagctgctgtctccagccggactggcctccagggctgaccggagcagctggttggagagttacctgagacatcttgaggagatgggggtatcagaggacatgcaggcccgggcactggtgctgcagctctgggccacacaagggaatatgggacccacggctttctggctcctcctcttcctcctcaagaacccggaagccctcgakgctgtccatgcagagctgaaacgcatyktctggcaagcagagaagcctgttttacagakgaccgyactcccgcagaagattctagacagcatgcctgtgctagacagtgtgctcaatgagaccctccggctcacggccgcccccttcatcacccgtgaggtcatggcagacctggccttgcctatggcagacrggagggaattctctcttygacgcggtgaccgccttctcctctttcctttcctgagyccccagaaggacccagaaatctacacagaacctgaagtctttaaatacaaccggttcttgaacccagatgkgtcagaaaagaaagmtttttmcaaagatgggaaacggctaaagaattacaacatsccttggggcgcagggcacaaccagtgcctggggaagaghtatkccatcaacagcatcaaacagtttgtggtcctgctgctgactcatttcgacctggagctggtcagtgaggacacagaggtcccggagtttgaccttagcagatatgkctttggcctgatgcasccggaggaagatgtgcccatccggtaccgtaccaggctgtgacctgtggrgcagacactacactmathtggggcctcctgacttcctgttgttccyccagaatgctgtgtccagaggrggggacagtgagaacaccgrgrgcaggaaaagctaataaaagctctgtgtctcgctgtgaaramwwwrmwwmmaaaaaaaaaaaaaaaaaa

SEQ ID NO: 1718 - DNA, 1112 bp, Rattus norvegicus
cacgaggcttacatccatgtcttttaaggtcctgagcattgacaacctgggaaaacccagttagttgcaagtttaaccctaaaaacatgcttaagtctgagaatagaacttgcctttaagtcaaaagcaaaacaagccaagcaggatgtcttcagggtgtttgggaaatcctaccagtctacatgcgcgttcctatatttggcactcttgttttaaaaggaattattgattcctgcactgtggctgtgacaggtcatggcagacttctcttcctcgaagactgaaaggctttactaaagaagtctttgtggccgtcacttccttgcagtggaacagaagtaaaactcaatgaactgactccttactcttacgttggactttaccccaagtactcgtgtgatttgcttgttggtttgagtgtacagagccctagtccagacaccagaggatggactaactggagaaatcagaaaacagccttaaccgacttgaggtgggatctgagacacgccctccctcgggttgattcgatgcttcccaggtwtcgttgtactttgcatttcttatggcacaggaacagacagccctccgaaatcttcaamtmcgaaattctgttgtcaagatatggcaggtggtgacttcctttgtaattctaaaactcagatgwttgaggatgggttagacccagtgcatggcaaaaacaaaggcctgggtgtaccgtggtgtgtgctgtggtagcttttcgtttctgacgtttcctgtggctgtagaacgtcagccactgctcagcggccatgctgccacccttctgttgtaaacgytaggaaactgaagttgttacagtgagcgagcagcaaacattgagagcttcacacactcacccgtgtgaaaggactgaagcccaagcccagcaccccacggggctcagsccggcctgctcactgtcaccttgaccttgttttctgtaatccctgtctgcaacgcaactggagtttatcacttgtggactttggaaagctttgagtttgaatgttggggttgtaatcagaattcaatttagttcctctataacgaacatgaaggctttaaawrwraaaaaaaaaaaaaaaaaa

SEQ ID NO: 1719 - DNA, 785 bp, Rattus norvegicus
tttttttttttttttttyyckgkwaaggccwtkttttwtttkytkwttaakggacaaaaggcaatgtaatttatttcaagtattttcttgaaagtctgtgctcataaaaatcatgaaaagttggaaacagactgttaaatcacggaaactttaaatatatcttacacaatctcgtttgtacaaaaatacaagttaaatataaacataaagcaggcatggtaatttatgcaaatctgttttatgtgattgtagtwatatagaaaagtttcttggttctgttacttgtgaaaagatcaacaccggattgagttactatctattagcaaaggccctaagaagcttacttagcattaatcttgcacatggttmtaagtgttttctaatttgagatcatctaaacactgggaaaaataaaaaagggcagtatgtccataaaccaacaaataacctggctgcagtgtatcataaacaaacccacacatctgtacaatgactgttagtacacacgcacaggcgcacacatgcgcgcacgtatgcacacacactgcacacacaamcacccactcacacaaagcctagtgaggcgccacatcctgctccatgttcagctgtgcmytyktkctgacttcgtcaaacgagtagctttttgtcaccttcccattcttgaaaaccgtatggagaagatcatggccatattcttcaaggtctccttttccttcttcaagggtgacaaaggtccctgctggtgtcctatgtaaagacagccggccctttttcgcctcgtg

SEQ ID NO: 1720 - DNA, 664 bp, Rattus norvegicus
agtggatgctcccaaatctcaggacctcagcaagatcatgcacgrrsayccgtgcccagtatgamcagctggctcagaagaaccgtgargaactggacaagtactggtctcagcagattgaagagagtaccacggtagtcaccaccaagtctgccgaaatcagggacgctgagaccacactcttggagctgagacgcaccctccagaccttggagattgacctggactcgatgaaaaaccagaacatcaacttggagaacaacctcggggaagtggaggccagatacagggtgcagatggagcaactcaatggggtccttctgcatctggaatcagagctggcacaaactcgggcagaaggacagcgccagacccaggaatacgaagccctgttraacatcaaggtcaagcttgaggcrsagakkgcywcstwchgcckctygywgsargmtgrgswysayywcmskctcmacsacgcyytggactccascaactccwwgcaaactgccagaggacaactacccgtaaggtcgtggatggcaaagtggtgtccgagaccaatgataccagagttctgaggcactaaggctcagaagaagggaaccsttggggactgagggwccaataaaagtttagamtccamwrraaaaaaaaaaaaaaaaaa

SEQ ID NO: 1721 - DNA, 524 bp, Rattus norvegicus
ttttttttttwttttttwttkgkgaaaagaaaatgtgattctttattgarggaacagccacctacaaggtctgttgtttcctgcaccaccacactcaaaaggaagctacactaggaagaacaygcagagccargaacargaaagcagagagatcctcaaaggsatggactggagtctgctttcccarcctctctgtcmagtgcctctctcagcccarggaaagcasggggtggmawggttcttttctcctgcaccggattcttagctttctctcytaygggaagaaaccacttttccgtcgaccgattyctccacgctgatgtggaaattgctgccaccgccgctgstgcctcctctcarggatgcttccctgacaccaatarcagmcatcttagcatcctggscctcaagcaggttccggtaagtssysmhstscygctccagccgagtcttgatgtccagtaacmygtygtrcysmtggttctgagcctccatctcrcagcggagctcactcagctgggtct

SEQ ID NO: 1722 - DNA, 586 bp, Rattus norvegicus
cggccgcagcgaggtgtctgagctccgcagsryswtscaggscctggagatcgarctgcagtcccagctcagcatgaaagcatccytggagrrcagcctrgmagagacaragracmgmtactgcgtgcagctgtcccagatccagggtttgatyggcagcstggaggagcagctggctcagctgcgctgcgagatggagcagcagarycaggagtacaasatcytgytggatgtgaagactcggctggagcaggagatcgccacctaccsccgtytgytggagggcgaggatgcccacctgactcagtacaagccaaaagaacctgtgaccacccgccaggtgcgcmccattgtggaagaggtccaggatggcaaggtcatctcatcccgggagcaggtccaccagaccacccgytaaggaccyagctccttytgcccagttccctgaggctgcagagaggcagctcccctytcggcttggcagcctgtaacctytccagcaacagactcctgtttcagcctyttccccgcatccccctgstcaacaccattaaagcttgctgatytgaaaaaaaaaaaaaaaaaa

SEQ ID NO: 1723 - DNA, 614 bp, Rattus norvegicus
ttttttttttttttttatgtayaaatataaagtttatttagcatagtgtttagaaaaataagttcacatcatttcagaaaacaaataaaacacttaaattgtccaggcctaacccccattacagtacaacatacatactttagatctctttggttgggtaattaaacacagaaatgttctgggacatgctgtgtgctgtcgcctaacagtgcagtagaggctgtttcccaccccatgtcatacattctgtatagtttctcttcatgtaaggcacagtaaaaccatattgagtatacaactgattgcctctgaacatacagtacatgcaacaaaatgatacatttttttttgagaaaccctgaaagtcaaaagagtcacatgcgatataatttgaattaataaaaacgtggtaacatctaatgaaattgaaatgtctcgattagacacaaaataaacattaggttctatcatccaagttttaggaagactttgaaatggctcttgtaaaacataactactttccctacagatttcctgaattatttttatgagatgatctgtcaaaaacattttagaggatgaaggactcgagtttatgtactaatgtccacata

SEQ ID NO: 1724 - DNA, 474 bp, Rattus norvegicus
ttttttttttttttttttaatgtttccatctttccttgaggagtatgaagctggggtagttgagtgacttaacgtcatacaatttggggatgggggtggggaggagtcttgaatctggattccaaggctagtttttactctaagatgcttctcaggattcacagtagttctggtccacgaagtgtgggcctgggattagcgaagactgagtcactgctccctcccaaggggctacttgaggagaggtcactgtttgccccttttcaagctggcccgcttcactatttgagcccccttcctgccttctatcaggtccggctggagtccactccctcttagctccacctcctcgtgctgctgggtgtcgatggcaccagaggagtccacctgtcggacgacttttcgaatgatcttcttggtgacaatgttgccctgttcgtctgtgaattgttcctctgtcacctgctctcctgg

SEQ ID NO: 1725 - DNA, 578 bp, Rattus norvegicus
  misc_feature (567)..(567): n is a, c, g, or t
ttttttttttytttttktyytgaakggcatgatagtttatttaaaaaacagaaacgacgaaacaaaacawcaasagtracaaawctgtaccamactgmtcatgtgaccagcatacacgtaatggcttttctcttgggtattaacattgcagtatgtttagatactgaaatgtttcaataggaccaagaacgttagagagtaagaatcttggatgaaaatggacactggtaagtctggtgcattaacccacagaattcatttacrgccccatgaattggtggcattatgctacgcggttaggagggaggaaagttatctcgggaggaggcagcgtagactgcacacgtctttgtactttgatctttagtttgtgatttaagctgtgtccaccctggctaaaccacaatcatacaagacacctcaggtaatgtccttgttactactgcacaagtttactaacttcattaggagaaaaaagaatcaaaccaccatcaaaacgaagaggcaaataaatgtgaccaaatcatttgaaacgaggaaragcttgcttcttcagtgacaattcanacttataacgt

SEQ ID NO: 1726 - DNA, 764 bp, Rattus norvegicus
ttttttttttttttttttttgkkttttgacyctttawtgggtcattgtgacactgatcgtcagcagcgtgatatatctctcttmacakgggaatgtcgacmkcrwrycratcatggaacatcatararccggaaggtcacgtggggtcggtaakartactctacatgctaaagtgacagttatcctcaaaggaacgccagaatgtgtgtagaccaccgtcacctctgaggagggctcagctgtgcgcagctacccagttataggaagtgtccargatggggtctcttmaccttgtccaggaacagctgggggagcgctsmwygtkcccargatgccamcctccascgcaaggsamccagccctccacagctgcagggacaagcccatgatgtgtwgyswcrwrcygmgkgscawaymttggmctcctccactgasccccacaacagaacctcaagacagaccacaattctgtggaacagaagaaaatcaaagggacatcatccctgctgtcarcagccgagctgtggaaatacccacaaggacacttcggccggccggyctcgtaggctgtgaggagaagattaacagctggtctgagcccctcttcagaggccaccagttgggatatctgakgacagcagcagctctaagggttcctccagaggcagcacgggawcagaccmgtsgkgccacatcccacagccgcctttgagaacgggaagtggagcagcccgttcctgctgggggtcaggatgggcttcttg

SEQ ID NO: 1727 - DNA, 2202 bp, Rattus norvegicus
gggttcttccttcatatgccagctagagagccttgcctccctggagctcatagtccaggctgtgttctggggacctgaggggtgtggtcagggcacagagactctctcagagcactgggagtgggattcctgctgtaagggaagggatgtcataggtcagttgaccaatgaccagacctaaacatggctcccagccttaggcatgcggagcctaggagtcccttcaaccctggcctgtgatttttccagctcagatgacaaagacatctaggcccagtgtcttgagaatccctatagtcaaggattagagtcctcctcagtgagtcagctcccccagtcagtaccctcacaagatatcaaccgaattcggtttttttttttttttttttttaaatatgtaaggctttcaatttattacagatcacccaagaacataatgatatacatgtagtcagaaaacacgatgtagaaatcatagtgagttgtccagacatagtcagtagattattctttctggcatgctccagtgtcaagacctcaataaagagcactaaaatccttccatacaattaagtatcagcgatgtaccatattgcagaaaggggtggctgagcaacagtttgttgatactataagacttccatgctcaacagtcgtagcgttgcactcagcacagctctggtttccatatacaaattttccatcksgtmkggrasmrmggytagtgcmrctscygcttymamcrcagtaactgccagatcttmcaacatsacgtkcagctttgwccgtcaacctgkctgacatgtcgggacccgtgccaagcagggccagagtttacacagatgttaacacacacagaccccgagagtactgggactatgaatcacatgtggyggaatggggaaatcaagatgactaccagcttgttcgaaaattaggcaggggcaaatacagtgaagtgtttgaggccatcaatatcacaaataatgaaaaagttgttgttaaaattctcaagccagtaaaaaagaagaaaattaagcgtgaaataaagattttggagaatttaagaggtgggcccaacatcatcacacttgcagacattgtgaaagaccctgtgtctcgaacccctgccttggtttttgaacatgtaaacaacacagacttcaagcaattgtaccagacgttaacagactatgacattcgattttacatgtatgaaattctgaaagccctggattattgtcacagcatggggattatgcacagagacgtgaaaccgcataatgtcatgattgatcatgagcacagaaagcttcggctaatagattggggtttagcagagttttaccatcctggccaagagtataatgtccgagttgcttcccgatatttcaaaggtccagagctacttgtagattatcagatgtacgattatagtttggatatgtggagcttgggttgtatgctggcaagtatgatcttccggaaggagccatttttyywtkkwywtkwywwtkatgatyagttggtgaggatagccaaggttctgggaacggaagatttatatgactatattgacaagtacaacattgaattagatccacgtttcaacgatatcttgggcagacactcccgtaagcgatgggaacgctttgtccacagtgaaaaccagcaccttgtcagcccsgmsgcmwwggattttctggacaagctgctgcgatamgaccaccagtctcggctcactgcaagaraggccatggagcacccttacttctacactgtcgtgaaggaccaggctcgaatgagttcggctggcatggcagggggcagcacacctgtcagtagcgccaatatgatgtcagggatttcttcagtgccaaccccttcacccctgggacctctggcaggctcacccgtgattgctgctgccaactcacttgggataccygtaccagctgccgytggmgctcagcagtaatgaccccatctgtcttctgatgcctgggcaraggtgggacgtccaccctmtccttaatgcagcttgcgcctggttgggaggggtsasaacacttcagaagcmccgtgtmtgaaccgttgcttgtggatttagtagttgagtcataaaaaaaattataggctgatyttctttcwtwwwytyywttttttttttwaaaaaammraaaaaaaaaaaccttcctcgtg

SEQ ID NO: 1728 - DNA, 490 bp, Rattus norvegicus
tttttttttttttttttdaaggkcaaaaccttttaattttcaaacatatatkgagcaaaaaataattaaaaccctattagcagcccttttttcctagagggaaaaactacaaggtgtatatgtgggagggaacatgacagtgtgaggcgaagggcggcaragcyygtcstcmgcttcttcataactammcactaaaacagggatctcctgatctacagctttgamaggccmwmgactcagcccttwcwtsawsamcyrsggkcctcgykyckctggtattcgtgtatagagaggtggtatctctctatacctgaatgaacctgcctatgactggtagtccggtgcctgtaccctcttakagaggctccctgacaggtatgagaggaaggcatccatatctgcagcatctcgagacagagttcatgcctctgtggtarcccgagcagaggtgaaaaccacacttttcctgtttccgagcctcttcctccta

SEQ ID NO: 1729 - DNA, 554 bp, Rattus norvegicus
ttttttttttttttttttkagagakaaatamsgcctttatatacacagaagcacaaggkggcagkgggggattgasasgkggkggsakcagtgkgcttggcakggcasggcaraactgaggtcctgttagtgggaaaagatgccccggaagcgggctttgtcctcctmatccttctgccggatccgtgcctccagggcccgcagctytytgcttaccacaggcsccasggcagggtckagctccaacaccttggyaaagtcagcctgggcctcctgsgcattccacacagcakcatgkgccttaccccgcttgaastaagccttgacattgkcatcatacttgttgakgatggaggascastgatccavcacctcatagtactcctgagccaccadcttgcactggcaatagttgagtagcagtggtgtgatctgcaagtccaactggatccagtcgggtgatccaggctgctccttcatctgcaggttcttgaggcaggcaatggcatcgtagtacttgggagcagcctccttcacctgcccctcacggtata

SEQ ID NO: 1730 - DNA, 637 bp, Rattus norvegicus
  misc_feature (24)..(24): n is a, c, g, or t
tggcattaggcccagggtcttccntagtgggtgggataggctggcaagctttagggtgctattggggctagggcaccttgcttgcctaggtacttgttattaacaggagtggggaaccaagtgcttggggacatagtactagaggccaaaggggtgggcccarrkmmtrykamcktcgtksywhgrvrhddsdykccawkytscaggcytcagtacgtgkyccctcagmcaagaaggaggagtaaagacttggtttttccctgcctgtagctggcttatacttgacccatgcttactgcttccttggakcccagcctgtccctctggtacttggtttattcccttccatttccccrrywykmkkccatggcttatagatcattttggycccatwasasatastaststwatrccaaaawggacctgattgttgttcattcacagtaattttgccactgttctgcctggccagggcacttkccactcctagaagtgtagaaaagcactggtgacctkggctgcacttgtactccattttattktgccatgtatcctaaaagaggctgctgttaagcaggtcaactgttttatcctgaggggaataaatgttgttatgttwmaaaaaaaaaaaaaaaaa

SEQ ID NO: 1731 - DNA, 982 bp, Rattus norvegicus
tttywykwkkwddddwyyhhwkwyywwyyhkwwtaawttggcaactttaattcttaggaagatcaaagttccctccaaacstaatttgatgtttcattcctagaagcaaagaccagcatggcacagtatcactccagaggaattaaggaagagccttgsggccgcttccctcacattcatttgragaatggrcacctccctacctcagaatgctttagggagggactgctaccctwacatggttccttattaaatttgaaaagtgcctcaaagtttggacaccakaaagacaccccaaaaacatgtgtctaaacggcaacttcaggttaatatgactaaagcagwtwcattgtgaraardrmwraarwawrtgatgtcttccccgrcacaggagtggscacagctcctcaccaaatagtgtagccaccatctgagccacccatgaagaagtttcccttgcgstgagttacaaggacrttggmtccctgcatgactgcaagctgagcakcgttgggagggcatccaggakgtggagkargaatgctgccagtggtggcaccagctccaaatctggcacctgcatcgtaccctccttccamcagcactgccgagccaggtggatagatgggaccaactgggtaataagccatggggatcgtggagcctaaaggcccaacagccacagastgggccataggcagatacaacgaggcgccaggaaatgcagctgacatggtggggactgtrgcagcccctggatgaacaaagcttrgacgatagagctmtgagtatgcaggtggagcatcagtatagggtggagcctgaggaagatgtaaggtctgaggatatactggattcccaggaggctgcacagggtaggtaggctgtgttggatattgacctttgctgttcatggtggctctgaakccacttccactcggcgtcgcggacggttatttttctcgtcctcttcctcctcgtg

SEQ ID NO: 1732 - DNA, 1011 bp, Rattus norvegicus
tttttttttttttttkkcmattcaaaaagctttatagtctgtcaccacgaaaccatggcggcwgtmattgtcggcaagcgtwtacacatggaaaggcagttttcaggargtaagaactggtccktsstgkkygckkgkkgkgatkccakgaccaaacccaaggtgctctccaracttggaraaggttctaccactgagtcaagcatggtccaccaacctcggcctytttcacagaggcaaaatttccaragtaaatcccctctgaraagttaaacaagatctccacmcwygtkccraatatatcaatttcatacaaaatggagaaaccggagagcaacaagtcaaatatgtaaatatgtgagtmaaaaatatacaggcaccttcctgatatctaagcccaccggcttgggcacagcatccggaagcatgtccccttcggragggaggctgccgctctcctccctgaccctstagcttcctccagcaatgaatttcagcgggtgctgtcagattttccmgwraaccttctttttatagagaatgtaggcaatgagcacccagagagcggtggcgactatgttctggatgagatgctctttatgtgactgctcatcctccagcttccactggaaggggaagtagtcctcaaacacctcgtgaccgacgtacaccaggatagaattcatccctggataaaagaatggggttcctgtccacaggcccttcacatccaccaccgggtagaggatgaggaggatggagaaggcaaagcagctcagcgtggtgacatatgagatggaccagagattcttgtttattggaataaagccttcgtttgcagacatctttgtcaaagcaatagaaataagcccaaggatacagcaccaggcggcgaatcgtatcaggatggctttcgtctgatccttgtaatacaacagtatttttcctgcctgaactcctaaaaatgccatcacaatggagttgatagtccccaagactccttctgggtcc

SEQ ID NO: 1733 - DNA, 960 bp, Rattus norvegicus
ttttttttttttttttttawgawacaaaaatagtttattacaaaagaaatctgacccaaacctaataatttacatcgtgatcaatgtcctcccaatcccctctgttcctccgggtccgtcggggtakaggatggcagaggaggggctgtcctttggttcctccactcaaagaatcgaatatctagtggattccasagagggaaccttcgtgcctgarattaaatggggcttagagtcctgggcaatgggcgcaactgggagtatctgtgctcagtagtakgtgcatgtgccttggtgcaaaacctggtcccgaagactgggcgggggaagcasaacaaggtcctcacagtttccagaagagtggtctccacagggcasggaagcccttcctcatgagtccgggtctgctcccccatccgtctcagctgcttcctggagctggggagggggctacgggccggscagggcctcggaggacccctgggaagggcaggaaggcaggtgcagatgttgcaggaaggaagtagttttggggagtcatggggaagcttggagcatccttcgggggagacagcgagggtgaggagctcggagaggactggaggccaywggagctgagwyggcwsctgctctcaggskagttgktkscacywtggwctgrgkrkggakcaggcygtgaccctgmagcasmccgagmskystbyssccytrkgmtmtcaatgaccctgcggctgcgcgccaccatgaggggtgtgtcattgtgacagttcttgaggccgctgtcagccccgctgmkyaccagtgtgcgcaccagaggcagaagcccgcggccagacgcggaatgcagagccgagctgccagagtacatctgagcgttcacgttggcgccgtgcagcaggagcagttgcaccatgttcaggctgttgttctccacagcatggatgagtggggagcggccgc

SEQ ID NO: 1734 - DNA, 699 bp, Rattus norvegicus
  misc_feature (543)..(543): n is a, c, g, or t
  misc_feature (659)..(659): n is a, c, g, or t
ttttttttttttttttttgakgaacacaatttgttttatttttctgtccaagagatgaatttgtgcaggaagaaggatggtgaccctcccctggagccgcaccctgcccgaagccctgctgctagtgttggaacccaggtcttggagctgtccaacagtgagtgggaactgctgaggacgtacactcttgcccgaacaggccactggtctcaccgatgccgctttcggatactctgtagctcctggcagatggtgctgaagctaggcctctgccccggctcataggcccagcactgctccatgagcctgaagactgcatcagggcacagctctgggcaaggcagacgatgccccttttcgacaaactcccgtgtctgctgattggtgaggttgggataaggtgaggcccctaggctgaaggtctcccacagcaaaatgccaaagctccacacgtcactttctgaggagtagcgtccataattaagagcttcaggggcagtccacttaacagggacttgtctgaggccggctgaggccgcgtanatcccgtcagcctcttctcgagacatcccgaagtcactgatcttcagaacattcttctctgtcaccaggcagttgcgagcagccagatcccggtggatacagcacttgctttccangtactccatgccagcagctgcatcccctaccatctgcagc

SEQ ID NO: 1735 - DNA, 632 bp, Rattus norvegicus
ttttttttttttttttttggtcaaatttgttttaagctttttgtcaccaataaaacatgaacaaacggtccctgcttttcgcgtggggccgtccctgaaagggtgtcctgggtggtcagcgacagccacactcatccaccaccatgtcctcgtagtggcgcagcaccacgttgtcactattatcgaagaagagcacggagataggcgacagacgctctggcacgcagcagggcgagcctacacccggrgtgggagcagctgcgtgcatgagcgcgcgcagcacagcgtggwtaartgcaggcggcccgccgggtcccctcagtgtttcaggtakcgcacacgtgccctggcasaagttggctasaaagccccgcggcgcaatcacccagcggtgccagcccacctcacggaagctcacgtgcaaccgtcsggtgcgacatgtgcccactggaccacctcccaccctgkgctccgtgtggcgccgtgaccgcggcaagggacacaggcgtgggtccagcgtcaccagcagcaacgaggcctcagccaggcgcccacaggttgcagcggccccagggtgcagcgccagcgccaagcgcagagtgcgcggcaccgatgcgttagccgctactgca

SEQ ID NO: 1736 - DNA, 902 bp, Rattus norvegicus
ttttyyttttttttttttkyktgaacamragggattttatttacagggaakgagagaragatgaggatctacgtgtcccabgctctcatctcwtgwggtaaaargaarggtgrtgttatctcttcwtttgctgacrccgcagctcattgttgcvggtcatggsgttggctgcccgagctcrcggyccttgttgtgtgaagtggkacccgaascggmcaatasacggmmactgctcyascacagtkgscatctccawctcyasagsakctccaggccactggsgctggttatctacwcsgakctcartgagagtagcgttttctcgaactgccttcascacagccatgwsccctgtgctgctgatgaagttggattcgatgttcaggctcaggagactgcggttctcacgcaacatgtcagccaccgcattggcgatggggtcaccactctttgtggccaccwsrctgmmgctccggacataggtattagtcttcattgcttcacacaagtcgcttakcacgggtatcgggatgtcctggatgttattgaggttcacctcctccagctctttgtcawtgctccgcaccmtctttagcatctcctcaatgttggtggggtttgggggttcatctggtactggcttatacttgtcaggctgcamtacactgytaatgccttcggtgttgcagatctctccgctgcagatagcatcatagtattgcttgttgctcatcagtgtgtacatgcccaggatcgctgcaatgtcacacatttcagcatctgtggcatgggacagtgcttcctccagttcaggctccagtgtgatctgttcctgtgctggaatttctctcttaggctgaataaagggttttcccttcttctcgccagtgaagggcctcgtg

SEQ ID NO: 1737 - DNA, 803 bp, Rattus norvegicus
tttttttttttttttttwywwwytykkyywywytygccggctgtacatttaatcagtgcacattatttacagaactaaacgatgcggggagggggtggatgsccccacccctcsctggctctcabgttcygtagaggygatmcctaaagggygctgctggmacacccctcccatctgtcacctctagtgccaggctctaagaatccaccacttgcagagaggcggtgacccagaggaccctgggtggccgccctcraggtttaggaggcagaagagccagagccagctgttacagtaccatttcccacagaagcctcctgctgactccaggatgaagagaggaaggggggccccccctttcacccctaggacacttcccaggccttagtggattcctttgggggttccacaggctctgtgtagggtgagctgctggcctgagcctagtaktgttgtgtgggaacaggaatctggaagggaggaagtccatagtctggtctgggacctgctgaacatccacactgccaggaatcgactggggacctctggtaccctagtatgtgtgtctgccccatgtccccaaaggttgggacaaggacagcagaagccagagggtagagggagtgcccagcctcctgagacctttggggtaatgaaagagaacatgggcagtctagggaaggaggagcttagttactagcactgggaggggagcttcgcgggctccctttggtccttggtgagacgggtcagggcctcttcstagmskmrwggaagctgcaagcccaggggtgagcggccgc

SEQ ID NO: 1738 - DNA, 806 bp, Rattus norvegicus
ttttttttttttttttwtktttwyayaaaaccaatgtattttatttagctccatacaaaagaaggtggttaaagacattaaatgaggatgagttatctgtaggtcgaggcagcagtttgcgcatgtttactttggtcactgagccaccctacagccccatcctctgttataagcaggtgctgtaaacggcaactttctcacttatgtccttaaggagtgagcgcacctctccttccagtcgcaccagttcttgagctttatyttctaagtacttttgattgtcctcatacttcctttctaagtcttctaacagctgaagtttgctgttggcttgggccargagtgtttttgcttcattttgtagcagctcagctttcctcctggcatctgctgactcttcagttttttgggcaattaaactctctaccttcttatatttttcatcaagttcgccatctakagtcttcttaacctcgtctgcactctgttktacactatatacgactttttcaatatagtctgcctccccagagttctgggcagctttacgcytmrgcycttccacattcctctcaagcttgctgatgcgctgggaggcattggtcagggtttcctcagacgctgctgtctcagattcaatcgatgttagcaggttctgggtcccctsgwkatcctcatcagcttgtttaatcgccttctctgctgcaacctgggccttttctgcttcttccaacgcctcctttaccatgtctgcagtgaccttaacatctgttgcacttttgcttgctctcttagcttcttccagc

SEQ ID NO: 1739 - DNA, 662 bp, Rattus norvegicus
ttttttttttttttttttagcagtgtaamactgwkkgttttttaatggcaggtcaacaaatatcctgaaacatacatagattctgatagtcttcwaaccccagttgaattcaaacttgaaagtaacacacgcgagctaagggaagtcaatgttgttccaaggcacttactgaatctccatgactagacgaaaacaagaaccattagggtgaacaattagacagtatataatataaaaataactttttgcttacaatttacaaaaggtattattatwacactctttgatctctgataacctgcaatgctggctacacgaatccagcaagtttaaaattcagaaacagttttctaaaatttcagggcaaataatttacaagtaagatacacaaagacttaaaccatgcagaaattcttacatcttctgttaataatattttaggacttcaactttatcaaattatatacctacttgccctgtacatatacaaaataatgcatacatgataaaacagcaaaagagtagtcctttaactcagtttatcataaaagtattactatattaacaggtctacaagcagcttgtaacagggttaagagacattaaggcaataatacttgaagttacaamawaaammmtwtgyrrymstttctcctaagtgt

SEQ ID NO: 1740 - DNA, 723 bp, Rattus norvegicus
ttttttttttttttttttcacttttgctgatggtttattgctttaaggagaaaagctgtaaacaaagaatttgaacaatgaaaactcatcatggttgaacacattccctgctacacaaatcatgagaaaaatgaggaatgcggtaaaatgtgacaggcagcccaagggctggctatcctctattaggaaattcaaaggcatttcttcatgtgtattcacttagagaatggcagtaggaatatttaaatactcaatcacagtttgaaaatagatatgtacatacaaatacaaacatatacacacatatatatgcagggacacacagctaattatggccttatgcttatcaaccattcagskctgycamtktggttcctttgagtcaaaaacaagtctttcaaaagagatgacagaagtcaacgctatagtcacagattgtaatggtctccgcaatctctatgcatatgtagttcaaaattgattaggatggttaccgacagtcctattgttgaaattactttctctaatcaacatttgatcaccctcaaaattagaatttcagcactgtcctgtgaattgactggtgactctagagcctttgattcaggaacaggaaaatgggctgggtgtcaggagagatggcatgggtatgtcacttgctactgggtttcagtatctgtagtgcctcggttggtaagacttgagcaatcacttattcctgga

SEQ ID NO: 1741 - DNA, 674 bp, Rattus norvegicus
ttttttttttttttttttcagataaaagtgggggttgatttattatctcagtagattgaattggtcaaacacacaacatggcacamaataggacccaatactgcaacatactccagatgtccagtcattgtacacgtgtatgtgagacagttagttttatagtgggacacatttgatasacaaaatgtattatgtgctttggcaaatacagtcgttcaaatattaaatcctggcataggagacggtggtgccagacgctcatcttgtgccaccaggagtttctcaagttaaaaagcacccattgagttaaagtaatttgtcttgctccgtcacttcttgaagacagacakcgcatgggccattcggattccctgcagggccacagagattctgtcactgttataccawatgggaactstggggggcactcctgacaggsccactgtgtcgcagctgaggtaagactgtcttccgttmtcataaaggacgcacytggattacatcgaccttagatgcgctgctwctgtcgctgtcctcgactgacagkgactcatcactggtgatgatgaagatgwtggmggaagagttaaatgtcactttcttctttggcctstcccmtcktkctgtgacatcacaatgggcctgatctgcatttcactctcagctgctgggag

SEQ ID NO: 1742 - DNA, 729 bp, Rattus norvegicus
ttttttttttttttttttkkkwwywtkywwtytkywwtctggataccttttatttaatttcaagaattccctttgcacggcaaaaaagggtctgaggaaagcagagcagcgcasatgagcgggacagaagcagagtgctcacaaaagtggtaccatgaaatgctggctacccaccacactccctakctgggagagaaacaggatccacaaaaggagcaggaaagccatttttgacacaaacaagggtcctggggcatgccaccccaccccagtgcctgkycatgcaagatgctgaaatggagactggcccaccaggctgcagtgctgggagccgtggagtgatgcaccaaaatgaaagggagtcctttgggcgcttcccaaggcgcctgcagggtcagagcatagtaggtctgtgtccatgtccatgagcacaatcagttaacagatagcaccaactgggatgcccagggcaggagagctcaggctctagcacccacttgcccagccctcctgggcagagtctcattccttggtggctactctggcagccagtcttccctcaccctgtgccctgggaaaccggagtaaatcatcagggtgaggtctgccgcagggcaccagctgcctctggagggcctggccttagttgtgcagtgaaaagctgctgctgcacctgactgaatgatcagaattgagaaatacaggctaggggaacaggatgccctcgtg

SEQ ID NO: 1743 - DNA, 746 bp, Rattus norvegicus
ttttttttttkkkkytyyykkkwaaactkyaaattcctttattgcttttttgataawwwaaaatatagtatttgaaaacacatytgaaccgcctcaatcaggaatttcatttaaaaattaatcacagattttaaattattcaatttgcaaaaaaatctcatctatttctgacactaattccaatgcaattttcatcaatcatcttgaatcaaaattagactataccagaacctcaatgaaggcaaagacatattgtctcatttcctttccctgccarccttgccaaagccaacctygctatctagaasagaaaaaccagggstwgtctcagggtctacctctgtggccctawatattcatcgcttttatttaaggggcgctctctgtctaraacaggaaacaagtaacatctggccaaaggacagacaatggcggccavtaggactgcaataacctacaggtgtwsctgggcctakkyaagagtccacattyacatgtggcaggggctytacggaccgtgcttcagcacccaagctagctgctgggtacccarcctgactgcygacgtgagacactgcagtgttcctgacacaagtcatggggcactccctgaagatgaaacagcagatggaaacccatttcactctgtttttccagttttacccatttgaacgttcaaggagacactgacctgtggcctcaggaagtgatasgcaaagttaattatgttcttcagttctgggtgg

SEQ ID NO: 1744 - DNA, 414 bp, Rattus norvegicus
ttttttttttttttttttkgatkggggaaatcaatttatttcagtgactctccgcagtgcactcaccagcttggtaagacttgagggattctggacgggacagaagccatccattttaaactagacaaaggagatttcgaactaaaaccataaagaagggtagaggaacttattgagaatatgaactttagacatcacaaaaaacaaamcaaaacaaaacaaaaaaaaaacamccaamcaamcaaacaaaaaaamcctcaaactgtttggtcagaacgtaggaacataactgccttgagaaatctgagaattacctaaccggagtgcacactgccttaggtcctgccagcacagaagtgttcaagcgaccacctccagggccgagtgttcctgacccaccacctctagctacag

SEQ ID NO: 1745 - DNA, 709 bp, Rattus norvegicus
tctctccccatccacctggccatccgagagggccatagctctgtggtcagcttcctagctcctgaatctgatctccatcacaaggacgcctcaggcctcactcccctggagttggctcggcagagaggggctcagaacctcatggacattctgcagtcgcacatgatgatcccaatgtgacccgggccacagtctcccaccttgctgggttacttgtcaacaaargaggaaagaaactttctcttttcactcctgtccattgaagaarggagtgggaggagcagtttgtggtttgttggtgttgatttcttgagtgtgygksykyrrrggttgtttctcatttgtttttctcacccctttttggtgtgttggacaaagaaggggctcctacaggcaccagccacctaaacggttcagtttcctctgcactggggctgcacagaagacctcagggcaggggcttaaagctctagcctcaagtgaggtcatcacctcctgggctcctgggagctggtgaccttggtgctcagagagccctgaagtgtgagccatctactttggtcatgggagggggaggggaaacatttaaaatcagttaaaaggataacatgagttttttgttttttttttttcatggaaggtttccagttttgttgtacagtttgaaatatatatatttattgctttatggaaaaaaaaaaaaaaaaaa

SEQ ID NO: 1746 - DNA, 643 bp, Rattus norvegicus
ccctcactaaagggaataagcttgcggccgcaattgtttwkyttywtkkkywtktwttwtwtaaaggcgaattgattttatttctagcatctcaataataatgactgkggggactgagccggcctccaatcggctctcctccagtcagcacacactararagcaaggagctccccctggcagtgactgcagcaattgaaagttatattttcatatctggtatagggatggaaacgtccaatatttttctttgtagtgagtaatgtggattcggcaaatgcattgtccggagagctttctgtacaggcaactggatccaaaatccgcagaaccttttcagccatcttctcagctggggtactgcaracttctgctgttgctggagtcctcttcggatggctgatgccaacgtttcccagcagatgagcgtgyaccgcctytgccarcctgtggtttgtgagtgctaggyctgccgtgctgtggggctgtgtgttargggagtatgtctgttctctcccccactgtwaggagaccaagagttcttccaaaamytyrtgsstgrakwtcatttcctgacggaactgttctctttcactcaggagatcctggatagcgctctgggcatctcggttctgacgctgtag

SEQ ID NO: 1747 - DNA, 709 bp, Rattus norvegicus
gtatcttgtcacaccttaatgtttagtttcatcagctgcttctaattatagacatttttgttaaaacagatattggcataaatacagtgttctgagtatgcgtctaagactgatttgcatactcgtgtatatatttacaaacagttggcccttgctaacgaagaaaacctcattacatatacaatttgtgaataaacaggttgaaattatttacagaatttcctaaaaccacaaggtattaagaacttattgcatctgtgccasagacgtactgttgtttasaaagtccaagccgagtaaataacggmtgccttctcgcatctcagcttasgtgcatgctcttccasggctgaascggaggggasgggaccattgtgasagccgagtgtccactgactctcttatgatggctgcttagcatcccactggctgttcagaaaggctttctcacataactcttgtacttagacaggcaagttcccagatactttaagaacaaattttgaaagacctaagtcacccccccaccccctcagaacagagcacctgtggggcccttacattccagttctggctgggcagacccacatccccactccctcattggtcagctggctgcctcaccacacggccgaaaagagcgtcatggtttttttttttagaaataaagtcacctgtttagagcgcggtcaaaaaaaaaaaaaaaaaa

SEQ ID NO: 1748 - DNA, 524 bp, Rattus norvegicus
ttttttttttttttyttkykwkgcttgggtaaaatttataaatggcaaagagaaacttgaagttacytgaygcgttgtggtttaagaacaacacttgagtahagtcytatgcatgaaaacgcatagggcgacatagctctasttgtgatgtaattgttttcaagatgaaggtgttcaagagctgagtcctcatcttcctcagcattgcagatttgttcaggaaggatgttccgtatmttawtgttgttcagcctcagaaaatgcaatgctttcattccttgtattccagggggtatggatttgaagtcattgtgatccagaaatagttctctcagagaatgatatgctccatagaacgagamtaggtccacaccatcatcagaaagtctgttaaatgacaggtacaagtactccaggcctggtttcatgtggccaaacacatagccrgggatccgttcaatttggttcccaattaggacaaggtgcaaaagagatttgggtagataggaggggacgtcctcgtg

SEQ ID NO: 1749 - DNA, 568 bp, Rattus norvegicus
tttttttyttttttttttcgycyccawcatttgtatgtattttggggatttttgtywtgttttgtttttttaaaaaagakacaaacaatcttcaaagtttacctttttttggacttaaggcataacatgaaattgctcattattctaaakctgaattttgaaatgaacyastttartgctatcaaaccctgtttgcgtgtacagtgtttcaattataragcacgttgtttatgttcttgcycgagtcctgatgttgttcctgactgtgccatcccatgccacmgtgtgcctgctgccactcactgccatgcagtggagaagctaggcaccagctcgcagtccccagctgccatctcagttcaatgcatgctgcttgatggtgtggaagatccagtccatttttgttgtccagccaccatgatsykcgtcmktcatttgctttgtgaaatactccaragcctcttgctcagttttgtctaaggctagagtctttcgaatatatgcaatatcatcgaaagactgcagttctggcattccggagccaagcatcatggagaaaagcctcgtg

SEQ ID NO: 1750 - DNA, 1169 bp, Rattus norvegicus
  misc_feature (303)..(303): n is a, c, g, or t
ttttttttttttttttttgcgggtcatcaatatattctaattaacaaccaagaaactgaagtcatcgtcattataataaaattccccaaagcaaccaaccccaaagatcacgactctaaggtgattaaaagttacagggaacagaaggaaaagatcaggatgaaagagaacactatgggaaccacacagcatgtgaaggatgtaatgcctgactttcacagagctacacttaggagtcagaccatcagttatattacaagggaaccaataccaacatctctcyyktkkwkywywktkwttganaagcacatcatttttatggatatgtttaggatggaaagggacgggagaagcgagaggagscaggaaggtgaaggtattatatacaaagagaaatgacagagaytgcctyctcctttagctctttgcgctttctttttctttgttttccgcatcctctggatacgcatgccacgtcagtctctcttcataaaatgctmtcacaatttgkggacatttcacattagcttyttttgcaaggaccaggtcagcttcatctgtgtctttccatttcattaakaacattaagtctccacaggaatctgtcsccccaatgatcttttctggttccagtcctctctcaaagycccgagcgatatcattgctttgctctctcttttttttgsakwkratatcatcagcactkktggaaaaactggatttcctcttgtttccttmkgackwskccctargcytsktgyystctycctycttcatcttcttgwactttttcmtmrwstcagaaattagttcaggacaatccaagttcttctcargttcccaartgttgtgctcctcagaaaagcctttccacttcagcagatactccacttgccctttaaccatgcgcctgtccaacaccttttccaccacatactcctcctcatcctctgatgaagagctgtcggctgtcctcttggtcttctttcccatgttgggtatgtgttggtccacctaaaggagtgcggccaccaggttccttggaatttccgggagctgagcactttargtcagagcgctgggttaaaaccagccccatgttggaagcatgcagttaagcattgtggctatggccttccctgcctcaccaggaaaaaaaaaaaaaaaaa

SEQ ID NO: 1751 - DNA, 524 bp, Rattus norvegicus
ttttttttttttttttttywykkywccaagataattcatttattagaagcagggggtgggagggataacagagcttcccatgtttggggacagggcccaacacaagtgactgcacagtgaggtggmtggwcaggaggaggaccgctgcctgsgattatgctgctccaggacaaggcggtgcacgcctgcattckaacttcccycctgsagagccctcctcaacgcamacaggarcgaggcarggtgggggaggccactcggtagcarcggtarccttccagcatggctgggagaagtagcaggccacttagaggatctttgtggcagcgccccatggcctccttgtagctcagcctctccttggtgatggggtctgtcaaatccttctcgtarctggattcgtcttgcaggagctgacctaggtcttcgctgatcatcccgcmkmgyrcmgcctgagggacggggatgcgtcctgtcctcttgggatcgatgaggcccccagtaaggtgctgcaccagtaggtg

SEQ ID NO: 1752 - DNA, 638 bp, Rattus norvegicus
tttttttttttttttttwkwwkyttwkttaakcaaatactgcaggactgatttaatcagtataaaattgaaagatttagatttgtaataaaaatccaaatttgaggaagggcaaactttaaaacagcagccaagtcttaraggaagggcaggtgagtgcaggcacgctggactgtggggcggggaactgaccactgtcaaaccagtgtaagttgcttggtttctcatggaaaacattttatacacctaagtccatcagcgtccaaatgtctgwtctgttggtaatatcacaacataatattacatttactccaaattctgtcycawgtgggaaagttagatgatttcaaatactttcttcagctccacaataagctgccagtcactcttctgcatttcgtctctgaaccagtctttgagtgcatcsatggactgscggctgatcttgctgacaagaatgtstgtagcttmsaagtgtctcccaaacatttttggagattcccmagggatasgttctattttgacacagacctsttgtcctttttttgcaacatccacstgcttgtggtttatttcaatgcttgttactatcccaatgtcaacaaaatttttgcttggaacacacataggtgttccttg

SEQ ID NO: 1753 - DNA, 557 bp, Rattus norvegicus
ttgcggccgcaaaggttttttttttttttttktywwyytktytccagtktagaaaayttttattaagagtttgggttttaaaatgagtgagacaccagcatctagacagctccagcctgcgggcctggctttcagcgctacgtgacaaagactcttagggtcttccctgttaccgtacaggacagctggtggacagcatgggacatcttaggaacgtgctttgatgtgagggcagagtggcttccatgatggaaacctcagacccccccaccccmaactctgtcctgcctartctgacaggtgcgtggaygctgtggccaggcttgggagagggagaagggtagaaacccaggccctgytggctgccgctcatcctgacaacactcaaacctggcctggggtatgtagaagcctatttttttttttttttttacctgagatgggacagggccagtggggagggggtgtgtgtgtatatgtaagtgysatcrykaattttcatctcgtgcccaatgacagaaactgctcaccctgcagccaagcctacacccgtgggc

SEQ ID NO: 1754 - DNA, 751 bp, Rattus norvegicus
ttttttttttttttttttaccgttaattttttttaattaaagtatattaaaggttaaataaaacatgactgtgtcagactattaagacttgagaagggttatttttcttaggcttccctcctggtcatggaacttttgttgctgttaaaaattacacaaggcaaataaaatcaaggggtaaactaatgatagttgccattgggaaatgacatctccctggaaggtcaagatggggctgaggagakwwkwywwwyywywwkytchawtttatcatcttgttagaagactttcaagaaaccatacaaaccagatacacggcgcatgtgaatcatgaacacatacgggatgagaaggacctcaggctgatgctagggtggtcatcccaccctagtgcctgctagcaccacgctggcaacgtcctgatctaggacccccacttttatctactaggagctggggagaagccagatcagagacgtggagtcagaaagacccagttcctggggaagggatcctcagagtgaggaagagtcttcctctagagaagccgccctctgcattcaatggctccacagcagcacagcagttccttgccttccacactgcccacttcatagttgtaatcccaagtgagttctgttccagcccggattctcttgctggcaaaaaaggccacccaagggaagcgaagatyatgggtatccacaaaaacgttctggacaaacaggttggggctgcaactgtgattgag

SEQ ID NO: 1755 - DNA, 530 bp, Rattus norvegicus
ttttttttttttttttttywwaataaagagtcgtttctttttatttagtgtaactttcaggaatttaaacacacaaaaatgcacaggttggaatggtcacaattttgataaccacagttgtaagtagggaacattcatccatttcaaataagattataaatatttgatactgtaaaatgcacattttataaacttaaaaaaggacagatttgcttcctgctaaaaggcatgtgtttcaccgatccccaagcagaagatggttattcacactcttaaattacaacttctgtttttatagcttccttttcagaaggttggcacgaatatgtacaaagagaaagtgttggsgcagtgaaataaagaggtttaaggcaaagagagaaatccaccawcagtcctcagcaggcagcctgacgctcagctcakctgagaacacccttgccactgtgctggccccaggtggacatttggacacctttttcccatacactaaacagaagacattgtggagttatatataatgtgtttgc

SEQ ID NO: 1756 - DNA, 746 bp, Rattus norvegicus
ctagatatgtctgcacttgtgattttagactctcsttgttttcctctgaagcctgagatggatttaacattggtttgggacacagactttgttcagctgtccaacttcaataggtcccaccaacaatgctattagcccaaaccatgggtgttttctaaatcttaactggggggcttaattcagcaaagcctccattggtggcttcagttgtggctggatagctgaacagagtctgttttttgttgtgtgtggktttwackkywykwkkktttttttckywmwkkytytttttttyttttttaatcttttttycttttttaaacttgggaccaccaagttgtaaagatgtacgtttttacctggcagttgtaccactggtgcactgtcatgttgagaaagagtggattgctagtttgkatttgkttctaagattaaattaatccttgataamcrwwrmwwwwrwmrrrwwarwmtttgaccactatagtttgacgccatctccattttggctaacctgtctcaccatcaggcctattaactctccatgactaactgtgtaagtgcttataacggaataaattgcttttctayhtmrhvmmawrmwrrwrrrwtttatttagtatccatcagacaacagtctctggcttctggaagaatttgttcgaatgacagttgttttccatgattttgactatcgagattagaataaacataacagacctacmmycrtrmmraaaaaaaaaaaa

SEQ ID NO: 1757 - DNA, 672 bp, Rattus norvegicus
tagcagcaagaaatgtccttgttgagagtgaacaccaagtgaagatcggagactttggtttaaccaaagcaattgagaccgataaggagtactacacagtcamggaygaccgggacakcccagtgttttggtacgctccggagtgtttaatccagtgtaaattttatatcgcctctgatgtctggtcttttggagtgacactgcacgagttgctcacgtactgtgactcagattttagtcccatggccttgttcctgaaaatgataggcccaactcatggccagatgacagtaacacggcttgtgaatactctgaaagaaggaaagcgcctgtcctgtccacccaactgtcccgatgaggtttatcagcttatgagaaaatgctgggaattccaaccatctaatcggacaacctttcagaaccttattgaaggatttgaagcacttttaaaatamgaagcatgaacatttaaawwmmmawwwawmaartccttctctcccaagccatttaaaaacgytttttaagtgaaaaagtttgtattttgcctctaaaggtgatcaacaaatactcgagttacatatatacatgtatatgtcacatggtcactcagtgtgtgaaactttctctttaaaggtgtaacatcttaaatttagtgatgaataacgaccacca

SEQ ID NO: 1758 - DNA, 424 bp, Rattus norvegicus
cacataaatgtgatgatggagtttccacctgccacttacaagctattcggggaaagcttatggaaaagactggagtctacatccttcgtcatcgaggaacagacwkwkkwywkywttwkrswgcacaagccccaaatgaataatgtcactgggaacttcacgtatgtccttagagacttacttccaaagacaaactactgtgtgtctgtttattttgatgatacacctgtaataaaatctcccttaaaatgcaccgtccttcagcctgaccaggaatcaggtatggttaggcttttaaaatttgcactgttgttttgatggaaaacttgctgaaagaaaaaaaamaactcaagtkcyggtacactaaatgtacttcttccaataaatgcacatcactgagctgttwaaaaaaaaaaaaaaaaaa

SEQ ID NO: 1759 - DNA, 816 bp, Rattus norvegicus
gagtcccagcatactgtcttttaagtttacatttaacacgttctcttctctgctccctttgacctctgactccttaagtttgctgctgagggttgtaaatacagcaggcaggtgaccgggctgcaagttcttgctggacctctggcaaaggagtgatcagtgaaggccagtgccaccttgggctctgtgagsccagggtgctcgctgtctgctgtcacagctcccactgtcacytgagaactttgccagtgcactaatctctttggagataaaattctctagtgtgttactamkgybmrarkkttttttttaagaatwtacagtaccatgactgaaatattaatatttaaaatagttcattccttaattctccctyatttgctttacccacagcctattcatttcctttggcagaactytgcacaatgtgttacccactactgagattgttccgcccctgacgtgtttgtgttgatttgtttctggtggtagagtstytyrtgcygwrtktagaaacaggcrttttwtgacagattgttatgtagtgmatgctctgtggaattcagagkaaaatccagattcagtgattarcaatgccaaaaaaaaaaaaaaaaaartaagttaactagccattgttcaacgacagcggtgctgtttcctcctctgtggcctttcagacttctgttgaccccaattccattttattgggaacccattttccacctggtctttcttgacagggtttttttctactttaaacagtttttaaataaaattctgtatttcaavmdhrwrmmraawwmwwaaaaaaccttt

SEQ ID NO: 1760 - DNA, 805 bp, Rattus norvegicus
cacgaggctttcggccaacttcagtttctttcttgatgccatgacatcatctttactcatgagattccgttttccttcctgcaacccaaacccatgtcttaggccccagagtccctataagaggggttcccaactcagatcagcacaacactcagccagcttctgaagcctctgggccctgcagttccagctctgtgcaaacctctccccgagcaacaccatgaagctctrcgtgtctgccttctctctcctcctgcttgtggccgccttctgcgattcagtgctgtcagcaccaataggctctgaccctcccacttcctgctgcttctcttacacctcccggaagattcatcggaactttgtgatggattactatgagaccagcagcctttgctcccagccagctgtggtatttctgaccaaaaaaggcaggcaaatctgtgccgaccccagcgagccctgggtcaatgagtatgtgaatgacttggagttgaactgagcagctccagactcaagacaggaagagccacttytggaaaggcctcctcagccctgacacttctcattgagaagtaccttgctccttacattcagatttcctgtccttcttaatttaaacctgtgtgtagactttgttattttgtttggtattattyccattatttatgtttagttatgggatatgtgtctcccatggagatggyccaccattgtgcttctctgctattgtggatatggctgtgtaattgatttcatgcaatttcgtaataaatctttctttaagrwwwaaaaaaaaaaaaaaaaa

SEQ ID NO: 1761 - DNA, 1498 bp, Rattus norvegicus
  misc_feature (682)..(690): n is a, c, g, or t
cacgagggyttwtywtwwwtwkwytywtyttttaatagtacactttaatgagagtatatgttcaaaacagcataaacattacagtgaaggaactgtyywkkwwkywkyywtkkgaaagtaaaaattttttattcgactgatttctcamtgtatcgttcaatataatgccarttttaakggcaraaatttggttccactgaaacttggtactgctaccgagagcgactacttttcccaggaagaaggtaaacacctakagaagagaaagaacagctttccagcagcatggsaacytaccmacaggctgaggcttgtabcgaatatactcaacatggcacggacattgtttasctggtgacagagtgaraaacarggaysgawggagcactgcatgtgctgtgacaacagcakacagaacaagcgcadggtgckaggacaggcgtwkaaaagggaaccaggattttactcaaatgcgtttakagmctttctgtagatacmmhyrtrymtawatatatwtwtakccaaaaatatgttttatamagataaacatttctcrattaaagatgggkycaaagctathwcrtraagcatgtcytctgttaagmctmkysacctgaattytyrryytckwkrrmswwaktscmttagtttcccaaatataattacctgacctgktttcyannnnnnnnnaatcaaacmggcattacttctttaaagggcttgcaggttaactgctatctcattaagatgctatgtgcatcaaatttacaagcagcccggttaggtactaaacatatcaaaagggctacrcgagttgactattcctcctcacaggaaacactgtctgactgccagacgataaatgttgaaatgcacagactttacttcctaagtacttcacttccttatgctaacgagacatctgctccagtagatgacaacagaccttgcagcggctatcaggacattttaatgggatgtagcatgtacaaccacgacttagaaaataaagcacacaattatttgggtgattttacaaatyttttttttttttttttcaggtgtaaaggctamaaaaaacyyytrmrrmykagagaacactgaaaamawwaaaagtttgacatctgactttatagtatttccatttcaccctgaaagacaacttaaaaaawamgaccttystagacagcccagcttgagtcccgatgcagtcatgtgctggcccatgcagccagcgtttctcgtaattcccctttgagacatggtgtgtgggtgttcagttctgtgtctggtggctatggacagacagtgagtctccttgtgacctgtgctagctgtgaggcagctcagatatggaagagctgtttggtttgaaccgtgaagaaaactgtgtattgagttagctgagaataaagaaacaaacaaacaaaaaagctcatcaagtgactgttaatgtaaacctggttattaaaataattataaaattaccctcgtgccg

SEQ ID NO: 1762 - DNA, 1671 bp, Rattus norvegicus
cagaatagctcgggaatggactcagaagtatgcgatgtaattaaagaaattattggataacctctacaaataaagctaggggaactctgaaagagagaaagtccttttgatttccatttgactgctttctatgagcccacgcctcatcttcccctgtgcacatgtttacctgacacagcagtgctgcgtgttgtacatacttggaacaacaaactagaaatactgtacttctgtaccaacattgcctcctagcagagaagtgtgtgtgtgagaagccagttctccgggcgtaacctaggtgkgrgaytaaaagctttccywatkgayttaactttggataatggcaagatgtgatgrgtagtgggwacacagcgtgtgcttgaatgkgaggaaaaagctccagtgacccataggagatggtcsttaagtggactccatmtaatcccmyrasrgtcgtgaacagcatggtgaagagcgtgaarctgtttmtgtattcctttcatcstgaaagacmtacagcttaggagaaagttatgaycaagcagagtaaactacatgctgtattttaaggtytaagttwaactgatcaacatttaaatggactggagctgttagtacataaagtgtgatggactktgttcccaacactttcatatctccbtgccctwtcagmcttyctmcttktagcccctttycataatctttggtttgtatgtggyttctcagwyaatacatagctaatagctcttattwttcttatgtttwtaactgctttaggcctatttcgatgtaagggtgaacattcatttgatggaaacasttgtgtatatttaargacccagttgctcctctggagcttgtacgtycamgaatgatyaatctgtgtaataaactgattactacagtcwtkmchwwwaawwwwrwrwraawarrmtttttgatttaaaaactyggtctagctaarattagtggtggatttttcctcatccctgaaatgttttcatttatatttgttgcatttcaaaatcatgaaacaattccagtttacatactaaaagagatgtgagagtaattttattaamcaagatagaggsgtaasyttaaaggcattttcatgaaacttacatgtgcaccattccaggammatsmctgttaarctwamgmmwykwkcttkkttartrraagtgagcagcacttcaytrgamccttacgrcagtctcttggtacatmsgrcakaggacacaargkgttgctgttgatgagctaattgattgtaactataacgagtaactgaccaaacctgggawacatgagcacaatcttgtatcggagagtctacgttattactytgcactaacatttgcaggatgtccmttggttttaaattgwacwgwawgtggctttttgaagtcttcctttgactctagtaaaawgtagtttggaatttgtaaacaactgttaatccagaaacattcatgtkaactaggcaagttatctcccctcatcccttttcctaacctaaatgtaagccaggccagcttkaaggccatggctgacgctytctagtcatcaggttytttkaaawgcatctttacactcttgcmcaaaaattkaggaataaatghccmctgctyttggttttrrraaamaaaaraaamaaaaaaaaaaaaa

SEQ ID NO: 1763 - DNA, 584 bp, Rattus norvegicus
ttttttttttttttttttggkttctgtgagttcaagttagcctagtctacataactacacagtttcaggatagccgataaccatagccagtgctatgtagagagaccctgggggggggggggtcctgatcaacaatttccctccaccagaaaatagatgtcacacttgaaacagccatatgacaagaagaaatggggactggggaatgactcaraattaagcagtcaccttctaggaayactggaatgtggcatccaraattggagtatctaggggcactaggtcaagtgcccatctgcacaaccctaaggagcaracactgactagttctcaggcccctarcaaggtgacattarctgaggatgagagggaggcarcgtctgtggcaragggaacatccaagactgattccacggttgcaggagtggtcacatccccagttaatgagttagtgtctggagtccgaggactacagtgcatccagtgtgtcgtatttctgggatagccctttgccactcsaagttgctggttaaggcgccagtactctttgcccttgaagaagtagacttggccatctcctcgtg

SEQ ID NO: 1764 - DNA, 724 bp, Rattus norvegicus
ggaacgaggacgaagacaggctcctggaccccagtgtggctsagwysktaggctmmtayagctgragcagmwgcagcagttgaggatgacccggcccctggagcaggcagtagctgccatcgtgtgtaccttccaggagtatgcagggcgctgtggtgacaaatacaagatctgccagtcggagctcaaggagctgttgcagaaggagctgcccacctggaccccgagtgagttccgggagtgtgactacaataaakkcaygagkgttytggatactaacaaggactgcraggtggactttggggagtacgtgcgctcacttkccagcctctgtytstactgccmcgagtacttcaaagagtgcccccytgagcccccttgtccccagtagcctytggtccaaaggcgtatgctatcccagaagggccaggtytgcttcagtgctccatttttatccctgagttggtcctactctctcagtgttacccctttcgatytaggcttgtcagtccctkagatgctaaccccagctacccmcaagctttaraggcttgtctagctggtkaggggtggaatagtctttgstgcttctcttcttggaagggaagaacatctctgctcttacctggaagctcaggcatgtgcacacagttgggactgctgtggcaggggcctcctcaactcccaataaagaaatgtcatcttgrmwwaaaaaaaaaaaaaa

SEQ ID NO: 1765 - DNA, 674 bp, Rattus norvegicus
  misc_feature (654)..(654): n is a, c, g, or t
ggcacgaggcggcacgaggattgaaggcgaggaaagcgaggaggaagaagagggcgaggaggaaggctctgagtctgagtcccscyctgtcaaggtaaagatcaagytgggtcgaaaggagaagscccaggaccgactcaaggggggcaggcggcgsccaagccggggkycccggrccaagcctgtcgtgagtgacgatgacagtgatgrggascaggaggaggaccrctcaggaagtggcagcgaggaagactgaacmagacattcytgagttctgacmccgaggcgctcgtcccgrccaagatggagtarcycttagcagtgatgggtagcaccagatgtagtttcgaacttggagaactgtacacatgcaaccttccacatttttaggcagagaagtatagscctgtctgttggccctggtctggcctcsaktcwctacmagcawyaacysthyaswsakgkracctsswgrkagcaccatccacctccccaggccccagtcactgtagctcagtgtggatgcatgcgcgtgccgtccactccttgtactgtatcttactggacaggrccgactctccgggaggctcacaggccccgcgggtatgtcagtgtcactggagtcagacagtaataaattaaaccaatgacaancmaaaaaaaaaaaaaaaaaa

SEQ ID NO: 1766 - DNA, 625 bp, Rattus norvegicus
caagaattcggcacgaggggaagggaggtggctgcagagccattcttaaaggggcccragagatcatacggcaacggacggctgacgaccggaaggaaaatgagtgagtcyttggtggtttgtgatgttgctgaagatttagtggaaaagytgagaaagtttcgttttcgaaaagaaacccacaatgctgctattatwatgaagattgacaaggataaacgcttggtggtgctggatgaggagctcgagggtgtctctccagatgaacttaaagatgaactacctgaacggcaacctcgcttcattgtgtatagttataaataccagcacgacgatggccgggtctcctaccctmtgtgctttatcttctccagtcctctggggtgcaaacytgagcagcakatgatgtacgctgggagtaagaacaagmtggtccagaccgcckarctaacyaaggtatttgraataagaaacaccgaagacctractgaagaatggttacgtgagaaacttggatttttccactaatgtgaacttctgtgtttctwaagtattwatgtattaacctgaccatrctggaaccagacataaatagttatttatgccwaaaaaaaaaaaaaaaaaa

SEQ ID NO: 1767 - DNA, 737 bp, Rattus norvegicus
  misc_feature (715)..(715): n is a, c, g, or t
ttttttttttttttttttaatataaatttggatgtgttttaaggcagagacccgataatgatgcatactagcccggagtataagaagcttggtgtctatctagatagctatctacggttacaggtagatagatatgtacatagagattaggaagaacaaataagatgctatatgatgttatcctgacaaaagagaaammatgcwtcatgagatgaaaagacaaattakacttagctcatggraaacacataccaaacatggctctgactscactaargcatstaaatatggcaaatgagcaagggagtatcttgcaaggctttgctgcaatgagggtttggtttggttttgatcagaaccaggaagtcaccccttttatcagcttttacgcctaagaaaaaggatttctgttaaaatgttttcaatccctgctagtggsccaatacatgccattctgaggactccttcctagagaacttcgagcttcatttaacacacaagagtttctgtcagtcaagacattgaagtagccctctagggccaggacacctccgcaagtgctcccagatacagggcattgagtgtatcgttcaagtaatcaggatgaaccaaaatggcttttgttccactttgcttaaagagtttgacaccctgaagcctctgactgatgttcggtaggcaggctcctaacacaggccgagtgagagctgctggnattttgcacgtcctgagtgctg

SEQ ID NO: 1768 - DNA, 823 bp, Rattus norvegicus
tttttttttttttttwtkyttgkgtmaaamgacgttcawtttamtaagtaaaaatsgstaascttccaaargttcttaratabgatttagggagaggaasatgttgagaatcastgggcarggagtgcctggtgtcadgcasatsasccgaasccakcccttccacactggyctytgccagccataaatatagcycasacccctaacagggtaaggacttttatgtmcacctasgaacattatatacatgccytaaaagggctcccctcctcavgagggtarckakagatgctcttgcyctcsccraccggwtcctcaagcctccctccactagtaagaacacctcakcccaarggccargtgggggagagggcccaccctccctgcaagggctayattcccacgcccttggsctaccaccaggcakagtgccatccctgcccttccararaagccccatgcttgggtgcccagagcywywywkwkwytykyttccttctgaacatgtttcttatctctgagsmwcgwgcmggacgggagagcctccatctcctgcattcatggtgggtgttacagcaggtagccaggccagagggcccacccaggtccaggcctggcatcgaggcacatcttcacacaggcactggcctcaacttccctggaramwgyagmmmmrgmtgtcagsctgacggctgcagtttccttcggatggatcccgggcggctactggtcccagagccaggggcagagtgggctcgtgctgtaggctgtggtgtctggcaagctggctcccactctagatgctcctggcttgaccaggaac

SEQ ID NO: 1769 - DNA, 438 bp, Rattus norvegicus
  misc_feature (163)..(163): n is a, c, g, or t
ttttttttttttttttttcataaggagactgaaagggagaatcaaaaaaaaaatcaagatttgggggaattacccacagagatgcaaggtaagttgattgtttgatgatagccaagccattaagttttgaatgtgcttctctgccctgcttgtctatcttggntccctctctacccgactccacctcacccctccaatctggaattccaacttggtagtgctggaaccctgggaactctggggttgatgtggtcccgtcyccaacctgctgtggattcctttccaagggtgttggcaggcagatggaaccaggcctggaggacttaaaagacagcccctcggggcctgagagcagggaaggcacccccaaggcctcttctgttaatggaagcctggcgacaaccccaacacatacctttttcaggactccaaaccgcg

SEQ ID NO: 1770 - DNA, 1351 bp, Rattus norvegicus
ttttttttttttttttttcattccacagcttttattctataagaacataaacatcatytttttyywykywywkhagcaatacaatattaatttattctgatttaagatttgaagtaaataaagctagaactaacatttataataacgatagaatgcatttgcttaaacaagattggmaatttttcataatagacatttatacagrtttgtatttatagttttttttcttttckgcacctacaggtttgacccttttatgcakgtaacttcacagtataarggaaatccaracaatatctcccttctctcgttttttctgcttgccccagcccacctaagcttccatgaatttcagaargcctacaawataaaacamaataaamagtgaattaaagccaaacaaayaaacarrcaarcawaaaagcccaactccattaagtagggagaattgtggtgtgcttttcacgtgttaccaactggtaacagttttaatgacgaaactccactaattccacatgtataaacaamcctgcattatttatcaacagccagggtatggaaattcaaaggtgaaagaaggattttagkcaggcaagcaagaccttgggcaaacgggaagaaaggtttctttctcttgsccattttaattttcacttaaagttgggcgatcgtacagaagaaggaaaaaaattaatctttctgattatttctttytcastctyksramcagccaggtcaagccctttagctaacctgaatgtccacgcttccatactctgctcttggccaaggaagaaaagaaggawgaaaagagaamccaggcctggactccctgattaaacacagcccagcactccaggctggcgaacccggwggcggctccttgcaccattgacctsaggccagacacctcakcgccsacaatgggacytagggcttscggctaagtttacccaggactaggcaggaaactagatccgtggaggagtacaggagcccctttctagcagtgggtcccagaggcagcaaacccagcccagacaggacttgrcagtgagaacgatctcaacctctrtagaattgyakcgatatggctttttcccccagaaaacaagtraaccaacaccamgcaaacagacaaaaaaacaaaaagccagaacgaaccakccctgcacagacgaaacggcctgrgagatggcgagtgtgggagggagaaatggggctccggcacaggtgcgagttctggggcasaggctggaggcagaaggatgggtacaggcgctcgggaagcgaaaacgcgttgtctgggaagtttcatcaggaaaaattaaagttggctgtgagctctcgg

SEQ ID NO: 1771 - DNA, 691 bp, Rattus norvegicus
ttttttttttttttttttyyyttdacacccctccargytgtttatttaayaatmayaayaaraaagatdtkywywywywtwwytkyyttgkgccacmcgagaccatcccttgtcycacctgkggascaagtcccacctttactccygaatakataawggtacaggtacavaagagggtacaggagccaccctyacgcagtgccctcrraraaagasgactgggggtgcaggaaccavargagctctatattccggagagagtgasaaragaggtgaaccamccacccatgtcccgccaagtgcttaatccccacaccccaccttcctttaccaamtgycycgagccccagsatyaggctscccamcccggttctaarccaatatgggctgawsaastcagggatgattgaggtadavgggctggygggaggcctgacgggccggactggctgcggagcctggcaaggggccacctgtggtattgcctggggacsgggacggctgcttccgaagtgaggggggaccgtggaggtcttgatgtgaatcccctggtgtccatgacttcacactcaatctgcatcatctcctcatagtccccagcgggcccccggcctgacacggtctcattggggggcatggctggcatcaccaacgacatcttgggcctggatgtcctgttgtggctgatggc

SEQ ID NO: 1772 - DNA, 1033 bp, Rattus norvegicus
ttttttttttttttttttawttcawgtacaatttactagctcttccagtgttttagagatacaggggtgtaagaataggacagaaagtggacatagaacacaatacacaaatatcttgattgaatcagtctactggtgtagcttttcaggctaatgtgtcagtctccatccaggcgctgttataactcacaaaggtaacctwagaaytsrmsasrtakragcccgtgttcatactgattawactatcycatactgattattcgttatggcacgagagaggcagtaggcgaraaagattccaattagctgaaagcaagcaactccaaaagaaattccagcaacgactcccatttcygactcyatagttgtcattacctttatgaaacaaccctcttcgttgactttatctgcatctctctgtggataacagccttycagtttacagcarctcttgggaaatcctgtttctgagtaatagtttgtacctttccaatccctgtaattggtgaccccacagcaatgcaacgtactttggatcttgtctacagcttcacttctatagtctcttgtggagttgtactccttcagagcattttcgtagttacttttgaagctgttcttaatctcatgtctgaaaacaaatcctacaatggctgcaactagctcgaccaaaaaaatgagagtcagaaacatcgcatacagtttcagcatmcatgctgaggctcggcaggtagcaaaamaaccwwwgskgccsaagagaataatgacagtgcctgtgccaatgagcacaaaaggcacattggtggccttctcatttaagagggaaaaataattttccaggctcaccttgccccaaatgccaacggcaagaaggataacaccagtgatccaaaagatgaaagtgtagatcaagagaacgcttttgaaacawgtaatgactggcttggtctgcagtctccgagatggggacgccatgactaccccgagaccctgcgcgtgtgcaccaggcgatcggctggagccagccctcgtg

SEQ ID NO: 1773 - DNA, 799 bp, Rattus norvegicus
ttttttttttttttttttwkkytwtwyttttttcagaagttttaatrwwwtwkwkkwywtwwttwywyttttwwywwaaataagaaattttaatatttaattattaattarctgcttccaatattaattaatcttacamctgtgacatttctatggttctttcttccctatcataccagtgtcccttcccaagttggacacacctggatacattwwwtkttttwttttkktgacagacaattccttttattttagttagatgttttgaatgccwacagtaaatctgcccattccgggaggtmgcagacctcctggmctccccccaagtctatgatctcattttcacagataaacacccacttctcagaccagctamccaaagmatgcatgttctcsagtcctttgcaaaccggttattttgtctacataacctcctcatatcccttcctcacattcttcgtaggcagatgmtggagctgttgctctaacctcctgmswyrtgsyggcccgcygggggagtctgtttggcttcatttgaccttcccataccagctcccaccagtccagccctttctctgaggaacctggagaaaaattagcaacgccgtccacccgtgcacaggaagatgcccacggccacacyagcgattatgaaacagcccatcaggatacccaggaccagtgaagtataagagcggcctgtttggctccctttggtgttttgcgtggtgatgtggtctccaggtactgcacacaggtgtcctgcagaattcctgcagttcataccgagtccgattgt

SEQ ID NO: 1774 - DNA, 1999 bp, Rattus norvegicus
cggccgcaaaggtttttaatagtctggccagactgaagttgaagccttgttagtagtcaacggttttggttaaaatcaaaatccttgttctaaattcccatcctttgtttgttttcaggcatctggagttacagtgaatgatgaagtcatcaaagtttttaatgatatgaaagtaagaaaatcttctacccaggaggagatcaaaaaaagaaagaaagcagttctcttctgtttaagcgatgacaaaagacaaataattgtagaggaagcaaagcagatcttggtgggtgacattggtgwtactgtagaggacccctacacatcttttgtgaagttgctacctctgaatgattgccgatatgctttgtacgatgccacatacgaaacaaaagagtctaagaaagaagacctagtatttatattctggkstsctraaarwrmammrwtaaaaascrwsrtgatttatgctagctctaaagatgccattaaaaaagaaatttacaggtattaaacatgagtggcaagtaaatggcttggacgatattaaggaccgctcgacactgggagagaaactgggaggcagtgttgtagtttccctggaaggaaagccactgtaaaataatagccaagtgccatttgatcttaaggggcttacatttatttctccagctcagtccactggaattgtattagggtttggtttttggttattccctttccactggtccccgttcacacaatgaatgagtgaatataagaagcctgtcagtgatcgccattagactgtttcatatggttactttctgtagatcccaaggawtgccttcccgtcctattttagccaaaacaactgkttccatgccttscttgcgtgagcactacaacggattgtcagcgtgaatagcttasagtactacagagggtgagctaattgaatgccttgaaagtaykmtcsastkstcatrtgggaaacgtttcastrttattwawagtygagytrcacttgatcacagttytytgyggcastggagcagtymcacacstcacccgcmttggstmgcytattrtgacrtggcagcacaggtttaayabtattggttaaaaagcacttttattttgtaatgsbtttartcccttataaagaatgccaattaagtttcattrcctgtcctcaatttatcctagtatskcaswsbkcaykhkkcttacctgcatattttsttcaaargaatakmtgtgtygatgtctttggattcccartgagtgtacactmctgtataattataggagttttatgtttaccrtdtgastcwtgaaacactacagatattttgawtatcartcatratggcaawttctgyataaaagascybtataayggaacatygtttttgagawcmarctcccctgccctcataaaagtgrscaygttgcaakaaaaattgtggcagrttmmvrrawrwwrvmwwrdwrraaagaaagaaagaaagaaagaaagagagaaagaaagaaggaaggaaagaaagaaagaaactgcagaagtcaatcagagcagatgggtaactatggctgcctgcttggaagactccatccagccctccatggaggtttgtggattgggaggaggatgaaagacacctgagctgatgttcatgctttgcttggtcacagctttgtttacatgagcttcacacggsaaaacttcacaaagctttagacttcaggcttgcacgtgtttccttttgtgtttatgtttccactgtggcctttatagatactccagagaaagcaccaataatatagacgcattaacacacacatacacacattctctctctctctctctctctctctcacacacacacacacacacacacacacasacassgcgcgcgcvacttatttatgttgtttctctacctttagacaggatcccgctgcataccctaggctgdcctcacattgatagtcgcccttcccagccacdtctvacactcga

SEQ ID NO: 1775 - DNA, 773 bp, Rattus norvegicus
ttttttttttttttttttagaaaataactgaaactttatggcaatgtgttgttgtctttcctggggttaaaacctgagtagtaataccccttgaaaggctcccaacccctgcacaatggggtcactacccctctagggctgagctccctgatgggtaccagagaaccatctgttaggctgaggggctgtaggttagaccccagggtctccagaacagagtccaacggcaaagggtctccaatcaggatctgaatcctatggccacctcctcacacccttccctggagcagttgcctcctgaatggctcaaagtcctcaggcactgtgtcattgcatcggtactggagattagaccaaatgatgttttcttgggagaagcagaatacaccaagacgcccccctcgcatggacgymtcrwkmmtcaccccagagtccgccactagctggggaccctcatagagcttcacccgaatgtagccgacttggggccggtggagcagccgccatctataggatgtcttgtctcgccaacccacattccgtggatcagtccacagcagtcgtacctgatcaggggtgtggccagtgtgccacagagcattccggaggtgctcacctgggccagatattgatgtcactgccttgagctgcagccctggttgggccactgctcggaaaggcgtggcctgccagtaggtctgctccgtctgtttccacatgaccacatagaagcggccactgtcctggtaactgaagaggaagcctgcctcgtg

SEQ ID NO: 1776 - DNA, 718 bp, Rattus norvegicus
ttttttttttttttttttwaaagttgcactgtctttattgtaaacttgcatagtacattgattgtgtacgcttttaartakagcagggtagcccctatggwaccaccctcttgtgtggggcatttaasgctggtttactatgagtagggagccgggaccaaagtgctgcctgggaattaaaaagaaccgttatctgattacgcasaagtcagggagctgagggatctgagtccatctgagaatactgacaggagagactttaactgggttcaaaggaagcatakcaaaagggtasaggggactcggtgtcaggaaacaggaatcakgagcagcttgtggakggagaataaggagaaaggagacaggactcatgcctagtgtccaaaaccgagatgaatgacacctgccacaattgtgcccasagacagcactstgggtagcccagatgcacatctakggcgctaccatggctacagaaaagccmcacgttagaaaaataacttaaaagctatacaatcgtcatcataaatatttcgacttttwaaactagytagtgttggttaaaaaaaggttcacagttactctgaagagagcggtatctytattgcacagtagtggaaagtctgctcccatccccgtgtgtaaacaatcccttctcctcagtgacgtcaggacacagagaaacagcatttgctgtaagcaacgcacttgcctcgtg

SEQ ID NO: 1777 - DNA, 750 bp, Rattus norvegicus
ttttttttttttttttttwttwhacaaaaacaatcaacgtgcatttatttaatatacattgtatgggttcaagcagacttaatttaaaaaaacamatwaaacaaaacagcayakctyakawaccacggagaaaggacagacatctaagaaaagakacgacacaakagaaagctggagagctggcgtcagggctmttggttggwgacyygcyttgaatatgtttcwtgcargyacttcttaaatgcygtggggtttttycagagctctgcadcatgtgtgttcamagggctctcgatgttgggttctcctavcavgctctggrtggwgagcaagatggtcctgacatcatwcagtgcagaccacttgtycttgargatgtycaggcagatgttgcmctgsgtgtccacgttggggtggtagcacvgtgtgaggaacttcactgtgggtgcgttgtaagggtagccaytggggaactmtagggagagtttatacctcargtmktcatrkacagtgccggcggytccatggatggttcctayccatttgaacaggttgkmtgattcggggaaggcggaaattcctttktcaccagacatcwtgaggktcatcagctcctgctgtagcmtsttgsccacaggsccccgssysgygcccccgcagggttctgctccttttcgaacggcggcaacgctggctgcagctgggtcgcggttctgcgaggccatcccagaggtgctggcacgcctcgtg

SEQ ID NO: 1778 - DNA, 764 bp, Rattus norvegicus
tttttttttttttttttgcctcagaaaacacaakwywwkkwywyttwwwttcaaatcaacacttaacagctttttacattatttgtaaataaccattgggacttaaatgtcacaaaatacaatattacaaacagttgkgggaataaaagtcactacagtctgatggcagctgggagtccaggggctcatytgaagcctytggtcttggctgtggtggaraggtgaraaacacagttggatggtcaraatttcaggaaagagatggkggymtcswgyragttcataaggttgtccttccaaaggcccacagcacaagaatgctgtacataaatccttaaaagatgccaattttcttgtgctaaggacacgagtccaagatacgtgggtaattatctaattcacagtttgaaaagtaccagtgacacacgtttccctacaccccttcacccagtgacgtctgtcttgagccgagcagcctgratggtttttattgtttttgckgtatgttttccagccaggttggttgtaraaagctgagatttttcttcaatcaggctgtctttagacccgtttcttctctgatgaactgtagagcctccagacccctgagcatytgaggaacgggtgactggaagtggtggtacaagatctgtctttgagttcacttccgagaggacggatcgctctccgtctgagcactgggatctgcggtactgccggtaactccttggggaatgcgaatgcctgatgcggacagggtcacc

SEQ ID NO: 1779 - DNA, 742 bp, Rattus norvegicus
ttttttttttttttttttkwykwykktkkwttttgachcckgaktttawtattcarkttctttttctackaaaagtagtcytcggtggktgggaavcctggbctcscarcascadagtcagtckkrgctggwttttttgwtraaaggagtgggcggktgggygggggaccgggatgagggcakaaccccgctctgctggtagtcttgggtggaraarackamctgcacttgacagagcctgsggtgcsgtgggagggggtgaggcavgagtgacaasctggggaggggacycacctcartcsccagctccattctcctctaatgtctctccactggtggcgttctctgcagtcwygrrggbyttytttttyttykttttctgggdttttcgacktgcagagctctggagaagagccttcagctcykcrkscygaacctccatctcagacttgtacaggtcgggctcaaagggaccwctgsytatccgcatggggccattgggcatgagtaraactgtaaatttaaactgggcaacaaactcaccctccttctcatakagaacgttgaatggctgtagtaactcatgcttggsgcactccascacacccattcgagccttcytctcatcctcaaatgctcttaaagtaaagggcatagcatcaaaamrccyytcsrcckcactgaaaaaggcacgtgaagttttcattttcaggccatattgtttagaggggtctcgcttgta

SEQ ID NO: 1780 - DNA, 709 bp, Rattus norvegicus
  misc_feature (641)..(641): n is a, c, g, or t
  misc_feature (692)..(692): n is a, c, g, or t
ttttttttttttttttttagttccacatgatttattagagggactarcctgctggcargctctggtgatgctcccggcttgtgaggatgctactgtgcccttccttcttgatgcccataatccacagacttgaatgggatgcgtgctccccattcccarctctctacagtacagacagggcccttctgartgctggcarggcarggctgtgtggtgcgtgtccccavgatagagaacaccaaagtgcarctggggargaaggccagtgtccagcatcccagtcctgttggccacgctgcttctatcctgactctcavagctgtgatgggtagcadacacatgagctgtgggtccagggcagaacctcactccccatcctggttgggttggataartctatattccacggctttctycaracaggctgcagcagccctggtgactgggctctyctmgcccttggscaacactgacaggatctccaggacctcsctctccatcagggtgctggcgatctccttcgaggactccatcatgttcagcaccacgacagtgccccggtgctgcagctccggattggggctcaaaagcagggctgcaggatctccagccatgcgtggtcattgtgggatacggtgcanagtgagggcgcaggaggtgagcatggcagccacggcagcagctccgcaganctcacatctctcgctgt

SEQ ID NO: 1781 - DNA, 1185 bp, Rattus norvegicus
tttttttttttttttctattggtttgcatagtatttattgttttcatatacacaaggctgattactgtaacagtttacactttgaacacagactattatagaagtacttgacggtttagaaaaccccttcctctatcggacatgctggtgcgatcctcggacagccacaggtccttccccagcagagaacttcgagatgggaccctggctcccctttgagccctacagcaaagcctaggggctccttgcctcagttcttaaatttctaacacaaggaaccccgagtgcactctcagggtgatgatctcccactggaaggtgagttwwtwytkwwwytkwkwbhywwywtwwwwwwaaawaawaaatccagtttatccatacggcttcagaggtcacagtaaaatcagtgtaractgagtgaagggaagacctgcgtgtgtgcacctgtgtcatgtcattctgggaagagcagtccctccacgggggtgggggtggggcggkgacdartggcatgtggtgtgtgggggggtatakgagactgktacacgakgacaaagggctwaactgwtttyacgccgtttyccgttccctcggtccaraawkwtyktktkwwtttcttacaaatgagtttgaagtcaaaaatcaaaacaaaacgcaaacaaacggwtyaaccatcccagccacggtaagcccttattcgtgtctgcacccgtgtgctctttggggctccttatccgctcccttctctcgccgcctttgtcctgattcccacagagatccatagtcgytagaggcaggactgaagactgtaggtcatgcgtctacagccagtcattcatgcgaataggagactaaaggaaactccttacagaggtcatgccggggagctcagaacgcgtgcgacccttcagtagccctctggtccaggtctcctcccgtgtgcatgacaagagtgtgtggagttcagggtttgggtgttgaggtgtgatccttctatcaggtccggctggagtccactccctcttagctccacctcctcgtgctgctgggtgtcgatggcaccagaggagtccacctgtcggacgacttttcgaatgatcttcttggtgacaatgttgccctgttcgtctgtgaattgttcctctgtcacctgctctcctggaatattctgaagctcatccccct

SEQ ID NO: 1782 - DNA, 917 bp, Rattus norvegicus
ttttttttttttttttttkktatttcawgaagttswykakkcttattattaaaacttggactcaagtaatccggtttttctgaaaaaagcaccttgtttgtagggaccatttaatcgtccttctytacgatcacctmgccatgaagcacctttcttctttgacgkaacatatgaaaatagagctgaggaaacagcggtatatacgaggccatggttatgagaagaaaatagtagtagtcgaaagagacgtygymcytgttaggaagccttactgaaaacatccctgatttctttacgtaaggcaaggcagcgtatatcgtgagaagctctccagcaactccaacgggatataagatgataaaaaaattgtatctggcccatttaatgaagtgcggcaagtggtcgaggagactgaatgtgtagaaggaatagcgagtgatctcggtcwymgtycwggakrscagwwwwakcacyrygmkctmwtcgwkcyrdaycatgaagattcgtgaactcacttggaccccagtcacaagcacagaagtgggtacgattccaatcagacagtggactacctcawgcaaagcaaatgtttggaaaaatttaagtgtcttctgaatgcttttatataaacctctgtgtgttcctttttccatataaaagcgymycrtkscaatakctagaaccaaccacccggcggtcatggcgatattgtagaaggtgagccaggcggtggccaggaagcctaggcgtctccgcttgccggtggcttccttctcgtcgctggcctcggaggcgccgttggtgccgtcctcctcactggacgccatggyswccgygcacgcggagccggaggagcagcgcacaggagcgggaggggccggctgagcgcgccamtgaagcgccgctgcccgcggccg

SEQ ID NO: 1783 - DNA, 643 bp, Rattus norvegicus
tttttttttttttttttwwwwtttwywwywttttaracttcagtgtcaactcttcacataaraaatattaraatactcttttaagaaccatggggaggttatcacttccttgcgtctgtcatgaaactgttttcgatgcacaraacgattagcctattagcacagctatatgctttctggtccaraatcttccctgtgctcagtggggaggcaaatcctgttactgccatgtccgtggttcgccaggcttcacagtacttgtccacgaggcggacaccgtgggggttggagccgtgccaaacaaccttytgcggccaggaaggatcagtcatcacgtcccgaccatcaaaggagtatatcggaatgtgtgtattgaattgacctccatcaccagaaaatattgagtcccagttgttaaaaagcacttggcccttgaggttcacaattggaagactgaatctctctgccttccgcacaactgtggagagatcctgcaagtgtgatgacagaaacgctcggaaggtggacagtagtcctgcagccctggcctgctggaaacactggaaatctgctcggatgtccccagccaccggcgtgttgagagcaacacmkcgtgcmgaacaggtctctcgtaatcctcgtg

SEQ ID NO: 1784 - DNA, 611 bp, Rattus norvegicus
ttttttttttttttttttagactaagacaatgctccggctttaatgtatgaaaataatacccatgttgtctaatttgggggtcatacattagaagtgtaaaggtctgcgtctgcccgccgtctagttgaagtacgtgagcacaatcatttggatcggctgtctgcacacggggcagggcttattcctcttctttagcttctttgcacacgtgaaacatgacatcaggtgtccggttttgccgtgaacaatgcaaccatttttaggccgcccctggcaaatcacacatggctcgatggcgttcagagagaagctggattccatactttcctctttgtcttgtgtgtcctccttcaactctttgccactttcttggctgctgtaaacaatgctactggaagtcgacggctgggaatagtcgtcactctcctgtgacaggagcatctgggccactttttcctcgctatcctcagcagatgactccttagcatcatcctctgtcacttttttgccatcaggcacatctaagccttcttctgcctgatctgagctttccagtttggctttttcagaaatttccactttatctttccccttatcgtctggaagccag

SEQ ID NO: 1785 - DNA, 1040 bp, Rattus norvegicus
tttttttttttttttttacggtaacagaaactgwtykwktyyktttttattaagatacacaactttataagaaaaatacgtttgcctctccaatgtaaaagcctcccacccccccacattaaaatctctcggtgcaggtggaacaggtgcaacagctgctggctcaacagacggatctccacgtgatgttctgcaaagtatcaccgaactaygaggactccaggtactccaaagccacgtcatagcagaaacgatactgctccggagcttccaccatgtttggcttgctgttcctcagggtctttactgcatggaaaacatccaccacattttgccgcttcaccatctccacgacaatgcctattgcacagaacatgccactgcgcccaccgccattcaagcagtggatgatcgtccggccttctccttcttcacattcttcctgccatttttccacctgcagtatcagtttcaaaaacgagcgtttggagccaggcacttctcgatgagaagcccagcctaggtactggaactgctgtaccatcagatagccttcttgtggtctagttaggttgcatatcctaaaaatccgattgatcacgtcacagtccattgaacaagacatgcattccactttggatagggccatatcgcagcatcccttcctctggccagtactgtggacagccctgggacaagtccacttcatttwacatcacaatggaggtacagccgtaatcgtatactaatctccagaagtctttcacagtgttcggcagcgggtattgtgtgacgatgaaagctgccggttgcctatagctatccataagagcagcattgatgtagttactgctctccccatcaattgtaattaagaaaggcagacatctgtcaggtgggagcatgtccatgaaacggttcttgtcgtggttccttggcaggcatgctatgctgcagtcttcagcttgtagtcgaggggtgaccgaattcagagtctgaaattcgtctttgagatgagaggagttagtctgagcctcgtg

SEQ ID NO: 1786 - DNA, 638 bp, Rattus norvegicus
ttttttttttttttyttttgatggctcactgactaacctgagtcgcagctgtagagagagccgtagagaacaccgcctgttctgtcgaggrgcataaagtgcttaccaaacatgggctgatgctattctgctcctctcagamtgccttgagaaggggaaacacacgatgaagtaaaaggcggtgaggtgccaacttcaggtgtgtggtttggcgattayacatggagcacccactctgtcttaccaggtcttagcccatcgagccgggtctgggtacagagaaaacccttttctagaccattactcttaagtcaccccggcttccctggatagctaactatataaagcaaggtaatgcaaaagtgtcttgtctgtatattaatacttgaaatgaagcctgtttaaaargtgacttttgascccattggtaggcaaccttactaggccaaactggaccacttaaccccgtgtgagcagtatgcyaaggtcaggactccaagcttgggtctgacctcagtgcatctcgctagagaaactsmtsgtgggtatgggcgcagagccaagcgccaccctcactgacacatactaaacgtgctttggatggcgaacagagacagaaaactcgcgggaaaagattt

SEQ ID NO: 1787 - DNA, 715 bp, Rattus norvegicus
tttttttttgtttttcttaaagtttccacccacgtggcacctaagcttcctcaggcttttcattcggtctttctgcagctttgggtggcaccgactggaggacacactagttctgacaactcgccagctgcctcgcaccctcatctcccgttgtgcttcacatcccggtctgagaccgagacccttggaagttgtcttgttaccatgtgggcttccagggggcatggratgggtttctgtwaacaaccgtattcttagcaccgtcaggtgcctggcatggggcaagtactcaacaagcattagctkwwkwwwkkwytywttkaacgttccaaaggctggggccagagaagccaggtagagcamgggggcagggcagagaccacctctywkkkwwtyykkwkwktccakkatakacccggtttggtccttccacctggggcccgtggaccatactgtttatttggaccataatcctgagaacagcasgattgsawagcaagtcstcatcccctccttaacctcgcctctagggtcaaaagccaactckcctaagcccaaaggatgttggttctaggccaaggctaraggtggmgctaatggcagactatctgaggacaggctacttgagaggacctgtctccttcgcaggatgaggtggtcactcgtggagcttgactgaggagagaarggcttgggcagaggaatgggtgagcta

SEQ ID NO: 1788 - DNA, 588 bp, Rattus norvegicus
ttttttttttttttttttaaattgcaacttcaggaaaagttcctgttttattattccaaataatttctcccatgtcaaataaatgtccaatagttcctggtatgtgggaagattatgtttgttaaagtcacaatgaagccttatagacggaagcttgtctacataaacagcacaagttgagaaaaggtttaatctccaaacctattagacttgaagtaagatcagtaacggccaccttgcgacattacaggaggtctcattcccattggaggtcgaggaggcccaccttggtaagggggcaccattggtggtccctgtccatatggtggcatagcgccaggaagataaccaggcattccttgatggtgaccaccatactgaccatgaggtggcattggaggcctcattccttgctgctgtggtatgcctggctgtggtggcatcatgccccctattggtccaactggtggattaccaatcggagtttgtcctggtcgaggaagatttcgctgatatttaggtaactgtgcccttctttcttccagtgatatatcctcatctggatggatcaacttactggttgcactg

SEQ ID NO: 1789 - DNA, 412 bp, Rattus norvegicus
ttttttttttttttttttgctccaaatgctacgacctgaagaatggctgcagattgagatatcaaaaatctcaaaaaaatatataatatatttgtataactctgcatgtctattatttaaatttcacattcctttaaaagtggttattcagtcagtagctgctgaaggaggctcttctgctgggcctggggggtctgtggtcctgacgtgggtttttgagttcccagaggaccaggctggttcaggtaagggtccccgcctaccaggttcactgtacactggacgtcagcaaacacctgaagctgctgcacctgctggtttccatctgcttcggttttgagaaggtcagtggatgagagctggttgcagtagaggcctgtgtgtctcagtgctggatcattcatctgcctcg

SEQ ID NO: 1790 - DNA, 537 bp, Rattus norvegicus
tttttttttttttttttgacggtgttaagctatctttattgcactcaaaagaacaactttwykwywywywywktkgatatttaaataggtgatggcggtgtctttattttttttttattgtttttctttaacccagttaaatttttatccagtgaaaaagattgacaccaagacaaaagaaattatcttaaaattgtgcaacaatgtagtaaaatcttcagcagaaatcagtgacttggaaacctagccaaggcgattgaagttataaataacctaattttactttggagaaaagcaagtacacagtgtttcactttaaataagagcagaacaggcctttattttgctgcagatccttctgactttgcctaaagtgtttagtaagtctcaaaaaagagtctttaaacgaggagggacatggactctctgagggtaacgatgctccactctggcattcatgctcagcccattgaagtcatcacacatgaaaccagtaccattcttgggttgtcactcagctctgatgattaaatttat

SEQ ID NO: 1791 - DNA, 591 bp, Rattus norvegicus
tttttttttttttttttaagaggagaacttggcctttattgtgggcmcaggagggcacaaagggcaggatgcacaggkgagagagaggttctctggctggtcaggccacmscatgggtmgcagtargagtctgccgtggctgcacaggcctcacttgccacaattacsgggagaacatytgcattgcatggcattgatracctcstggtgcacawccgagccattggtgcagagcaagggcacacgcatgcgctctgtacttgagggccagcagcaggagcactgttcctgaagatcctcgatgtcaatggagtacacagcytygctgscgcactttccctggcaatagtgaatgtccacttcctcttccgacttacmmtctsccactttgatatactgcaccttggctgtgatgtctttgcaatcgggctcctcacacgtgtcacagcaggtgcctggaattttcacgattttgcctccttcagccagacacttgcgttcatcgaatggggggcagcccgtgaccctcttctcccaaatgtactcccctctctcggtgaccctgcacagatgactgtcacagccatcctg

SEQ ID NO: 1792 - DNA, 347 bp, Rattus norvegicus
taaaaactcaaatacagtttgctgcaaagttcccactgtccccccaaggaactttgaaaagccgacatagcgttattaatcaggaatactgcagtaatgaggattgttsccccacccccacccccttctttttaacacacatacacaacctactaaacagttgtaatcgtggcactgttcatagagggttagggaatttgtggtttgcagtgagatgcttttctttcttttttcctttttttttttcctctgtccatgtgccattttttaactgatacgcttgctagagagttcagctagtcggaacgccagggaaaggcgacagaaggaaaaaaaaaaaaaaaaaa

SEQ ID NO: 1793 - DNA, 608 bp, Rattus norvegicus
ttttttttttttttttttgaacgctttwcgtgggtaatctataggaagctttggagccaggatcagctcctctgagtagaaacatgtgagagacacttggggtttggggtaasaasagaaagatgggagggtcctacacccttcatyaacctgggctcgccacctccccttgagtctcgatgatggagattacctgctcaatccctttatccataaatkaagaaactgaaggtcgaagaggtgaatcsgswwwwwycttawwatwtkryyatgagattcctctctstgaggcacttgycarattctaggatcmttcacgaggctcctccctctcctcacttaaactgtaagggttttaygggtgrctgtgtatgaatttctgagtggaggagacagatcttgacatctggsaagtgcccagacatcgggggctcaaaccttgccagctcaggatgccctacctcctccccttctgccccacttcaggttcaatcctggaatcttgctgaatacttcgtgaccagtttttctttccttttctcttccccwmktsaatcatttcctagaaacaacacagggatgggagaccttggcaacctctgaaaacc

SEQ ID NO: 1794 - DNA, 1182 bp, Rattus norvegicus
ttttyactttttttttttttttkkttttktttttttttttbycadrgkcdaaaagtttattgtsagaacagcaaacttcataaagacacctttktaaagcacatggaaaatgacaagccaaatamacagaaaaccttggctaacawaargcaaagactgcgctattatgaasstagtcagagtaataccaaaccaaacaagtgtmttcargaatatatgggtgattcaatctatgtccgmamactaaakgaaacttgggccaaactacttggagtggggaggggccaktttgctcctaaggcasaaagtgrmactatttaagtgagaggcaacatamggaccawgacaccagtmstcagtgtaatctcttatatctccasacacagaaattggaccttataggccaagaaaagttacagagaattgatcaaaatatggaggaagkaaattcccaattcaacgtgtgctatcctcaccacttctcattcactatatggaagtccattggttgagctgaaaactacagagctaagcgaacctttactatcggaattytcttscwsstrysttttaagcacagagggttctacggctatacctcaggcammaggttttytttkttttttttaagataaagtagaaattcatacaaatgattctaaggcatggcaactacttctgrmcmwckwgtacccaatggagctactgctaaatgaatagraatagragtaggaggaattcccggtcgcatcgaagcttcctcttcgagacccactacgggaaccagagcgggagcytgagcgagatcckgacctcgagccagagcgggagcctggggccgacatgwtataagggctaggcaaacccttcgaggacrcggaggcggcttccagaaggcgcagcccagtgatgtcttccaccatggagcgattcatggcatcmttgtaggagatttttaatttggttttggggcaggtgaggattytsgcatakctgytgatgtcmtkcarccthtgagytgyacgrccatcgwtgaaacswwwgyggmtggcttyttyggtgytsatcytsmyawgkacttcskggtcaacaaggcctccggtgaggaactggaactccaggaagcgctggcctgcctcgtagggcagccatttactttcactgcaaaaaaaaaaaaaaaaa

SEQ ID NO: 1795 - DNA, 862 bp, Rattus norvegicus
ttttttttttttttttttyyyttgkyaascattttattgagataaagcataaagtaggttaacaaagtasaaaaaaaagaatatgcaagatgaaagctaacacaggaggagtggggacaaaggctgagtaggtargactcaagctggccaccaaggcactgtggcatacatatcaagaaacactgtcacgtccaacaggactccakatgttccccacttctcytgtgctcttatcasttggtgctgctgatactccactcasggctccaaccaatgtgtgcaggatgggattcttasattctgcgcattasttggtagggaactgaattcactcaccagtwaggaactaagtcagtcaattctgctaaggccaatgctttaaatgcagttttttttwaagtgcatytmrtratcgggtcggtatgaaaacctasattaatcaaatgacctttgtccccactasaaaaattgttatgggtattggcatttatttattcaycwyrtrcykattagggcagctaaaaamstckwrygmctctgtcatgtattaccacagaaggcaagcccagctcaaagttgcatgcagtcagaaagtcaaattttactattagcctttccccctttaaaaggctgtggctcagaaagcttttatatagttttccctgaaaacaaagagaactttggtcaaatccaattcttaaagagccatcacatttgtttttaagtaggtaaaatagtaaactataaccagacacaattttctttaaattctgaaatttacactgggaaaataaacctaattcttataaacatctaaacaaagcattcaaagaaagacgactaaagcagcagctgtatctga

SEQ ID NO: 1796 - DNA, 524 bp, Rattus norvegicus
ttttttkktttttttttwwwggatctccatcttgtctttatttgcatgtggttacaattcataaatacacttgtactctttctcccgttcccaaactgtcctccacatgtggtaatgctactgaagcccccctgcccttctcaytgtcctctctcccccaggagcaagggaggggtgctcctccatgcgacatcatgttcacccagggtctatcttggtccacgcagtacaagccctcaaggcctctgaaggttggggatgagcamcacaaagccttgcaaggtccccggatgtccttgaaagtgaccctgggcccarctccctcctctgccatgtttagggctcasagaggcatggtggggtcacaagccttgcctgtgtctgaggcctctgggagctggtgggtctgcaacaaggtctcaggcttgctcaggcggtcgtcaggggcctgggcgggcacggtgccccgctagtgtctctctgaagaggtgtctgaggccaagtcccttaaggctctgtatctc

SEQ ID NO: 1797 - DNA, 809 bp, Rattus norvegicus
ttttttttttttttttttwwaaaaagaatctttttttatttcaaagattgcttcttatatagaagctcatattaaagcamcagtmcaatgttcataaaatataagkgkgatgctgtaacattttcgtacatgtcaraatactgatatttgtatgtatactaaaataagaactttaaaattgtmcaaatagatmcattaaaaatgacatagaaatagggkgctcctcactgaaacaagacagttatatctggcmcgtattagtttaggatgaaagtagaagcaaaaagatttacaagaatcagcagtaacaagattgatgctcaagagacataattgtacattgtattgtacatacattgtatgggtttaagctggctggatattatatatttcaagtttaaaaatgcactacagatagagtgtccatagtttaaggcgaaattacagctcagaactgttgtcctttctaattttgtggaarcttctttgacaaattaaaaaataaaatargagagactcagatgttcataacacatagacgatttcccttcattgtaagttcactgtggacttttcctccatttaaatatttcgtgtgccaagtggttttttctctagtgaagttgataaacaacttcaatatttgctttttttagtgggaaaaggtacttcacagtattttccactttgatgtccttgcggttttattaaatgtttcctctctgtaaaactctgcttgttttaaatgagcctttccttgatttaaaaaaatacctgtttacacatcttctagattcttgcggcacgag

SEQ ID NO: 1798 - DNA, 437 bp, Rattus norvegicus
tttttttttttttttttwtgyawaraatwtwkwtwttttwtwtttatatatatatatcttttatattaaaagggatgaggggctaggctggtcctatgtwkgcctccagcagctggcctcatgtgtccggaggatggtggsggcggttcctcggmtttttctggwcctgragttcargasgyctgagagctcctggagcctccctggggktggggggcacatggcgccagtaaccctggcartaytgatggwtgaggyccacttccggttgggctasgagctgggccadctcctgrtaakgakgtgttggarggyctgtgccakkaggyggwkggacgctcacagccagtgkggggaagagggcagcatggacggcgtcccggcccagtacatgcagctgtacccgcgyswcgwssygcttgaagttgttctcagtg

SEQ ID NO: 1799 - DNA, 845 bp, Rattus norvegicus
ttttttttttttttttttywwywkttacaaacatccttttattgaaagtgaggctgaggaagcttaataatttatcaggcaggggaccctcagaagggtcaatgggaaaatagaagactctagggacctcctgggagggctgttggggccagcacattctgtcccaggcacatagacacactcaggagatgagaatgacaacccaggtggcccaacaaggcacagtggcagagaaggtttggcagactgattgagtgtcaggggtcaacgaaggacaccatgatgtatcgagttcccctggtggtgggcarcccctcgtggtaktgtgtgaggcgaccagggtgcakgagagcccagcccttcctcggggatgagactctgcartcgtacctcargaagcggvagccacctccctcataatctacacccttgtgattgagggcracgttgagcgtgaaggtggacgagtcatggtgtggccgaagtgagggctgctcatctggccggtagcggaccacaaagttcatcactgcccgtgtcttggtgtggtagccaggaaacaggtgctccgtcatgggccccacatatgtcctcagcagctgaagccactggtcctcgtaccccacctgcttcatgtggatgtccacggtgggaacattctcataccctccagccaacctggaatcctcatgccggcctccagaccactggccatagtgttccatttcctccaccagctcatcacacatctgctcggtcagcagtgggaaccagtacacatctgggcatggctgttccaccagcccctccccatccagggcccggctgtagttctcatcctcgtg

SEQ ID NO: 1800 - DNA, 412 bp, Rattus norvegicus
cgggctatcactatcgccggcgtgccgcagtcggtcaccgagtgtgttaagcagatctgcctggtcatgctggagacgctctcccagtctccgcaagggagagtcatgaccatcccgtaccagcccatgccggccagttcgccagtcatctgcgcgggcggccaaratcgctgcagcgacgcggmgggctatccccacgccacccacgacctggagggaccacctctagacgcctactcgattcaaggacaacacaaccatttctccgctggatcttggccaagctgaaccaggtggcaagacaacagtctcactttgccatgatgcacggcgggacgggattcgccggaattgactccagctctccagaggtgaaaggctattgggcaagtttggatgcatctactcaaac

SEQ ID NO: 1801 - DNA, 527 bp, Rattus norvegicus
  misc_feature (73)..(73): n is a, c, g, or t
  misc_feature (150)..(150): n is a, c, g, or t
  misc_feature (505)..(505): n is a, c, g, or t
cgatgtcaggtccgggtgctgcccccagtgcccacagaagggctcacaccagatgatgtcccagctctggcanacagagtccggcactccatgctcaccatcttccgggagatctccactgatggcctgggtggtggcgattgtctaaanaagcctgggggagcgggcgaggcccggctctgagctccacccgtcctccccttcttcctccccatacctgacacagggcmtgaggcagggccaggcccacttccctggtccccactccmtactctccttttggaatcctcaacttctgaagtgaatgtcactccgtgttctgtccctgccccacccatggactctcctgcgtgggtgcagtctccactccaagcccacctgccatcttgtcttgtgggactattgcctaccctcatctcaagtggctcatgatacaagggtgggaramattccatcccatcccttmmmwarwrrwmwmwwwrtggccttctctccctttccaccntacacataaaaaaaaaaaaaaa

SEQ ID NO: 1802 - DNA, 2151 bp, Rattus norvegicus
gcagccggcgcctactgccactcccgcgagcatgaaggaccgaacccaggagctccgcacggccaaggacagcgatgacgacgatgatgtcactgtcactgtggaccgagaccgcttcatggatgagttctttgaacaggtggaagagatccggggctttattgacaagattgctgaraacgtggaggaggtgaagaggaaacacagcgccatcctggcctccccgaaccccgatgagaagaccaaggaggaactggaggagctcatgtcggacattaagaagacagcgaacaaagttcgctccaagctaaagagcatcgagcagagcatcgagcaggaggaaggtctgaaccgctcgtcggcggacctgaggatccggaagacgcagcattccacgctgtcccgaaagtttgtggaggtcatgtccgagtacaacgccactcagtcagactaccgagaacgctgcaaagggcgcatccagaggcagctggagatcactggccggaccacgaccagtgaggagttggaagacatgctggagagtgggaatcccgccatctttgcctctgggatcatcatggactccagcatctcgaagcaggccctcagtgagatcgagaccaggcacagtgagatcatcaagttggagaacagmmtccgggagctacacgatatgttcatggacatggccatgctggtggagagccagggggagatgattgacaggatcgagtacaatgtggaacacgctgtggactacgtggagagggccgtgtctgacaccaagaaggccgtcaagtaccagagcaaggcacgcaggaagaagatcatgatcatcatttgctgtgtgattctgggcatcatcatcgcctscaccatcgggggcatctttggatagawmccaccccacccacggctccattctggatgggtctccctgaggaggcccctggctgctgcacctagctgggttgccctccccactcctgccttctggctgggagtccttttccytcccatccaacaccgctccctctctgccatgaggctcccgtscccaccaccctgccccaagccgtgtsgtgtgcatgatcttgtgacagtgtgtgtctgtacaggaggcagaggggagcaggatcgggaacagccagaggggctgggtacaggccagtgtgggcaagactcgggccctggccaggtccgccttccttcaggcctggggcctacgcttccctgggactcaggctcctttctggaccccaaccttgccctcactcgccctgccctctggcttcctcagctctccccaccatgccaaggcacctggagggtggggaccagctggtcacatggtgctgcttttcaggttaggggtggggacagctcagcactgagtctttgttagctgcccactgccaggatgctcagggtgccacgrstgctggtgtgctaggagcacccagtacccctctttggcaaagcctgacagtgtctctggcctcagctgcccttaccacagccctgggagtcctgttcctgggctgggcctgagcctagtgatcctttgctaagaagctcagtggtgccatctccagccttgctctgagctggagaggtggagcaggccatagtcctctgcccacagtctctaacgggcatgttaagtcgtggccggagttgcatgttrgggacagcggttccctgctccctttctgctctgaaaagccaggtgtcactttgggcctgcagtctcaccctgccctgtctcccattgatrtrccacgtggtgtcaggtgtactggatgcagtattcagcasccagctggggagggggytccccactttcctcccctgccaacttggggcttctcagagtcaaaaatgtacccccatgccccaggacccctttctcatccacaggcaaggagtatgcatgcgactgcatgcagcgggagctggggccgtgtctgtgtgccccttcccctccgctttgctcctgcccagtgactgaccactgtccgtgctgccttctctcatggccacttccctttaccccrtcaccaaaggtctcggtacaaccagctgcccattttgtgagatttttatgtagaataaacatttgtatctggarwraaaaaaaaaaaaaaaaaa

SEQ ID NO: 1803 - DNA, 2076 bp, Rattus norvegicus
ggccaggcgatcccagcacccgcgatcgcgcgggctctgtgctccgagggccgtgctcgcctggtgcctactccagggctgtgtacaccgcgtcgggckgcggctgagcccgcaccaggagggcgcgggagccgcagggccctggagctttgggcgactgctacgcggccttggccgaggctcttccttgctcgccgttctgtcgcgggcctggcccgtgaaccgctcacagtatggcccgatgctgcttctacacggcggggacactgtctctgctgctgctggtgaccagtgtcacgctgctagtggctcgagtctttcagaaggcagtggaccagacgatcgagaagaatatggtattacaaaatggtaccaaggtctttgattcctgggagaagccccctctacctgtgtacatccagttttatttcttcaatgtcaccaatccagaggagatcctccaaggagaaatccccctgctagaagaagtggggccgtacacctacagggagctcaggaacaaggcaaacgttcagtttggagaaaatggaacaaccatatctgccgtcaccaataaggcatatatttttgaacgaaaccagtctgttggagaccctaccgttgacttgattagaacaataaatattcctctgttgactgttgtggaaatggcccagcagcccttcctcagggagatcatcgaggccatgctgaaagcttatcagcagacgctgtttgtcactcacactgtacatgaactgctctggggctacaaagatgaggtcttgtcgctcgtccatattttcagacctgacgtctcccctaactttggcctgttctatgagagaaatggaactaatgatggggagtatgtttttctgactggagaggacaattacctgaactttacaaaaattgtggagtggaatggaaaaacgtcgctggactggtggacgacggacacgtgcaatatgatcaacgggacagacggagattcttttcacccattaataagcaaggatgagaccctgtacatcttcccatctgacttctgcaggtccgtctatataactttcagtagctttgagaacgtagaaggactgcctgcttttcggtataaggtgcctgcagaaatactagccaattcctccgaaaacgctggcttctgtatacccgagggaaactgcatggacgcgggagtgctgaacgtcagcatttgcaagaatggtgcgcccattatcatgtctttcccacacttttaccaagccgacgagaagttcgtttcggccataaaaggcatgcgtccaaacaaggaagaacatgagtcatttgtggacattaatcctttgacaggaattattttaagagggsccaagagattccaaatcaacacgtacgttaagaagctggatgactttgtggaaacgggaaacattaggmctatgkttttcccagtgatgtatctcaatgagagtgttctcattgacaaagagactgcaagtcaactgaagtctgtgattaacacaactttgattgtcaccaacataccctacatcatcatggcactgggcgtgttctttggcttgattttcacgtggctggcgtgtcgaggacaggggtctacggatgagggaactgcagatgaaagggcacccctcatacggacctaatgggacttacctgttgcctgagcttggtgagagaatgtgagaactgacctgacctggaccaggacagggaaaagcytgcatcctcacgggctcmtggcctgtcaagaagggagtgaagccgcagcactggcacgcgagaagaccctcctggacagaggggaccgagcaggtgacatggctggcaattacgctttataaaatcatgtctctgaaactgtgtcaatgtgtcttagggagtatttaataaattrtrtagaaacctttwrwrahhrrrmwmwrrragctgtggggttttgtaacccctgttgtagatacagtgtctgagtcacttgttaatgttaacttggcctgacccgattcagtatgcctcactctccaaactttgtgtttaaaatatgaaaaaaaa

SEQ ID NO: 1804 - DNA, 1271 bp, Rattus norvegicus
caaaagctggagctccaccgcggtggcggccgctctagaactagtggatcccccgggctgcaggaattcggcacgagctttcacttccttgtcggagagtcsacggakstccggggctaagtagtcatggcgttactggatctgtgcggcgctcctcgggggcagcggccgaktgggcttgccgtggatgcagaagggcttcgctcggacccgggacactacagtttctccgtgcaagctccggagctcgcgcttccccggggaatgcagcccactgaattcctgaggtcctttggtgatgaccaggaaaggaaggttcagattgaaatggcgcatggcacaaccacgctggccttcaaattccagcatggagtcatcgtggctgtagactccagggcctctgcagggagttacattgctaccataagggtgaacaaggtgatygagattaacccttacctgcttggaactatgtctggttgtgcagccgactgtcagtactgggagaggctgttggccaaggaatgcaggctatactatctgcggaatggggaacgcatctccgtgtctgcagcctccaaghtactttccaacatgatgctgcagtaccggggtatgggcctstccatgggcagcatratytscggytgggacaagaagggaccgggactttattacgtagatsacaatgggactcgsctctcgggacagatgttytccmcagscagcgggaacacvtatscctacggggtkatggacaktgggtaccgvcaggatytcagtccygaggagkcctaygaccttgcccgaagagytattgtttatsytacccacagagacagmtattytggaggasttgtcaacatgtaccacatgaagaaagacggttgsgtgaaagtggagagcwctgaygtcagtgacctgytgcacaagtaccgagaggccactctgtgatcaytgytgggcagacatcctcccggccytgaggagytggcagactcagggacckrggshtayttcagtcttaggagaaagacrggyccawcmtggsytggagacaaagctbtgaggmtatggagacatctttgtttaccctctcacyyagccagccctcacggatacyttytamgtacaataaaagaaaaacagtthwamaraaaawaaaaaaaarrmwrrmryygcgrggrksgracccgrtrmscamwkcsccctgrtrgyccccgtgccccagtcactgctgttgtggaaaattggcttcaaggaccaacttt

SEQ ID NO: 1805 - DNA, 1122 bp, Rattus norvegicus
gggacggccccggtcccctcccctccgtcactcctgcttacggactcccgggtcatggggaacacggcgatcgccaagaaaggcagcgaagtggagagcgtgaaagaattcctakccaaagccaaagaagactttctgaggaaatgggagaaccctcccccgagtaatgctgggcttgaggattttgaaaggaaaaaaaccytkggaacgggttccttcggaagagtcatgctggtaaagcataargccactgagcagtactacgccatgaagatcttagacaagcagaaggtcgttaagctaaagcaaatagagcacactctgaatgagaagagaatcctgcaggcagtggagttcccgttccttgttsggctggagtattcttttaaggataattctaatttatacatggttatggaatacgttcctgggggggaaatgttttcacatctaagaagaattggaaggttcagtgaaccccatgctcgtttctatgcagctcagatcgtgctaacatttgagtacctccattccctcgacctcatctacagagatctcaagccggaaaacctcttaattgaccaccagggttacatccaggtcacagattttgggttcgccaagagagtcaagggcaggacttggacattstgtggcaccccagagtacctggccccagagatcatcctcagcaagggttacaataaggcagtggactggtgggcattgggtgtactgatctacgagatggctgctggctaccccccgttctttgctgaccagccaattcagatttatgagaagattgttkccggaaaggtccgcttcccgtcgcacttcagttccgatctcaaggaccttctgcggaatctgctgcaggtggatctsacmaagcgstttggraacctkaagrayggsgtkartgacatcaaramccacaagtggtttgctackaccgamtggatcgcgatttaccmgagaaaggttgaggctccwttcataccaaaattcaraggctytggcgataccakcaacttcgatgactatgaagaagaagaratccgagtsystataacagaaaaatgtggaaaggagttttstgaattttagggaggagaagga

SEQ ID NO: 1806 - DNA, 1170 bp, Rattus norvegicus
cggaccgcggatctaggcggcggcggccgaggtccggccgggcggcgcaaccggcgcaatccgccgccaccgaggtagtgatgggcaaggaggaggagattgctcgtatcgcccggaggctggacaaaatggtgaccaggaagaacgcggagggagccatggatttgctgcgggagctgaagaatatgcctattacattgcacttgctccagtccacccgtgttgggatgtctgtcaacgctctgcggaagcagagttcagacgaggagctcattgcacttgccaagtccctcatcaagtcctggaagaagctcttggatgtttctgatggcaaatccagggatcaagggaggggcacacctttgcctacatcgtcctcaaaggatgcctcagggactacggatctcagctgcaagaaaccagacccacctaggacctcatccactccgaggatcaccacatttccccaagtgcccatcacctgtgatgctgtgcgaaacaaatgtcgtgagatgctgactttggccctgcaaactgaccacgaccacgtggctgttggtgtgagctgtgagcatctgtcatctcagatcgaggagtgcatcttcctggatgtgggaaacactgacatgaagtacaagaaccgtgttcggagccgaatctctaacctgaaagatgccaagaaccctggcctacgccggaatgtgttgtgtggtgccattacaccccagcagatagctgtgatgacatcagaggagatggccagtgacgagctgaaggagatccgcaaggctatgaccaaggaggccatccgagagcaccagatggcccgtacaggtggcacacagaccgacctgttcacctgcaacaagtgcaggaagaagaactgcacctacacgcaggtgcagacccgtagctctgatgagcccatgaccacctatgttgtctgcaatgagtgtgggaatcgatggaagttctgctgagtccttgtactgatgtagccctggccatggctaaccctgaacctcctgcaacgctcttggtggacacagcttctctggagataccctgcaggtggcatgccccgttccagcctgcctggtgtgcacctgcctgccctttgcccctcatcattaaatgtttctttttgccttcaaaaaaaaaaaaaaaaaa

SEQ ID NO: 1807 - DNA, 735 bp, Rattus norvegicus
  misc_feature (287)..(287): n is a, c, g, or t
  misc_feature (390)..(390): n is a, c, g, or t
cacsmgggaaamgatggccgcaccagcaacatccgtgctgtcccgacaggtgcggagtttcagcacatctktgkycagscccttttcgaagcttgtaaggccccctgtccaggtctacggcatcgarggccgctatgcaaccgccctgtactmtgctgcgtctaagcagaaaaggctggaccaggtggaaaaggagttgmtgcgagtgggrcaactcttgaasgaccccaaggtstcccttgctrttctgaayccytacattamgcgctccatcraagtgmmaagmntkmrgsacrdsrmtacaaaggraaaakkhwykmsgytgacgvccaacctcatgaatttamttsctsaaaatggtsgcvtrkgcaacacscagggcgtcatmtntsccttskscmcsaksatgagtgdccacygtggagaagtbccktscacagtgaccacmgsrttycctttagatgaagctgttctctytgagttaaagmcagtgytgmmtagstwcstgvgtaaagsccagatactgaacctggaggtcaagactgacccrtcamtcatgggtgsgatgmttgyccgaaytggagagaaawacgytgmtatgtctgcaaagagcaagattcagaagctcmgcaagrccatgcgggatytsctytgagagactgtcacctgtgtgagcgyttgtctttggagcacaataaaatgcttcctghhmvrvrraaaaaaaaaaaaaamaaa

SEQ ID NO: 1808 - DNA, 2411 bp, Rattus norvegicus
gcgccacgacgcaggacctctgcagggtggactgagaggacggatggargarctsgtgggactgcgtgagggctcctctgggaagccagtaactctgcaagagctatgggggccgtgtccacgcatccgccgaggtgtcagaaggggcctagagtggctgaaagagcggttgttccgtgtgggtgaggactggcacttcctggtggctctcggggtgctcatggctctgatcagctatgccatgaactttgccattggacgtgtggtcagagcacacaaatggctataccgggaggttggggacggccacctgctccggtacctctcctggaccgtctaccctgtggctcttctgtccttctcctccggcttctcgcagagcatctcacccttctctggaggrtctggactcccagagctgaagaccatgctgtccggtgtggtcctggaggactacctagacatcaagaacttcggggccaaggtggtgggcctctcctgcaccctggcaacaggcagtaccatcttcctaggcaaagtgggccccttcgtgcacctgagcgtgatgatttctgcttatctgggccgagtgcgcgccaagaccattggggaaactgagaacaaggccaaggaaattgaaatgctctcggcggcagcggcagtgggcgtggccacagttttcgcagcccccttcagcggtgtcctgttcagcatcgaggtcatgtcctctcacttctccgtctggaattactggaggggcttctttgccgccacatgcggggccttcatgttccgtctcctaggggtcttcaacagtgaacaggagaccatcacctccrtctacaagaccagattccgagtggatgtgccctttgacctgcctgaaatcttcttctttgtggctctggggttcatctgcggggtcctgagctgcgcgtacctgttctgtcagagaacttttctccgctttatcaagaccaatcggtacacctccagactgttggctacaagcaagccgtcctacgcagctctggttgccctggtcctggcctccatcacctatccacctggtgtgggtcgcttcatggcctcccggctgtccatggcagagcatttgcactctctgtttgacaacaactcttgggcactgatgacccgaaattcatccccaccctggcctgcggagccggacccccagaacctgtggttggaatggtgtcacccacggttcaccatctttgggactctggccttcttcctggtcatgaagttctggatgctgattctggctaccacgatccccatgcctgctgggtatttcatgcccatattcatcattggagctgccattgggcgcctcttgggagaggccctgtctgtcgccttcccagagggcattgtggctggcagagaggtcaaccccatcatgcctgggggctatgctctggcaggtgctgctgccttctcgggggcggtgacccacaccatctccacagcactgctggcctttgagctgaccggccagatcgttcatgcactgcctgtgctgatggccgtgctggcggccaatgccatctctcaaaactgtcagccgtctttctacgatggcaccatcatggccaagaaactgccgtacctgccgyggatccgtggccgacagattggctcctaccctgtgactgtggaacacttcatgaactgtaacctcaccacgctggccaaggacacgcccctggaggaggtggtcaaagttgtgacmtctacagaagtgtctcaatatcccttggtggagaccagagagtctcagaccctggtgggcattgtggaacggacccacttggtgcaagccctccagacccagccarctycctgggctccaggccaagagcgctttctccaggacatcttggcaggtggctgccccacacagccagtgaccctgcagctgtccccagagacctccctgtatcaggcacacagcctctttgagcggctgacccttcagtcgctgttcgtgacgtcacggggcaaagctgtgggctctgtgtcctgggcggagctgaagaaagccatttccaccttgatyaacccmccagcccccaagtgagccagcgttggggtcagaacaggaccccagctaagagctgcagaggctgcacagagccccaccccatttccctccctaccccacccctccagcccagcccggctccccagtgcctcaggcagctctacccagctgaacgggactccgtattcatcatggcctacaccgagagcacaacatctctctggtctggaagggacaaatctcaccctggtgcatgtcccttctgggattatctattcacaaccagtagctcctgagaaaataaaagtaaagctggttcccrgaaaaaaaaaaaaaaaaa

SEQ ID NO: 1809 - DNA, 4436 bp, Rattus norvegicus
gaggcgactgagttgctggtgcgcgagtcaccaagtcaccaacttttcctgtgctctcggtgtctggccagattcccggagtgtcagcagagcacggggtgactccttcgtccaccggtgctcaagacctcccggtaactttctttcccgcagcccaggagcagatggggaggctcccggtgctgctgctatggctagcctggtggttgtcgcaggcaggcatagcctgcggtgccggctccgtgcgcctggccggtggcctgacgctgggcggactattcccagtgcacgcgcggggagccgcaggacgcgcgtgcggggcgctgaagaaagagcaaggcgtgcaccggctggaagcgatgctctacgcgctggaccgcgtcaacgctgacccggagctgctgcccggcgtgcggctgggcgcgcggctgctcgacacctgctcgcgggacacctacgctttggagcaggctctgagcttcgtgcaggcgctcatccgaggccgcggagacggcgacgaggccagtgtgcgctgccctgggggagttcccccgctgcgctccgcgcctccagagcgcgtggtggcggtggtgggagcctcggctagctccgtgtccatcatggtggccaacgtcttgcgcctgtttgcgataccccagatcagctatgcctccacagccccagagctcagtgactccacacgctatgacttcttctcccgagtggtgcctcctgactcctaccaggcccaggccatggtggacattgtgcgggcactgggatggaattacgtgtctacattggcctctgagggcaactatggcgagagcggggttgaggcctttgtgcagatttcccgtgaggctggaggtgtctgtattgcccagtcaataaagattcccagggagccaaagccgggagagttccacaaagtgatccggaggctcatggagacacccaacgcccgtggcatcatcatctttgccaatgaggatgacatcaggagggtcttggaggcaacacgccaggccaacctgactggccacttcctgtgggttggctcagacagctggggatccaagatctctcccatcttgaacctagaggaagaggctgtgggggccatcactatcttgcccaaaagggcttcaatcgacggatttgaccaatacttcatgactcgttccttggagaacaaccgcagaaacatctggtttgccgagttctgggaagagaattttaactgcaaactaaccagctccggtggccagtcagatgattccacccggaaatgcacaggtgaggaacgcatcggccaggactccgcctatgagcaggaggggaaggtgcagttcgtgatagacgctgtgtacgccattgctcacgctctgcatagcatgcaccaagcgctctgcccaggccacacaggtctgtgcccagccatggagcctactgatggccggacgctgctgcactacatccgagcagtccgcttcaatggtagtgcaggaaccccagtgatgttcaatgagaatggagatgcccccgggcgctatgacatcttccagtaccaggcaaccaacggaagcgccagcagcggcgggtaccaggccgtgggccaatgggcagaggcccttagactggatatggaagttctacggtggtcaggcgacccccacgaagtgcccccttctcagtgcagcctcccctgcgggcccggtgaacggaaaaagatggtgaagggtgtcccctgctgttggcactgtgaggcctgcgacgggtaccgcttccaggtggacgagttcacatgcgaggcctgcccaggggacatgaggcccacccccaaccacactggttgccgtcccacacccgtggtgcgcctgacctggtcctctccatgggcagctctgccccttctcctggctgtcctgggcatcatggctaccaccaccattatggccaccttcatgcgacacaatgacactcccatagtccgcgcctctggccgtgagcttagctacgtgctgctcactggcatcttcctgatctacgccatcaccttcctcatggtagccgagccttgtgcagccatctgtgctgcccgcagactcttgcttggcttgggcaccacgctcagctactcagccctgctcaccaagaccaaccgcatctaccgcatctttgagcaagggaagcgctctgtcacaccaccacccttcatcagccccacttcgcaactagtcatcaccttcggcctcacctccctgcaggtggtgggagtgatagcatggctgggggcccagcctccacacagcgtgattgactacgaggagcagaggacggtggaccccgagcaggccaggggtgtgctcaagtgtgatatgtctgatctgtccctcattggttgcctgggctacagtctcctgctcatggtcacgtgtacagtgtatgccatcaaggcccgaggtgtgcctgagaccttcaatgaggccaagcccatcggcttcaccatgtacaccacctgtattatctggctggcttttgttcccatcttctttggtaccgcccagtcagctgagaagatctacatccaaaccaccacactaactgtgtcactgagcctgagtgcatcagtgtccctcggcatgctctacgtgcccaaaacctacgtcatcctgttccatccagagcagaacgtacagaagcggaagcgcagcctcaagaagacctccacgatggcagccccaccccagaacgagaacgcagaggacgccaagtagcaaggttgagtgtgggtgccacaggttgctccctgccctttctctgcttctcctggcttcaaagtggaagctgtgaaagatccacagagaccatcggaggccaggaatgtgtaaagaccatgcccatggtcttttccgaaggaaaaagctaaaccccgaccacgctggacttgtgctttcctgggcacgccaaccacatcattctgcccctccgacccactgtaagaaatactgcttccaggaatcttcctgaagagagacgaaactgacaccttctgggcaggcattcaaaaccatagtgaagccagggcttggccaggttgggataagatttatcttgatccaacactacaacctaggggctggccagggtgtctgtcagaatgtgtaaaccccaacaagaaatccaggattagagctgggtggggggtgcaatcaccacaataggaaacttagaggtctgaatttggggaaatatttccctgagcagagcctgtatgagggttctgggaactgagtgtgagcctgcagcagagagaggagcagtacagggaactggggcaggcttctgtgaggtcgcttcccttgtggtcttttccccagggtcatccaaaagattggacagtttttctctgctgtgtatgtttccatagattactccaacttgaagaaatgccaacacattacagtgggtaagagatggtaaggtatagctagactttggtcagagtgtccatgaattgtcttgtttctgcacttaagagttgttgttgttgttgttgttgttgttgttgttgttattattattattattattattattattattatcattatctagagtgagggtctcactatgtaactctggctgtcctagaacttactatgtagaccaggttggccatgaactcacagagatctgctggcttctgcctcccaagtgctgggatcaaaggtgtgtgtcactatgcccagcttaaaattttaattactaggatgagcacaaaagctcccttgcatagagtcttggagcgcccacctgaaaggtggtggaggcatgtggagggactcatgggaacaccatgcacgggctttagttttgactattagttttacagagctggtttttagttagsgaactttyctttcgtcgttttttgttgttgtttcgttgtttgggtttttttttcatttgtttgttttaatgtatagagctaaatgctttaatttattgtgaattctccagtatttaaggtacagaactaagttttgaaagtatgctagctacacttcaatggacagatgctccaaggtgtaatgagctttgatcttgagatgtaatactttacttagtatcttaaaggcaacaggcttctctctagaacatctctgctgttccgctcttcctcacttgctgtgttcccggtttcccacggtgcaaagcacagctcagcatttactgctgagtgagctctgatgctccgttctgaggcttctgtgctakgtcaaccctcaaagtgtgaaatgtgttctcccgggagagccttgtccacgtgaccgtctgcatggtgtttttctcctctgggatctcttctagagtcggtgagccaaggtctgaataaaggttttcttgcacttaaaaaaaaaaaaaaaaaa

SEQ ID NO: 1810 - DNA, 1988 bp, Rattus norvegicus
agttcaatccagccggtctggttggagtaacacagtccagggactgtgtctatggttgctccgcggccgctttgccggctggtgcttttgtatcaggccaagcagtattccatggcagggaacttctggcagagctcccactatttgcagtggattttggataaagagcgccagaaggacctaaagtttctctcagaagaggagtattggaaattacaaatattttttacaaatgttatccaagcattaggggaacatcttaaattaagacaacaagttattgctactgctacagtctatttcaagagattctatgccaggtattctstgaaaagtatagatcctgtattaatggctcctacatgtgtgtttctggcatccaaagtagaggartttggtgtcgtctcaaatacaagmttgattgctgctactacttctgtattaaaaactagattttcatatgcctytccaaaggaatttccttacaggatgaatcatatactagaatgtgaattttayctcttagaattaatggactgttgcttgatagtgtatcatccttatagacctttgctccagtatgtgcaggacatgggccaagaagacgtgttgcttccccttgcatggaggatagtgaatgacacctacaggacrgatctttgkcttctgtatcctyctttcatgatagctttagcttgcctacatgtagcctgtgttgtacaacasraagacgctagacaatggtttgcagaactttctgtggatatggagaagattttggaaataatcagggttattttaaaactgtatgagcagtggmarrattttgatgagagaaamgagatggcgactattcttagtaagatgccgaaaccaaaaccacctccgaacagtsmmkgagwgcakkstccaaatggmagtcagaactctagctacagccaatcttaaaacaccctgaagaatcccgtagtggaccacttggaaggaaagcattggagagtttgagtaatgtcttcattggaaagcagatgcaaatgaatagcttgtttctgtcgagcatattgggaattgacttaatttccacaaaataagtttcatttcctaacttgattctagtgtataatttattaaatcttaattacaaaatttagtgagactcttaaggaacctatagccatatacaaacatttcagggttaacttctcttttacatactcatgcacatagacacatactagtactggttttttattaggaaattgaagggtttattatcttttttgtagtaagtcaggaagcatgaaatgtcatttgttcacatttttctttgggcattgagggaccaaaaaggacataaaaagtcaataaactccccccgacccaattaaattttaaaactagatttaagaagttaaatcttagaaaatcctaggttttagaaatgataattacaatttggaggagattaatcaagagcttactgattttaaaatatattgtattcaatactttttgtatcatcacagaagatactggcccagcctatcaaaaaagtgcaatatatatatatatatatagcataccttgacaatgtaaaggttgtattgacttactagctgtattgaaatgctgggaaacctgaaagaaaaggctatttacaactaatttatagttattaagcattttaaaagtttaatttgattaaatgcttaagttaaaatttggtgaaattttaatgtttaatttgtcctgaaattttttatgagacatatatacccgatttaattttagtgttttagtgtaagctaacagatgtacagaaggcattctgagttgggaaggaacctggtcaggttttaggccagtaagattcttaattctcatgggtatagacttcaggataaatgttacatttgtgagacttcataaattaactcattttcttcagactcaaaggaagaagtataaataaaacttggagtaatgag

SEQ ID NO: 1811 - DNA, 1966 bp, Rattus norvegicus
tcgaggtcgacggtatcgataagtttgatatcgatttcctgcagcccgggggggatcccgccagcgccgcgcgctccggccgccgcctcccgcctcctgcttcccgcctgccgtcggcctcctgtccgctcgagcgcgcctgtctgcgggggacacagcttcgggtctgagttccaagtcctgagccatgccaagggagaggaaggagagagactcgaaggaccacaccaaatgaaagaagaaggtggttccgacctctcagtccgatccagaaaaaggaagccaaatgtgcccgtttttttgcaagatccggatgaagaaattgccaagattgacaagactgtgaaaagccaggatagcagtcagccttgggatgatgattcagcgtgcgtggacccctgctctttcatccccacccctaacaaagaagaggacaatgagcttgagtaccccaagactgcatttcagcctcggaaaatcagaccgcccagagcctccccacttcccgtcttgaattgggccaatagagaagaggtctggaggatcatgttaaacaaagagaagacttacctgagagatgagcactttctgcagcgccaccctctcctgcaggcgaggatgagagcagttcttctggactggctgatggaggtgtgtgaagtctataagctccacagagagacattctacttggcacaggacttctttgatcgttacatggcatcacaacagaatatcataaaaacacttttacagcttattgggatttcagccttatttattgcttctaaacttgaggaaatctaccctccaaagttgcaccagtttgcttatgttactgatggtrcttgctccggggatgaaattcttaccatggaactgatgatgatgaaggcccttaagtggcgtttaagccccctgaccattgtgtcctggctgaatgtttatgtccaagtggcctacgtcaacgacacgggagaagtgctgatgcctcagtacccacagcaggtcttcgtgcagatcgcagagcttttagacctgtgcgtcctggatgttggctgcttagaatttccttatggtgtcctcgctgcttctgctttgtatcatttttcctcgttggagttgatgcagaaggtctcaggttatcagtggtgtgatatagagaagtgtgtcaagtggatggttccattcgccatggttatccgggagatgggaagttccaagctcaagcacttccggggagttcccatggaagactcccacaacatccagacccacaccaacagcttggacttgctggacaaagcccaagcwamgarrgccatattgtcagaasaaaataggatttctcctcctccgagtggggtcytgacacccccacacagcagtaagaagcagagcagtgagcaggagacagaatgaccagacctgccatcgcctccaaagacagtggtgtggaagcasctgcctggagctccttgtgctgccttggaggwmrrgagmsmctgmagrwscwmwgcwctgwgragaggtgtctcttccagagcagcasgggtctacaakatgccttggacggaagtgctttgawtgaatgctaggtgttttaactatagggtcgagtacaccarccacctccagaacaccactgagtgctccaraagctgctaaggagggtgstacttggacccactggactvttcacacagacggcaaaagcttgaagttaaggaggccatggtgcttgctggcctctgctgggtgtmgcagggttgctgttgatagggtacggcgagtggtcgtgagcaagcatgggatgcagakccacagcctggcctgagytgcccttbtccactgtcagytgacagcatatcctgccttcatgaacactcttgttttgkaagtgctgctacgtytatcaattttaataaagrtartkctatctytgrrrmamaammaaaaaaaaaaa

SEQ ID NO: 1812 - DNA, 1084 bp, Rattus norvegicus
cctcgagatccattgtgctctaaagtttatgcattggatggattgaagaaaagaaccctttttccctctctgtctgcaactgcagcaagggaggggagttggatatacctcgcctagtgtctcctggttgataccatcattattgtttattcttgtgattaaaagccgagtcctctgatggctcccttaggtgaagttgggagctatttcggtgtgcaggacgcggtaccgttcgggaacgtaccggtgttgccggtggacagtccggtgttgctaagtgaccacctgggtcagtccgaagcaggggggctgccccggggacccgcagtcacggacttggatcatttaaaggggattctcaggcggaggcagctgtactgcaggactggatttcacttagaaatcttccccaacggtactatccagggaaccaggaaagaccacagccgattcggcattctggaatttatcagtatagcagtgggcctggtcagcattcgtggtgtggacagtggactctacctcggcatgaacgagaagggggagctgtatggatcagaaaaactaacacaggagtgcgtgttcagagaacagtttgaagaaaactggtacaacacctactcttccaacctgtacaagcacgtggacaccggaaggagatactatgttgcattaaataaggatgggactccaagagaagggaccaggactaaacggcaccagaaatttacacattttttacctagaccagtggaccctgacaaagtacctgaactatataaggatattctaagccaaagttgacaaagacagtgtcttcacttgagcccttaaaacataaccactataaatgcttcatgcggtgggttcttattgattagcagtgccgtcacctcagctccactgttgccaaactttgtcgcatcgatatgtatgatgggagcttggatgaggacttgccgatttgctctgcacttactggctggtcctcctggagggctgcctagggccacttgcttgatttattgtgaaagcagggagagaggctgcgggtgccgaaggttggccatgagtgagtagaggg

SEQ ID NO: 1813 - DNA, 1223 bp, Rattus norvegicus
  misc_feature (825)..(825): n is a, c, g, or t
  misc_feature (930)..(930): n is a, c, g, or t
  misc_feature (1065)..(1065): n is a, c, g, or t
  misc_feature (1163)..(1163): n is a, c, g, or t
agtgasgakagrmytwgtccgdkkccgaggtctttytgtragggtgtttcgacgcgctgggcggtttgttccttcatcgcattcgttaacaggtcaaaatgcaaatyttcgtgaagaccctgaccggcaagaccatcaccctagaggtggagcccagtgacaccatcgagaacgtgaaggccaagatccaggataaagagggcatcccccctgaccagcagaggctcatctttgccggcaagcagctggaagatggccgcaccctctytgactacaacatccagaaagagtcaaccctgcamctggtcctccgcctkaggggsggcatgcagatcttcgtgaagaccctgaccggcaagaccatcaccctggaggtggagcccagtgacaccatcgagaacgtgaaggccaagatccaggataaagagggcatcccccctgaccagcagaggctcatctttgccggcargcagctkgaagatggccgmaccctctctgawtacaacatccagaaagagtcaaccctgcaccttgtcctccgcytgaggggcggcatgcagatcttcgtraaraccctgacyggcaagaccatcaccytrgaggtgkagcccagtsmcmccatcgagamcgtrargsccaagmwcsagghtmrwgmsgscatcysccytgaccagcagagsytsatctttgccggcaagcagytggaagatgsccgmaccctytctgmytacamcatcmagaargagtcaaccywrmasbtggwsytycrcytgmgrggyggcmtsyagawmtwbgtgrakmccbygrsckgcavgmmyatcrsynyggaggtggagcccagtgacmccatsgagaaygtgaagsccaagatmcwgrataargagggmatcccccctgwccagcagagghtsatytttbccggcaagcagntrgaagwtgsccgcrcyytstbtgatymcaacatcmrgaavgagtcraccbtkcwcytggtcctccgybtgakgggtggvtattaattvttcrgtvtgcattcccrgygggcastgatggcattactbtgcactntadccayttgccccaatttaagtttmgaaatkmcaagttycartaatagctgamcctytgktaaaaatgttmataaaggttttgttgcwtggtadrmnwhmaamwhdahaawawaaraarramraragaaaaarwaaaaagagaaggggttgcggccg

SEQ ID NO: 1814 - DNA, 2898 bp, Rattus norvegicus
gcgactcctgcagcttctcttccagttcagcgggtcagggccggtccggtcgggatcgctctgctgccagctcagtgccggtgcgctcggggcgggcccgccgtccggaggatgaggctggagtgggcggaggcgtgagaaccgggttactttcctcccgaggtggagcgcggctgccctgtagtcctttgaaagcgctgtgaacccggagactcaagtcggggcagaggcaggttgactagagggcccgctagagccggagattgaacttcaccccgaaaccagcctccgccagtcccacctggccgcatttacgtaacctcttcccaaagccgggtagcagtgaagtccgccggggtggccacccggcagccgtgtcccggtgaagctcccggggcggctggcgcgggatctcaagcagatgcggggtccacaggcagcgcatccaccagccgccgagcttgctatgcctctgagctgcaaggaactcattatacaatgacaaatggaggcagcattaacagctccacacacttgctggatcttttggatgagcccatcccaggtgtcggtacatacgatgatttccatactattgactgggtgcgagaaaagtgtaaggacagagaaaggcacagacggatcaacagtaaaaaaaaagaatcagcatgggaaatgacaaaaagtctatatgatgcttggtcaggatggcttgtagttacactgacgggattggcgtcaggggcgctggctggattgatagacattgctgctgactggatgactgacctgaaagagggcatctgcctcagtgcattgtggtacaaccatgaacagtgttgttggggctctaatgagacgacgtttgaagagagggataaatgtccacagtggaaaacatgggcagagttaatcataggtcaagcagagggtcctggatcttatatcatgaactacatcatgtacatcttttgggctttgagttttgcctttcttgcagtttccttggtgaaagtatttgctccgtatgcctgtggctccggaattccagagattaaaactattttgagtggattcatcatcagaggttacttgggaaagtggactttaatgattaaaaccatcacattagtgctggctgtggcatcaggtttgagtttaggaaaagaaggtcccttggtacatgttgcctgctgctgtggaaatatcttttcctacctctttccaaagtatagcacaaatgaagctaaaaagagggaggtgctgtcagccgcctcagctgctggtgtctctgtggcttttggtgcgccaattggaggagtgctttttagtttggaggaggttagctattattttcctctcaaaactttatggagatcgttttttgctgctttggtggcggcctttgttttgagatccatcaatccatttggtaacagccgtctggtccttttttatgtggagtatcatacaccatggtacctttttgaactgtttccttttattctcctaggggtatttggagggctttggggagctttttttattagggcaaatattgcctggtgtcgccgacgcaagtccaccaaatttggaaagtatcctgttcttgaagtcattattgttgcagccattactgctgtgatagccttccccaacccatacacaaggctcaacaccagtgaactgattaaagagctgtttacagactgtggccccttggaatcctcctctctttgtgactacagaaatgacatgaatgccagtaaaattgttgatgatattcctgaccgaccagcaggcgttggagtatattcagctatctggcagttgtgcctagcactcatatttaaaataataatgacagtattcacttttggtatcaaggtcccgtcgggcctgtttatccccagcatggcgatcggagccattgcagggaggattgtggggattgctgtggagcagctcgcctactaccaccacgactggttcatcttcaaggagtggtgtgaggtcggggctgactgcatcactcctgggctgtatgccatggttggtgctgccgcatgcttaggtggtgtgacaagaatgactgtctctctggtggttattgtttttgaacttactggaggcttggaatatattgttcctcttatggctgcagtaatgaccagtaaatgggttggtgatgcctttggtagggaaggtatttatgaagcacacatccgactaaatgggtaccctttcttggatgcaaaagaagaattcactcatacaaccctggctgctgatgtcatgagacctcgaagaagtgaccctcccttagctgttttgacacaggacaatatgacagtagatgacatagaaaacatgattaatgagaccagctataatggctttcctgttataatgtcaaaagaatctcagagattagtgggatttgccctcagaagagacctgacaattgcaatagaaagtsccagaaaaaaacaagaaggtgttgttggcagttctsgggtgtgctttgcccaacacactccatctcttccagcagaaagtcctcggccattaaaactgagaagcatccttgacatgagtccttttacagtgacagaccacaccccaatggagattgtggtagacrtcttccgaaagcttggtctgaggcagtgccttgtcactcacaatgggcgcctccttggcattataacaaaaaaagatatcctccgtcatatggcccagacggcaaaccaagaccccgcttcaataatgttcaactgagtcctgtagatgaggagagagaggagacagaagaggaagttcgtttgttgaatagcacaattctttaatctgckggactcgtccacttttttcttctttaaaaaaaaaaaaaaaaaa

SEQ ID NO: 1815 - DNA, 4642 bp, Rattus norvegicus
gcggccgccgagmccccgccgccgccgccgccgcctccggaggacgaccccgcgcaggacagtgaccccgaagagctgcccctgatcaggcttgagtttgaaaaaattgaagaacctgaatttattgcattatgtcagaagttaaaggtgcccgatcatgtcagagagagagcttggctaacgtgggagaaagtttcatctgtggatggaatcctggaaggatatattcagaagaagaaggaactctggggcatctgcatcttcattgcagcagttgacctggatgagatgccattcacttttactgagcttcagaaaagcatagaaaccagtgtctataaattctttgacttattaaaagaaattgataccagtaccaaagttgataatgctgtgtcaaggctattgaagaagtacaatgtgttatgtgcactctacagcaaattagaacgswyakrwrgamwymtatatttgwcayagmccagswgtggryyakytacygaartwratwctrtgytggtgctaaaagtttcttggatcacctttttactagctaaaggagaagtagtacagatggaagatgatctggtgatctcatttcagttaatgttgtgtgtacttgactattttatcaagctctcgcctcctgcgctgctcagagagccgtacaaaacagctgcaacacccattaatggttcacctcggacacccagaagaggtcagaacaggagtgctcggatagcaaaacaactagaaagtgatacaagaactattgaagttctctgtaaggagcacgagtgtaatgtagatgaggtgaaaaatgtttatttcaaaaattttatcccttttataagttcacttggaattgtatcatctaatggacttccagagcttgaaagtctttctaaacgctacgaagaagtttatcttaaaagcaaagatttagatgcaagactatttttggatcatgacaaaacacttcagactgatactatagacagttttgaaacagagagaactccacgaaaaagcaaccctgatgaagaggcammcatgrtkmctcswsacactccagttaggactgttatgaatactattcaacagttaatggtgattttaaattctgcaagtgatcagccatcagaaaatctgatttcctacttcagtaattgcacagtgaatccaaaagaaaatatcctaaaaagagtaaaggatgttggacacatctttaaagagaagtttgctagcgctgtggggcagggatgtattgacattggagcacagcgatataaacttggggttcgattgtattatcgtgtgatggaatcgatgcttaaatcagaagaagaacgtttgtccattcagaattttagcaaactcctaaatgacaacatctttcatatgtctttattggcctgtgctcttgaagttgtaatggctacatatagcaggagtatgttacagaatcttgattctggaacagatttgtccttcccgtggattctgaatgtacttaatttaaaagcctttgatttttacaaagtgattgaaagttttatcaaagtggaagccaacttgacaagagaaatgataaaacatttagaaagatgtgagcatcgaatcatggaatcccttgcatggctttctgattcacctttgtttgatctcataaagcagtccaaggatggggaaggacctgatcaccttgagtctgcttgttctctcagcctccctctccagagtaaccacactgcagcagatatgtatctttctcctataagatctccaaagaaaagaacttctactacacgtgtaaattctgcggcaaatacagagacgcaagcagcctcagccttccatactcagaagccattgaaatctacctccctttccctgttttacaaaaaagtgtaccgtctagcatatctccgactaaatacactgtgtgcgcgccttctgtctgaccacccagagccagaacacatcatctggactctgtttcagcatacattggaaaatgagtatgagctcatgaaagaccgacatttggaccagattatgatgtgttctatgtatggcatctgcaaggtgaaaaacattgaccttaaattcaaaatcatcgtaactgcgtataaggatcttcctcacgctgcccaggagacctttaaacgtgttttgatcagagaagaggagtttgattccattatagtgttctacaactcagttttcatgcagagactaaaaacaaatattttacagtatgcctccaccaggcctcctaccttgtcaccaatacctcacattcctcgaagcccttacaagttctcgagttcacccttgcggattcctggaggtaacatctatatgtcacccctaaagagtccttataaaatttcagaaggtctgccaacacccacaaaaatgactccaagatcaagaatcttggtctcaatcggtgaatcatttgggacatccgagaagttccagaaaataaaccagatggtgtgtaacagtgacagagtgctcaaaagaagtgctgaaggcggcaatccccccaaacccctgaagamrykgcgctttgacatcgaaggatccgatgaagcagacgggagtaaacatctcccagcggagtccaaattccaacagaaactggcagaaatgacttctactcgaacacgaatgcaaaagcagaaactgaatgatagcatggaaatctcaaacaaggaggaaaagtgatgatctcaggaccctaacactgtagaccctcgggacaccwgactcgtgtctcatggatgtgactatagttcccaggttctgctcatgttatmgryayrarrtgtgcaggtacagctgaatatttatgtgggtgatttgtaagccacttcaatgttgwaatcaatggtatagaattgacagtacacaggattgagaatcttgtgcagatcatgccatttaaaatatgaaagcagattgttggcatttccaacaggagcctgctgccctcagaagtgaggctgcctctggagggagtcctagcaactcccttacatctggctgactactttgcctttccttgtggcacatgtgtgatgtttgctcttggttttattaatttatatgtattttttaatttaacgtgaatatccttaraaaawrwrwmwwrwmttccaaatgcaagttgattgattgtccacattcaaccaaattatcttgaatcctctactgaaacagattgttacaaactggggaaaagtactaatttgtacacattggacttgttttaatactagaatctaatgtgccatatgtttgtttcacacattttacctttgaaatagaagtaaaaaaagtataaacatatgatactgtcttactactgacacagatttcatacctcagaccctctaagaaccaattcttttattcatccaactcatactttaaactgaagactattgataatactccaggtttgttttttcttttaatctttcagatcactgaatctttaagtacccatgtagtacttgaaaatcaagtctggccacaactgtacttcagaggaccctagtacagtacaacccaagtgcactttctaatgtctctgggtcctgaggaatcaagatacaaattaactatgttctgtaagcagaccgttaactataggagccttcggtttaactatgttctgtaagcagaccgttaactataggagccttcggttttccctcatacaagtgtctaaccacatctcaacagttcactctgctcttctgcatccagggctgatgtgttccctctggaatggtacatgtcttccagggtcttttgaactggcaggtatctatttttttaagccaatctggtctaataacactggcttcttcaaagccacagcatttctaatccagctgtgccgaagcttcagactaaaacagctgcattgaaagaagaggcactcccttcaccccccccccccacctaaaggtgtttacattatcttgtggsaykarcttatttagagatgctataatttaaaataggcggtatttwaggtagcgtcmrykrgcatttaagaaaatcattttttctaaactccataytttttgaaaagaaatctggtcttgttagaaaacaaatttctactttgtcctcaatttagtttcagtkkyackaggttgatagttatctcgatgacaaaggccgtagacagctccccccatttcttcattgagttttgcatggccatcacacaggttagttrggtttaggtcaagggctgaccatacttctaggtcttttgctagtaagttcaagttagaattagtgacagaatcataggaattttcagagatcctctaytaagatttcttaaaactgcagaccctgcttttgyttttgtactggttaaaactatacattcagattgctatgttcctattttctataatagtttgtctattttacaataaactagttgttaagasccyyamhvvhrwrawamrrwmtctgagttaagtgttttcagtatacaagctttctttccacatcttatcctttctgatgaccctcggatttatggaaatgtgttttatgcatacacatggtatgtaatatattaatatatattctgttccctttt

SEQ ID NO: 1816 - DNA, 3631 bp, Rattus norvegicus
cctgggcgagtggcagggtgtccccaggagccggaaggcaaacagagataccctctgaaagccaagcagagaacattaaggaagaaaggaggaatgagcctgggtctggtgcggtgaaaagagacgcattaaggaaaggggaactcacaacccagacgctccactgccagccttgccatcagcatgagaacttaccggtacttcttgctgctcttttgggtcggccagccctacccaactttctcaaacccgttatctaaaaggactagtggcttcccagcaaagaggagggccctggagctctctgccaacagcaggaatgagctgagccgttcaaaaaggagttggatgtggaatcagttcttcctcctggaggaatacacgggatcagattatcagtacgtcggcaagttacattcagaccaggatagaggagatggatcacttaaatatatcctttcaggagatggagcgggagatctcttcattatcaatgaaaacacaggcgacatacaagccaccaagaggctggacagggaagagaaacccgtttacatccttcgagcccaagctatcaacagaaggacagggagacccgtcgagcctgagtctgaattcatcatcaagatccatgacatcaatgataatgagccaatattcaccaaggatgtttacacagccacagtccccgagatggcagatgtcggaacatttgtagtccaagtcacagcaactgatgccgatgacccgacgtacgggaacagtgctaaagtcgtgtacagcatcctgcagggacagccctacttttcagtggagtcggaaacaggtatcatcaagacagcgttgctcaacatggatcgagaaaacagagagcagtaccaagtggtgattcaggccaaggacatgggcggccagatgggaggactgtcggggaccacgaccgtgaacatcacactgacagatgtcaatgacaatcctcctcgcttcccccagagtacctatcagtttaagactcccgagtcttctccaccaggaacaccaattggcaggatcaaagccagtgatgctgatgtgggagaaaatgcagagatcgagtacagcatcacagacggtgagggacatgatatgtttgacgtcatcaccgaccaggaaacccaggaagggattataactgtcaaaaagctcttggattttgaaaagaagagagtgtacaccctcaaggtggaagcctccaatccccacatcgaaccccgatttctctacctgggtccgttcaaagactcggccacagtgagaatcgtggtagatgacgtagatgaacctcctgtcttcagcaaaccggcctacatcctacagatacgagaggatgctcagataaacacaaccataggctctgtcgcagctcaggatcctgacgctgccaggaatcctgtcaagtactcggtggatagacacacagatatggacaggatattcaacattgattctggaaatggctccatttttacatcaaaacttctcgaccgggaaacgctgttgtggcataacatcacagtgatagcaacggagattaataatccaaagcaaagcagccgcgtgcctctatatattaaagttctcgacgtcaatgacaatgccccagaatttgctgagttctatgaaacttttgtctgtgaaaaagcaaaggcggatcagctgattcagaccctgcacgctgttgacaaggatgatccttacagtggacaccaattctccttctctttggccccagaagcagccagtggctctaattttaccatacaagacaacaaagacaacactgcagggatcctaactcggaaaaatggctataacagacacgagatgagcacttatctcctgccggtggtcatttcagacaacgactacccagtccaaagcagcactgggacagtgactgtccgggtctgtgcatgtgaccaccatggaaacatgcagtcctgccacgccgaggccctcatccaccccacagggctgagcacaggggctctggtggccatccttctgtgcatcgtgatcctactagtgacagtggtgctgttcgcagctctgaggcggcagcgaaagaaagagcctttgatcatttccaaagaggacatcagagacaacattgtcagttacaacgacgaaggtggcggagaggaagacacccaggcctttgatatcggaaccctgaggaaccctaagccatggagacagcaatcgcgcagggacatkgtgcctgaagctctttttctaccacggcggactccaacagctcgtgacaacacggatgtcagagatttcattagccaaaggttaaggaaaatgaacacggacccaacagcccctccctacgactccttggccacctatgcctacgaaggcactggctcggtggccgactccctgagctcactagaatcagtgaccacagatggagaccaagattatgrctatttgagtgactggggccctcggttcaaaaagctggcagatatgtacggagggatggacagtgacaaagactcctaatctgttgccttttcattttccaatatgacactggaatatgtgacgtggctattcctttctatttatccactattccgtgaggggttctccgttgtacccgttccaaaagtcaatggctgcagtccgtgtggatccaatgttagagacttttttctagtacacttttatgagcttctaagaggcaaatttttattttttagttcatgcagttaaccaagttagcccagcaggcacgctgcgggaggagaggaaggaacggcgtttttcccgtgttccccttagagcaggttggccacgccccttactgctggcctagactctactttggttcacggcctccattccgctgaatgctccaaatgtacatttcacatgctacacatgctaatgaagaagggatcatactttgatgattaaaaatatagttttagtatttaaaaggggggagggaacaattgggaaattgatcctggtctatcagttgtcaaggagataattaactgtgaaggggtttgtaaggatatgcgtgtgtcaaggaatataaagtggggcatcytgtctgtgctggaaggggtgtttctggcatcaacaaatactcgtaatgctgaatccttccatgttctaagatggcttagaagcaaatcaagtggtatcatgttcaaagacagtaacgaaagacagggctgtgttccctgacgagattttgttgcatgtgataaacagatgcttcaccatcatgccaaacaaaggaaaaargagaaatagctttacaaaaaaaaattaacaaaggacatatttagggaatttcaaggttttgtactaccaacagtatcccgggtcccttcattctttcaactatcagtaaactaatgagaagtaggtctaatcatataagcgtccttgagagaatttcctgaggcaaatgttaactctttgtctgtagttgttgttactattatcctactatacctgagtgtagcagtgtgaagtacaataattcatattcttcaaaaaaagaaaaaaaaaggatccgcggccgccgaattcagcttggacttaaccaggctggaacttgcta

SEQ ID NO: 1817 - DNA, 10170 bp, Rattus norvegicus
ggcgcgtcggtggtggcgctgcgcttgggttacccgagctgacgtggcttagattgggcggggggcgtccggagttgtctgggacggccacctacagtgcttgaagaggtcagaaaaggacatcagatcctctaggactagagttacggacagttgtgagcagccacgtggatactgagaggcgaaccctaggccctctggaagagcagctggtgctcttaacctckgacsarsyswgcwgacsysrctgtkrgkcrkkkkkctccgtksycwkggassgcymcttcagagatgctgagccgattatcgggattagcaaataatgttttgcatgaattatcaggagattacactggctggactacaatgacttcctcggaagctgaattaccccagggttctgccatggaattgaataatagtacccaaaaggacgttctggatcgcctggctgatgcagagaagttagtgctggagctaaaggatatcatcagtaagcaggatgctcagctccagcaaaaggacgaagctctgcaggaagaaaaaaaaggagctgaaagcaaaattaaaaaaataaaacttcatgcaaaggccaagatcacgtccttgaacaaamaaawaraaraattgaagacacaaggaggagctgcctcgcctccagaagtgcaggcagaggagctctccaagcatgataagagttcaacagaagaggagatggaggtagaaaaaataaaacatgaactccaggagaaggagaaattaattagcaatttgcaagcccagctggaccaggcgcagtcagaacaagcctcccagttggataagagttctgcggagatggaggacttcatcctgatgaggcagaagctccaagagaaggaggaactcatcggcgctttgcaaacgcagctcagccagacacaggcagagcaagctgcccagaaattgagggtgatgcagaggaagcttgaggaacacgaagaagccttgctgggccgagctcaggttgtggacctgctacagaaggagctgacttctgcagaacagaggaaccaggatctttcacagcagttgcagctgttggaggctgaacacagtactttaaggaataccatggaagcagaaagacaggagtccaagatcctgatggaaaaggtagaactcgaaatggcagagaggaaggaagagctgtatcagcttcagggacagttggagcgagcaggccaagcccaggctgagctggagatgcagtacggtactctccagcaaagacatgagacagaaatggaggagaagacagcttgcatttcgcttcttcagaagaacgagcaggagctgcagtctgcctgtgacgctctgaaggaggaaaactccaagctgcttcaggagcagcaggaacaggctgccaagtcagcccaggccctgcagcagctggaagatgaactccagcaaaaatctaaagaaattagccaatttgtaaacaaaccaaacttggaaaaacatgagacatcatctcagacgtctttaccagatgtttataatgagggcgtacaggcagtcatggaggagagtgtcgcctctttacagaagagagtactagagctagagaatgagaagggagccttgctccttagttctctagagctggaggagctgagagctgagaacgaaaaactctgttctcggattactcttctggaggctcagaatagagcaggagaggctgatggtatggtctgtgaggtcagcacagctggtattgctttgctcaacaggagcgactcttctactgaagaaagtggacaggatgtcctagagaacacattttctcagaaacataaagagctgtcggttttattagtggaaatgaaggaagcccaggaggaaattgcatttcttaagtcgcagctgcagggcaaaaggcctgaaggggactatgaggtccttgatcggaaagaagtacagatgatggagagtgaaggactgccctcagttacagcacgagatgtcctctgtgcgccccgtgacaagaacagtgtcccagcagtggaaggggaacaggcaggcatgagagatcagcacggaacattggaggcgggacctctaaatgacaccggaatggaactgaactccccacagccggacggtgtggacaaatccctctctgcaccacatgtctgtctgtgtcaccagggtgaactggaaaggctgaaaactcaagttttggagcttgagacaagccttcatacagccaaggaaactcatgagaagaatttaagtgagaaagcgaaggaaattagcagcctaacccagcttaccaaggagttcaaagagagtgcggaggaagcccgcagcacgctcactgctgtgtgtgaagaaagagaccagctgctttaccgggtgaaggagcttgatgtccttggagaactccgggctcaggtccgagaactggaaaccagccttgcagaagcagagaagcaaagaggtctggactatgaaagtcagagggctcagcacaacctgctcaccgagcagatccacagcctaagcatagaagccaaatctaaagatgtgaaaatcgagactttacaaagagagctggatggtgtgcaactacaattttctgaacagggaacacagataaaaagcctacagagccaactgcagacgaaggaaagtgaagtgctagagggggcagagcgtatgaaggacatctcaaaagaaatggaagaactgtcgcaggcgctttcacagaaggagctggaaatagcccaaatggaccaactcttgttagagaaaaagaaagatgtggagacactccagcaaaccatccaggagaaggatcagcaagtgactgaactcagcttcagtatgacagagaaaatggttcagcttaatgaagagaagttttctcttggggtagaaattaagactctgaaggagcagctcagtttattgtccagagctgaaggagcaaagagagagcaggtagaagacagtggagctgagtccagccctaaacatggtccacatgagtcgagcgcagaggagccagtgtgtaaagaggcactacagcaagaacttgagtggctgaggaaagagagtgagcagaggaagcggaaactgcaggcagcgctgatcagcagaaaggagctactgcagaaagtcagcaagctggaggaggagttagccaaggtgagagaggagtccacaaaagactccctcagggagagtgagaagagagagctggaggaagacagcaagaacaaagatgacccagaaaagtatgggacttctgagtggagagaactagaggtttctttaagactgacaatatctgaaaaggaagtggaactggagggcataaggagggacttaaaagaaaaggcagcagcagaagaagagttacaggccttggtccaacggatgactcaggacctgcagaataagacaaagcagatagacttgcttcaagaagagatcactgaaaaccaagcaactattcagaaattcatcacaggcaccatggatgctggggatggagactcagcagtaaaggaaacctcggtgagcagcccaccccgtgcagggggtggggagcactggaagccggagctggagggaaagatagtagacctggaaaaagaaaagactcaacttcaaaagaagcttcaagaagccttaatttcccgtaaggcaattctaaaaaaggcacaagagaaagagaaacatctgaaggaagagctcaaggagcagaaggatgcttaccgtcacctacaggaacagtttgatgggcagagtaaggaaaatgagaacattcgggccccgctaaggcaactccaagcaaaggagtctacagaccagcagctcccaggcactggccagcaggagcccactcacggttcagaaggcctttcactcgaaggcacagagcctgcttcagagtctgacttacacgcagctcagccttcgcaccctggagagacagcaactctccaggctaccgtttctgttgcccagattcaggaccagctgaaagaaattgaggttgagaaagaagagctggaattgaaaattagttctacaacaagtgagctgaccaaaaaatctgaagaagtattactactacaagaacagatcaatgaacagggcttagaaatccagaatttgaaggcagcgtcccacgaagccaaggcccacacagaacagctgaagcaagaattggaaagcagccaattgaaaattgctgacctggaacatctgaaaacattacagcctgaactagaaacactgcaaaagcacgtgggccagaaggaagaagaggtcagctaccttgttggacagcttggtgagaaggagcagaccctcaccaccgtacagacagaaatggaggagcaggagcgtttaatcaaggccctgcacacacagctggaaatgcaagccaaggagcatgaggagaggctaaagcaggtccaggtggaaatttgtgagctaaagaagcagccaaaagagcttgaggaagaaagtaaggcaaaacagcaattacagaggaaactgcaggctgccctcatctcccggaaggaggccctcaaggaaaacaagagtctgcaggagcagttgtcctcggccagagatgctgttgaacatctgaccaaatctctggcagatgtagagagccaggtttctgttcagaatcaagagaaagatgcactcctaggaaagttagcccttcttcaggaagaaagggacaaactcattgtagaaatggacaagtctttactggaaaatcagagccttggtggctcttgtgaaagcctgaagctagctctcgggggcctcactgaagacaaggaaaagctgatgaaggagctggaatccgtgagatgttctaagattgcagagagcaccgaatggcaagagaagcacaaggagctacagaaagagtatgaagttcttctgcagtcctacgagaatgtgagcaatgaggcagagaggattcaacacgtggtggagagcgtgaggcaagagaagcaggaggtgtacgcaaagttaaggagcgcagagtcagacaagagagagagagagaagcagctgcaggatgcagaacaggaaatggaggagatgaaggagaagatgagaaagtttgccaaatctaagcagcagaagatccttgagctagaggaagaaaacgaccgacttagagcagaggcccagcctgtaggaggagccaatgaaagcatggaagctcttctttcttccaatgccagcttaaaggaggaactagaaaggatcacattggagtataaaaccctttctaaggaatttgaggctttaatggcagagaagaacactctgagtgaagagactcgtaatctgaagcttcaggtagaagctcaggaactgaaacaagctagcctcgagaccaccgagaagtctgatgagccaaaggatgtcatcgaagaggtaacagaagccgtggtaggcaagtctcaagaacaagattccctgagtgaaaatgccaagcttgaagatgcagaagctactctcttggctaacagtgccaagcctggtgtcagtgagactttcagctcacacgatgacatcaataactacctccagcagcttgatcagcttaaaggaagaattgctgagttagagatggagaaacagaaagacagggagcttagccagactttggaaaatgaaaaaaatgccctactgactcagatatctgcaaaggatagtgagctcaagctcctggaggaagaggttgccaaaataaacatgctgaatcagcaaatccaagaggagctctccagagtcaccaagctgaaagagacagcagaggaggagaaagatgacttagaagagaggctgatgaatcaactggcggaacttaatgggagcatcgggaattattaccaggatgttacagacgcccaaataaagaacgagcaactagagtcagaaatgcagaaccttaaaagatgtgtgagtgaattagaagaagaaaagcagcagctggtcaaggaaaaaaccaaggtggagtcagaaatacgaaaagagtacatggaaaagatacaaggtgcccagaagggacctggcagtaaaatccacgccaaagagctacaggagctgctcaaggaaaaacagcaagaagtgaagcaactgcagaaggactgcatccggtacctcggcaggatcagtgccctggagaagaccgtcaaggccctcgagtttgttcacactgaatcccaaaaggatttggatgcaaccaaaggaaatctggctcaggccgttgaacaccacaagaaggcacaggccgagttatccagcttcaagatactgctagatgacacccaaagcgaagcagcaagagtgctagcggacaacctcaagttgaaaaaggagcttcagtcaaacaaagagtccatcaaaagccagataaaacaaaaagacgaagacctcttgcgaagactggagcaagcagaagagaaacaccgaaaagagaagaagaacatgcaagagaagctggatgctttgcacagagaaaaagcccatgtggaagacacgcttgccgagattcaagtcagtctgaccaggaaagacaaggacatgaaggagctgcagcaaagcctggacagcaccttggcccagcttgcggccttcactaagagcatgtcgtccctccaggatgaccgggacagggtgatcgatgaagccaagaaatgggagcagaggttcggtgatgccattcagaccaaagaggaggaggtcagactcaaagaggagaactgcactgctctaaaggatcagctccgacaaatgaccatccacatggaggaactgaagatcaccgtgtccaggcttgaacatgacaaggaaatttgggagtccaaggcccagaccgagctccagcatcaacagaaggcttatgataagctgcaagaagaaaataaagaacttatgtcacagttagaagaagctggacagctgtaccatgattctaagaatgaattaactaagttggaatcagaacttaagagtctcaaagaccaatcaactgacttaaagaactctttagaaaaatgcagagaacacgaaaacaacttggaagggatcatcaagcagcaagaagctgacatccagaattgtaagttcaattgtgaacaactagagactgacctgacagcctccagagagctaaccactcggctgcatgatgaaatcaatgtgaaggaacagaagattataagcctgctttctggcaaggaagaggcgatccaagtagctatcgcagaactgcaccaacagcacagtaaagagatcaaagaattagaaaacctgttgtcccaggaggaagaggagaatttgaccttagaagaggaaaacaaaagggctgttgagaaaaccaaccagctcacagaagcactagaaaccatcaagaaggagagccttgagcagaaggctcagttggattcctttgttaagtccatgtcctctcttcaggacgaccgggaccgcatagtaagtgactaccgacagctggaagagcggcacctttctgtgatcttggaaaaggacgagctcatccaagatgctgctgctgagaataataaactgaaggaggagattcgagggctgcgaggtcacatggatgacctcaactctgagaatgccaagctggatgctgaactgatccagtataggcgggacctgaatgaagtgatcaccataaaggactcgcagcaaaggcagctccttgaggctcagctgcagcagaacaaagagctgagaaatgagtgtgtaaagctagaaggaaggctgaaggggtcagaggcagagaagcagagcctgcagatgtccttggacgccctccaggaggagaatcaaggtttgtctaaagagatcaaaagcttcaaggagcagttgacggccttgcacgaggaaggtgccctagctgtctaccatgcccaactgagagtaagagaggaagaagttcagaagttaactgcggctctctcctcctctcagaagagaactgtggatctgcaagaggagttggtttgtgtccagaaggaggcaagcaagaaggtgagtgagattgaagataagctgaagagggagctgaagcatctccatcacaacgcagggataatgcggaacgaaacagagacagcagaagagagggtggcagagctggccagagacctcgtcgagatggaacagaagttgcttacggtaaccaaagagaataaggatcttacggcacagattcaggccttcggaaagtcgatgagttccttgcaggacagcagagatcatgccactgaggagctgagtgacctgaagaagaagtatgatgccagtctgaaagagctggctcagctgaaagggcggcaggacttaggcagagagagtgacgttctttcccaggctgcctttcccctgaccacctctgaaaacatctcgtcccgccttgagaaactgaaccagcagctcatatccaaagacgagcaattgcttcacttatcttcagaactagaaagttctcacaaccaagtgcagtccttcaccaaggccatgaccagcctacagaatgagagagatcacctgtggaatgagctggagaaattccggaagtcggaggaagggaagcagaggtctgcagccccttcagctgcctccagcccagcagaagtacagagcttgaaaaaagccatgtcttcactccagaatgacagagatcgattgctgaaggaactgaagaatctacaacagcagtacttacagatgaaccaagagatcaccgagctccgtccgctgaaggctcagcttcaggaatctcaagatcagaccaaagccctgcagatgatgaaggaggagctcaggcaggaaaacctctcctggcagcacgagctcgatcagctcagagtggagaagaactcttgggagctgcatgagagaagaatgaaggaacagtaccttatggccatctcagataaagatcagcagcttggccacctgcagaatctcctgagggaactgaggtcttcctcccagactcagattctccccacacagtaccagcgacaggcgtcctcagggacatcagctgccctcgacgggtcacaaaacctagtttatgaaacagactgtctcaggacccagctcaatgacagcttaaaggaaatccatcagaaggagctaagaattcagcaactgaacagcaagttctctcagctgcttgaggagaagaacatcctctccacccagctcagggacgccaaccagagtctccgtgacagccagcatcactacagtaacctcttcaaccactgtgccatcctggaraggcaggtgcagcagctgcaggctacggggccactaaatgcagatgttgctccaggagcaccccaggaaaaggatgggattcacataaagactgaaactgagaccacaggggaggaacagccaagcttttctgaagtccagcagcagctgtgcaacactaaacacgatctgagcgagctaaagaagctgctggaagaagagcgagaccaaagactgaccgccgaaaatgcactctccctggccaaggagcagatcagacggttggagcatagcgagtgggagtcagcccggaccccaatcattggcgcctgtggctctcaggagcaggtgctgttgatggatctcccaggcagtagctgtcggaggacccggagcagtgctggatggaagcgggttctgcgttctctctgccgttcccggacccgcgtgccactgctcgcagccatctacttcctaatgattcatgttttactggttctgtgtttcacgggtcacctataaacttgttacttgamaamwmwmrmamwwrwaattccttatctgtagtgtcaggattgttgatcccagggcggcctctcgctttgagcccaccctcttggaaagtgcctgtgaaaagaggtggctgtgaggacaggcggcggtaagctggcctgccacatccgctctccttaaacacgtcggcttctgagatgtgccgtgttcactgcttcttcagatgatgcagatccacatcccgtgtggccttgcaggatgctgagagaggctttctagccgtgccaacaagatggttccaataaacacagtaatctggaatcc

SEQ ID NO: 1818 - DNA, 2637 bp, Rattus norvegicus
agggtggggtctcacagactgcctaggcggggaactgctttctctttctgcagatatgctgtggatcatggctgtcctgcctctggtgcttgctggccccgagttaaatgttcgaatgcaagggactgatagcatctytgagggtttggagttgaagaggagcgttcgtgaaaccgacaacaactgctcagaagggttatatcaagtgggcccattttgctgtcaaccgtgtcagcctggtgaacgaaaagttaaggactgcacaacaagtggaggtgcaccaacctgccatccgtgcacagaaggggaggagtacacggacaggaaacactattctgataaatgcagaaggtgcgccttctgtgatgaagggcatggkttagaagtggaaacsaactgcmcccggacccakaataccaagtgcaggkgcaaaraaaacttytattgcaatgcttytytytgygaccactgttatcactgcacctsgkgtggacttgaaracatccttgagccttgcmcacgaaccagcamcaccaaatgcaagaaacaaagttccaattataagctcctttggctgctgatcctccccggtttggcaatwctattkgtgttcatwtataaaaggyaccggaagaggcaacctggygaccctgawtctggaatcccaagtcctgaaagkgygccaatgaatgtctcagatgttaacttgaataaatacatctggagaactgccgaaaaaatgaaaatctgtgacgctaaaaaatttgctcggcagcacaagatcccggaaagcaagatcgatgagatcgagcacaacagcccccaagatgcagctgagcagaaaatccagctgctccagtgctggtatcaatctcacgggaagactggtgcgtgtcaagctttaatccagggtctcagaaaagctaaccgctgcgacatcgcagaggaaattcaagccatggtctggraggaccatgaaaactcaatctcaaacagcagaaatgaaaatgaaggacaaagtcykgagtgaaaactacctcggttccagccacraagagaggagagagcctgccacctatgacrggcaccaaaatgaaagccaactgcatcgacaaccggcaattcctggcgtgttctttttgccagcaaatggtagcctgtgctcagcgagggtccaatgacctgcaggttccagagattacatctgttattctgcacaggaaccgtttcctcagtctcatttcctcagtcttccgctattttgtgacttttacgttcaaacctccatggaagtcatgctaaatgtgaattggaatccgcagtgtttgtgtttatgttcataatactgtgaactgaggcgtcttataaacggaaacaaagaccttcctctggtggattgttcttttcctctctatatggaaatgtggaatagaagaaatactttttaaattaacgtatcgtttttgcatttctagttgcctattatagaaatgtgtaatagaagaaataatgttttaaattaacctatcgttttttgcatttctagttgcctgttatggaaatgcaaaatagaagaaatactttttaaattaagatatcgtttttgtatttctagttgcctgttgttttcttgttattttacttttctttactctaatgacccaccaaacattgtctgctcaatgagtcgttaaaggtggatttgatctcttagggggaacctttgcaaagcctttccacagttaagtggttcattccgtgactgctactgtggagaagactttagctgggcagatgtctgatattcttaaggaatctcactaccatgatctcaaaagtgcatgtaagtagaaagagtacacgtcttggggatttgcctacaattttctttgagggatgaccgtcttggctgtcccgtccagcttctagttggaaagaaccgaaggacaaacccagtagcgttcagcgatgaaactcccatgtttaaaggtgaaattaaacatgagaacatcctgtgcctactttgaggagtttgaacttgaaccaagaactttgagtcccttttacaaagcttcgtacttgaggatgtgagtcttttccccytggcttcacccagaggctssaggaatgactgactgctctgacatcaataatcatggctgtgttctggacttaaagtgacttctagttccaaagttaccttggcttagtgattgcatctcgtttgtggtagacatcatgagcagggatacactcaaatatcacttacaggctgcagaaaaaaaaagactatctacaaaaggaggacagagaccctgcgggccttgcatacttaaacatctagacattctttgttagcacctaaggagtcctctggtatttgaccaggtcctgtgcagtgccacattgttaatttctgcgtagtgatctarawrwrmarwrwmwrmaattatttcccatgctctcttctgaatggaaatttatctgcattagaattttataccaggagctgggaggtaactcagtagtaaattaccttcaagcaaaamwmrwrmmraawwgaatttatagcgccccagcgagttccgtgggcctggagcctgctggaagcggaacggtaaattcgatatcaagctt

SEQ ID NO: 1819 - DNA, 1420 bp, Rattus norvegicus
crgccgcagcagccatcaggcgagggcgtcccgctcccgyccctttatgcaaatccacgacgtcacctcgagccaatggcgagcgtgggcggtgagctcatcgcgggggccgaggctataagagtgcgcrcgggcggcgcggggcaragcggscggcatcggasccggtctgtacgggcagcggactggggggcatacrgggccccccggggaggccgcggccactccccccgcsccggggccgagcgckgcgggggaggcggrgatggaaacgcccttctatggcgaggaggcgctgarcggcctggctgcrggtgcgtcgagcgtcgctggtgctgctggggcccccrgcggtggtggcttcrcgcccccggkccgcgctttccccggggcgcccccaacgagcagcatgctgaagaaagacgcgctgacgctcagcctggcggagcagggagcggcgggattgaaaccagggtcggccactgcaccttmtgcattgcgccccgacggcgccccygacgggctgctggcttcgccskmkytysgrmtkctyaaactcgcgtcgccggagctggaaaggctgatcatccagtccaacgggctggtgaccaccaccccgaccagyacgcagttcctctaccstaaggtgrcggccagcgaggagcaggagttcgccgaaggcttmgtcaagsckctggaggacctgcacaagcagagccagctgggtgcggccaccgcggccacctcaggggctcccgcgccccccgcgcccgcggacctggcagccacccccggggccacggagaccccggtctacgccaacctgagcagtttcgcgggtggcgccgggccccctgggggcgcggccacagtggccttcgccgcggagccagtgcccttcccgccgcccccgggcgcgctggggccgccgccacctccgcatccaccgcgtctggccgcgctcaaggacgagccgcagaccgtgccggacgtgccgagcttcggcgacagccctccactgtcgcccatcgacatggacacgcaggaacgcatcaaggcggagcgcaagaggctgcgcaaccgcatcgccgcttccaaatgccgcaagcgcaagctggagcgtatctcgcgcctggaggagaaagtcaagaccctcaaaagccagaacaccgagctggcgtccaccgcgagcctgctgcgcgagcaggtggcgcagctcaaacagaaagtcctcagccacgtcaacagcggctgccagctgctgccccagcaccaggtccccgcgtattgagcccgagcgcgggacgcatgcgcggactagatgcggtggggggggcgccccggactctttcgagactcggtgcccccggactcgacaagctggacccccctttactctggatggggaccccgagcgcac

SEQ ID NO: 1820 - DNA, 3238 bp, Rattus norvegicus
ggtacccaacagcctgaactcagagccccgagagcagagcattcagggcaagcagaaacaccctgcagaggctttccaagaatccctcggcatggcaagacaaggctgtctcgggtcattccaggtaatatccttgttcacttttgccatcagtgtcaatatctgcttaggattcacagcaagtcgaattaagagggcagaatgggatgaaggacctcccacagtgctgtctgactctccatggaccaacacctctggatcctgcaaaggtagatgctttgagcttcaagaggttggccctccagactgtcggtgtgacaacctgtgtaagagctacagcagctgctgccacgatttcgatgagctctgtttgaaaacagtccgaggctgggagtgcaccaaagacagaagtggggaagtacgaaacgaggaaaatgcctgtcactgcccagaagactgcttgtccaggggagactgctgtaccaactaccaagtggtctgcaaaggagaatcacactgggtagatgatgctgmgagaaatcaaagttccgaatgcctgcaggtttgtccgcctccgttaatcatcttctctgtggatggtttccgtgcatcatacatgaagaaaggcagcaaggttatgcccaacattgagaaactgcggtcctgtggcacccatgyyccctacaygaggcctgtgtaccccacaaaaaccttccctaatctatatacgctggccactggtttatatccggaatcccatggaattgtcggtaattcaatgtatgatcctgtctttgatgcttcgttccatctacgagggcgagagaagtttaatcataggtggtggggaggccaaccgctatggattacagccaccaagcaaggggtgagagctggaacattcttttggtctgtgagcatccctcatgaacggaggatcctaaccattcttcagtggctttctctgccagacaacgagaggccttcagtttatgccttctactcagagcagcctgatttttctggacacaagtacggcccttttggccctgagatgacaaatcctctgagggagattgacaagaccgtggggcagttaatggatggactgaaacaactcaggctgcatcgctgtgtgaacgttatctttgttggagaccatggaatggaagatgtgacatgtgacagaactgagttcttgagcaactatctgactaatgtggatgacattactttagtgcctggaactctgggaagaattcgagccaaatctatcaataattctaaatatgaccctaaaaccattattgctaacctcacgtgcaaaaaaccggatcagcactttaagccttacatgaaacagcaccttcccaaacggttgcactatgccaacaacagaagaattgaagacatccatttattggtcgatcgaagatggcatgttgcaaggaaacctttggacgtttataagaaaccatcaggaaaatgttttttccagggtgaccacggctttgataacaaggtcaatagcatgcagactgttttcgtaggttatggcccaacttttaagtacaggactaaagtgcctccatttgaaaacattgaactttacaatgttatgtgcgatctcctaggcttgaagcccgctcccaataatggaactcatggaagcttgaatcacctactgcgtacaaatacctttaggccaaccatgccagacgaagtcagccgacctaactacccagggattatgtaccttcagtccgagtttgacctgggctgcacctgtgacgataaggtagagccaaagaacaaattggaagaactcaataaacgtcttcataccaaaggatcaacagaagctgaaaccgggaaattcagaggcagcaaacatgaaaacaagaaaaaccttaatggaagtgttgaacctagaaaagagagacatctcctgtatggacggcctgcagtgctctatcggactagctatgatatcttataccatacggactttgaaagtggttatagtgaaatattcttaatgcctctctggacatcgtataccatttctaagcaggctgaggtctccagcatcccagaacacctgaccaactgtgttcgtcctgatgtccgtgtgtctccaggattcagtcagaactgtttagcttataaaaatgataaacagatgtcatatggattcctttttcctccctacctgagctcctccccagaagctaagtatgatgcattcctcgtaaccaacatggttccaatgtaccccgccttcaaacgtgtttgggcttatttccaaagggttttggtgaagaaatatgcttcagaaaggaatggagtcaacgtaataagtggaccgatttttgactacaattacgatggcctacgtgacactgaagatgaarttaaacagtatgtkgaaggcagctctatacctgtccccacccactactacagcatcatcaccagctgcctggacttcactcagcctgcagacaagtgtgamggtcccctctctgtgwcttccttcatccttcctcaccgacccgacaatgatgagagctgtaatagctccgaggatgagtcgaagtgggtagaggaactcatgaagatgcacacagctcgggtgcgggacattgagcacctcaytggtytggatttctaccggaagactasccgtagctattcggaaattctgaccctcaagacatacctgcatacatatgagagcgagatttaactttytgggcctgggcagtgtagtmttagcaactggtgtatatttttatattgtgtttgtatttattaatttgaaccaggacacaaacaaacaaaraaamaaamaaataaaaaaaaaaaccacttagtattttaatcctgtaccaaatctgacatattaagctgaatgackgyrckaktttttttccttaattcttgatttagacagagttgtgttytgagcagagtttatagtgaacactgaggctcacaatccaagtagaagctacgtggatctacaaggtgctgcaggttgaaaatttgcattgaggaaatattagttttccagggcacagtcaccacgtrtagttctgttctgttttgaaagaytgattttgtaaaggtgcattcatstgctgttaactttgacagacatatttatgccttatagaccrakcttaaatataataartyacacattcagatttwmhmwraaaaaaaaaaaaaaaaa

SEQ ID NO: 1821 - DNA, 1400 bp, Rattus norvegicus
ccggttttttaaaagagactttcttggccaggtggaatttaatctcacccaagggatggtgaaaattgtgagggaaagggctgccgtgctcacccgggcccccaggtcctccgagtgtccggcccgctttccgtcagggttcccgggccccgctcccgggggcctgagccgccctactagcgctccatggagaacttccaaaaggtggagaagattggagagggcacgtacggagtggtgtacaaagccaaaaacaagttgacgggagaagttgtggcgcttaagaaaatccggctcgacactgagactgaaggtgtgcccagtactgccatccgagagatctccctccttaaggagctcaatcaccctaacatcgtcaagctgctggatgtcatccacacagaaaataagctttatctggtctttgaattcctgcaccaggacctcaagaagtttatggatgcttctgctctcactggacttcctcttcccctcatcaagagctatctgttccagctgctccagggcctagcattctgccattctcaccgtgtcctgcaccgagaccttaagccccagaacctgcttatcaacgcagaggggtccatcaagctggctgactttggactagcaagagcctttggagtccctgtccgtacttacactcatgaggtggtgaccctctggtaccgagcaccggagattcttctgggctgcaagtactactccacagccgtggacatctggagcctgggctgcatctttgccgaaatggtgacccgcagggccctattccctggagactctgagattgaccaactcttccggatctttcggactctggggaccccagatgaggtggtttggccaggagttacttctatgcctgattataagccaagtttccccaagtgggctcggcaggattttagcaaggttgtgcctcccctggatgaagacggacggagcttgttatctcaaatgctgcactatgaccccaacaagcggatttcagccaaagcagccctggctcaccctttcttccaggatgtgactaaaccagtgccccaccttcgactctgatgtccttcccaaagccctcttcacctgtggtctgacctgatcctgggccttttggacacaggtcagccttctgctgttttctggctgtcttagccttttctctccggttctggggattcagaggtgcagagaaggattaggtgaaaagggagaaagttttggcattagatgcacttaacccgacttccagcttctctcctcttcccagtcatcactgagaaggattagtattgaagcaaactgcaagtctccagtgtcagattgcatcactagctgctatagtacggtaggatgcagtctgtgcatgttttaactat

SEQ ID NO: 1822 - DNA, 1360 bp, Rattus norvegicus
ctggagaagacggaaacaaaagacagaaacacacgcacacggggaactgggagttgactggcagatcccagctgccctgaggatggtggccagcggtggacgtcctgatggtcccccttctatcacccccgagagccctctcattgtaggtggcagagagtggcagggtatggcaggttcttgctggaacatcacctacgttcaagactcggtaggacctgccaccagcaccctgatgtttgtggctggtgtggtgggcaacgggctagcactgggcatcctgggtgcccgacggaggtcacacccatcggcgtttgcagtgttggtcactgggctggcagtgacggatctgctgggcacgtgcttcttgagccccgcggtgtttgtggcctatgctcgaaacagctctttgctgggcctggcccacggtgggacgatgctgtgtgacactttcgccttcgctatgactttcttcggcctggcctccacgctcatcctcttcgccatggctgtggagcggtgcctggctctcagtcatccctacctgtacgcccagctggacgggccccgctgtgcccgcttggctttgcctgccatctacgctttctgttgtctcttctgctcactgcccctgctgggcctgggcgagcaccagcagtattgtcccgggagctggtgcttcatccgcatgcgttccccccagcctggtggctgtgccttctccctggcctatgccagtctcatggccctgctggtgacctccatcttcttctgcaacggctccgtcactctcagcctctgtcacatgtaccgccaacagagacggcaccatggctcgtttgtgccgacctctcgggcacgagaggatgaagtttaccacctgattctgctggccctcatgacaggcatcatggccgtatgctccctgcctctcacgatcagaggattcacgcaggccatcgccccagacagcagagagatgggggacctccacgccttccgttttaatgccttcaaccccatcctggacccctgggtcttcatccttttccgaaaggctgtcttccaacgcctcaagttctggttgtgttgtctgtgtgcccgttctgtccatggggatctgcagacgcccctctcccggcccgtgtcggggagaagagacacactggctcccgattctctccaggctaaggaagggaactgggtgcccctgtcaacctggggtacggggcaggtggcaccattgactgctgtgcctctgtctggtggtgatggctgttctgtgggaatgccatccaaaacagaggctgtggttgcctgctccctctgctgatacctaagctggtcctgcttgccatcc

SEQ ID NO: 1823 - DNA, 1617 bp, Rattus norvegicus
gaattccctgggttaccccggtgtgtgggggccacggataccatgaacgacgtagccattgtgaaggagggctggctgcacaaacgaggggaatatattaaaacctggcggccacgctacttcctcctcaagaatgatggcacctttattggctacaaggaacggcctcaggatgtggagcagcgcgagtccccactcaacaacttctcagtggcacaatgtcagctgatgaagacagagcggccgaggcccaacaccttcatcatccgctgcctgcagtggaccacggtcattgagcgcaccttccatgtggaaacgcctgaggagcgggaagagtggaccaccgccattcagactgtggctgatggactcaaacggcaggaggaggagacgatggacttccggtcaggttcacccagtgacaactcaggtgctgaggagatggaggtggccctggccaagcccaagcaccgtgtgaccatgaacgagtttgagtacctgaagctactgggcaagggcacctttgggaaggtgatcctggtgaaggagaaggccacaggtcgctactatgccatgaagatcctcaagaaggaggtcatcgttgccaaggatgaggttgcccacacgcttactgagaaccgtgtcctgcagaactctaggcatcccttccttacagccctcaagkactcattccagacccacgaccgcctctgmtttgtcatggagtacgccaatggrggcgagctcttcttycacctgtctcgtgagcgcgtgttttcagaggaccgggcccgcttctacggtgcggagattgtgtccgccctggactacttgcactccgagaagaacgtggtgtaccgggacctcaagctggagaacctcatgctggacaaggacgggcacatcaagataacggacttckggctgtgcaaggagggtatcaaggacggtgccaccatgaagacgttctgcgggacacccgagtacctggcccmtgaggtgctggaggacaacgactatggccgtgcagtggactggtggsggctgggcgtggtcatgtacgagatgatgtgcggccgcctgcccttctacaaccaggaccatgagaagctgttcgagctcatcctaatggaggagatccgcttcycacgcayactcgggccggaggccaagtccctgctctcggggctgctcaagaasgaccctacacagaggctcggtgggggctccgakgacgccawkgagatcatgcagcaccgcttctttgccaacatcgtgtggcaagatgtgtatgagaagaagctgagcccacctttcaagccccaggtcacctctgagaccgacaccaggtattttgatgaggagttcacagctcagatgatyaccatcacrycgcctgatyaagatgacagcatggagtgtgtggacagtkaacggrggccgcactttccccagttctcctactcagccagtggcacagcctgaggcctggggtggtggctggyakccctgcacccctctgcattgccsagtccaraagccccgcatggatymtckgtacctgatggttttgtttctcggatgtsctsgkgaggaacctcgccagcctcggaattc

SEQ ID NO: 1824 - DNA, 3065 bp, Rattus norvegicus
ccgccttgacgggctacgcaggcggtagggctgcggtaggggccgggcggcaccatggcggcggcagcgcctgctgcggcggctttaaccgaggcgccggccgtcccgggcaccgcagaacccgagacgggagacgaggacagtcgtgaggyccsagtgctgsakagcctgcscggcaggatctatgaagcaaaaaattyattgccatatcttggacccaacaaaatgcgggattgtttctgcactataaatttggaccaggaagaagtttatcgcacccakgttgttgaaaagkctttaagtccatatttcagtgaagaattttattttgagattccaagaactttccagtatttgtcattttatgtttatgataaaaatgttttacwaagagatcttcgtataggaaaagtagccatcaaaaaagaagacttgtgcagtcatagtggtaaagaaacttggttttcattgcagcctattgactcaaattcagaagttcagggaaaagttcmccttgaattaaaactgaatgaattgataacagaaaatggaactgtgtgccagcagcttgttgtacacatcaaggcatgccacgggttgcctcttatcaatggacaaagctgtgatccttacgcaacagtttccctcgtgggcccttccaggaatgaccaaaagaagacaaaagtaaagaagaaaacaagcaatccacagttcaatgaagtcttctactttgaggtaaccagatccagcagttacaccaggaagtcccagttccaggtggaggaggaagacattgagaagctggaaatcaggattgacttgtggaataatgaaaacctagttcaagatgttttcctgggggagattaaggttcctgtcaatgtgttaagaaatgattcctctcatcaagcctggtacttgctacaaccaagagacaatggaaacaagtcgtctaaacctgatgacctgggatccctcctgttaactctgtgttacacagaagactacgtgctcccatcagagtactatggacccttgaaagctttgctgctaaaatcaccagatgttcagccagtatccgcctcagctgcttatattttgggygaaatatgtcgagaccagaargatgccgttttgcccctcgtacgactgttgctgcatcacaataagcttgttccctttatcactgcggwggctgacctggacttgaaggatactcaagatgccaacgcaatatttagaggaaactccctggctacccagtgtctgactgagatgatgaagatagtgggagggcactacctgaaagtcacattgmagcctgttctggatgagatatgtgagtcctcgaaatmctgtgaaatagatcctgwtaagttgaaagagggagataatgtggagagyaataaggagaatctgywctactatgtggacaaagtattcartgcgatcgtasgatcgagygtgagctgtcccactgtgakgtgwgatattytttattctctgagacagayggctgctaagagatttcctaataaccctcatgttcagtactctgccgtgagcagctttgtgtttcttcgtttctttgctgtagcgattctgtcacctcatgcttttcatttgcgacctcattatccagatacacagacagttaggactttaactctcatctcaaaaaccattcagattattggaaactggggatgtcaatccagaagaaagtcacggttcaaaaagtcagtcatgtgtgaatttctcaaaatgtttcaagaagaaaggtattttacagacgtgaaaaagttcttggatgaaatttcgtctacggaaactaaggagtccagtggtacgagtgagcctgtgcacctgaaagaaggtgagatgtataaaagagctcaaggaagaacccgtattggaaaaaagaacttcaagaaacgatggttctgcttgacaagcaaagagctcacctaccacaaacagcaaggcaaagatgcaatttacactattccagtaaagaacattcttgctgtggaaaaactggaagaaagctctttcaacaagaaaaatatgttccaagtgatccatacggagaaaacgctgtacatccaagcgaataactgtgtggaagctaatgagtggatcgacatgctgtgcagggtgagcaggtgcaaccacaacaggctcagctccttccacccgtcagcatatctcaacggaaactggctctgctgccaggagaccagtgaaggcacaccaggctgcaagccatgcactgcaggcatccctgcagacatccagatagatattgatgaagacagagaaacagaaagaatttactccgtttttaccctcagtttacttaaactgcagaagatggaagaggcttgtgggtctatagctgtatatcaggggccacagaaagaacctggttattctaagttcaccatcgaggattctgtcgcaacctttaagacaattcagcaaataaaaagcaccatagagaaactagatgaacctcatgagaaatacaggaagaaaagatcgagtagtgcaaaatacggaagcaaggaaaatccaattgtgggaaaaatatcatagtgtttgatcaactgacggagaactggaaaatactcttatcatcaagtttttcaattcaccccatttgttccagtgtgtaagagcagacattggctttgaagacacctgctcttgcaatgtatttaatatttaatgattgaaattaactggggatcckgmyrcwrakgtgtttattactaaagaatttgaaaaccaagatttccttcatagccatgcatccaaatccatgtctctgcaacttcctttcaacagaaaggatctttctaaggaacgttcccaagaagctttgtaataagggagcacttgctagcaagaagccatctctacttggagcactcctgtgtcactcactaccatcagtgcctgccctgtgctgccaacattgagcttccagagaattccagctccttgtcagttcggaacttttcattaagttcatctggaccttcacctcgtgccgaattctt

SEQ ID NO: 1825 - DNA, 3383 bp, Rattus norvegicus
cgaacttgcggagaccttcaccagcagtggaccggtcagtctccgctggacataatcgcgccgcagtcgtcgccgtcgcggcgtcgggagcttggcaggcctcggagtcgccgccgctgacccggcgcaggcccgctgcagcctcagccgggcgcgccggatcgcacgtggcggacccgccccctgtgccagccgcgacctggacgccgccggcctgtgctcgccggtcctctgctctccggtgctccgccgtgactgcagccgggaaatgagcttcctgagccgacagcagccgccgcccacccgccgcgccgcagccgcctgcagtttgcggcagaagctcatcttctcacccggcagcgattgtgaggaggaagaggaggaggaggaggaaggcagcggccacagtacgggggaggactcggccttccaggagcctgattcgccgctgccctctgcacgcagccctgccgaggccgaggccgagcgccgccgccgctcgcccggcgcggagcccagcagcccgggagagctggaggaggacttgctgctgcggggcggcggcgggggcgcgcaagcggcgggcggaggagccgagggcgactcttgggaggaggagggtttcggctcttcgtcgcccgtcaagtcacctacgactgcctactttctgggcagctcgttctcgccggtgcgctgcggcggccctggggatgcctccccgcggggctgcggggtcccgcgagccatggacgacccctgttctccgcagcccgactacccgagcacccctccgcacaagaccttccgcaagttgcgcctgttcgacacgccgcacactcccaagagtttgctttccaaagctcgagttattgattccagctctgttaaactccggggtagttctctattcatggacactgaaaaatcaggaaaaagagaattcgacacacggcaaactcctcaagtgaatattaacccctttactccggatcctgtaatgcttcattcctcaggacagtgtcgtgggagaaagagagcatattttaatgattcctctgaagacatggaagccagtgattatgagtttgaagatgaaacaagacctgccaaaagaattacaattactgaaagcaatatgaagtcacgatatacaactgaatttcatgagctggagaaaattggttctggagaatttggttctgtgtttaaatgtgtgaagaggctagatggatgcatttatgccattaaacgatcaaaaaagccattggctggctctgttgatgaacagaatgctttgagagaagtgtatgctcatgctgtgcttggacagcatccccatgtggttcgttatttctctgcctgggcagaagatgaccatatgcttatacagaatgaatactgtaatggtgggagtttagctgacgctgtaagtgagaactacagagtcatgagctactttactgaagcagagctgaaggatctccttttgcaagttggcaggggcttgagatacatacattcaatgtctttggttcacatggatataaaacctagtaatatttttatatctcgaacctcaatcccaaatgcagtctctgaagaaggagatgaagatgactggatatccaacaaagttatgtttaaaataggtgatcttgggcatgtaacaagaatctctagtccacaagttgaagaaggtgatagtykttttytwkcwmwtkaarttttacaagagaactatagccatctaccgaaagcagatatttttgctcttgctcwcacagtcgtatgtgctgctggtgctgaaccccttcccaraaatggwgaccagtggcatgaaatccgacagggtcgattacctcsgattccacaagtgctttcccargagttgacagagttgctaaaagttatgattcatcctgatccagagagaagaccttcagcaatggtgctggtgaagcattcagtgttgctgtctgcctctagaaagagcgcagagcagttacgaatagaattgaatgctgaaaaattcaaaaattctcttttgcagaaagaactcaagaaagcccaaatggcagccaaagttgcagctgaggaacgggcactcctcacagatcggatggccactagatctaccacccagagtaatagaacttctcgacttattggaaagaaaatgaaccgctctgtcagccttactatatactgaactgcttacattccccagcccttccccctcaaaggacaaaaaaaactgtgacaagaggaagctaggttgaaatcactgctagaatccactttgcaattactttgccattggtgtcagtagttttcctaaaatgccttttgtgactttgtgaattacagttgagagctgtattctgacttggctctgtcaggcttttgtctcatcttcccgtctgtttcatgtaggatgtcagtcactgttggatgttccaccaccctttgcggggtgascactgtggtggtgtgctgcttcgtcattcactgttgccgtgtgatgaaaggtgtctttccttgttttgactgtggaaaggactcgagggctttactgcgatcatcctctcccttcaaaaagggaaatgctcagagactcagtactactcagcctccaatgtacctgtgtcaatcttaacgtttytttttttctattgtgaattatacttgtatatccaactgggagcactttaggcatcatgtgcaccatgggatggtcattctgtggaagccttgccttgtgaatttggctgctattttagtttcctcttgctgtaaaactagcattaaacaatcattgttgttaawarrmwwwmwwwmaaaacaattatgtgaaatatgtagctgctcttcatgaaaagcagctttgcctccttttctttggactttgaagctagtgcattgaaaaagtgcacctaccccttccctgttcgaatgctgtattaatgtagtataattattactggttttgtaaatttttcttataatgtcctctgactttaaaacatgtttccttcctcctgtmaarwmwwrwamwwrrwtgtatggttagcctatttttaaatgttttgcccagtttctcttcaatactttgtgtatataaactgatcttggtaatactgtacatagctgtttaatatatccagaatgacttctgactattcaagttttttcacaaaattacattttacctgtgatttagccatttgactaacagtgtttggctagtagatgttgccctccaaaatgagggggaaattgtctcattttgtttttcattaactttgcggaaacacccattgcactgtctgtttgaaacccccctgtgcttattaacattacggcgattaaaagcacggcacacc

SEQ ID NO: 1826 - DNA, 4715 bp, Rattus norvegicus
gggaggtgcgctcccagcctgggtcatggctgtgcgtcctcgctgttggagccgcggctccccagctccgtgccccgctccctaagagcgctccctgcgaggtagcaatcaaaaacccacgatttttgcccgagctgggtcgaggggtaaggaagctgcgaaccaggatgtgctgacgaccgcgagggctcgcgtcccgggtgccaccgtgggtcccgacgtgggatcccgattacttcgggcagcttcgacgttcccagtgcgctcccgccgccctgcgccgcccttaatgtgtagagacgagccggacaccatgatcctaacacaaattgaagccaaggaagcttgcgattggctgagagtgactggtttcccccagtacgcacagctgtatgaagatctcctgtttcctattgatattgcgctggtcaagagagaacacgacttcttggacagagatgccatcgaggctctctgcaggcggctaaacacgctaaacaagtgtgcagtcatgaagctggagatcagtcctcaccggaagcgaagtgaggattcagatgaagaggagccttgtgccataagcggcaagtggactttccagagggacagtaagcggtggtcccggcttgaagagttcgatgtcttttctccgaagcaggatccgatccctgggtccccagacaattcccgtttgcagagcgccacaagccgcgaaagcatgctgacagacctcagtgagcaccaggaggtgtcctctatccgaagcctcagcagcaccagcagcagcgcccccacccacgtgccccacagcggggaggctacgacaccccggaccaattctgtcatcagcgtctgctcctccagccactttgtaggcaacgaggactctttctccagcctgccgtcccccaaggaactgtccagcttcagttttagcatgaaaggtcacgagaagaacaccaagtctaagactcggagcctgctcaagcggatggagagcttgaagctcaagggctcccaccacagcaagcacaaggcaccctccaagctggggttgatcatcagcgctcccatccttcaggagggcatggacgaggagaagctgaagcagctgaactgcgtggagatctcggccctcaatggcaaccacatcaacgtgcccatggtacgaaaaaggagtgtgtctaactccacgcagmccagcagtagcagcagtcagtcagagaccagcagtgccgtcagcacacccagcccggtcaccaggacacggagcctcagcacctgtaacaagcgggtgggcatgtaccttgagggcttcgaccctttcagtcagtctgcctttaataatgtgacagagcagaactataagaaccgagagagctacccggaggacacagtgttctacattcccgaagaccacaagcctggcaccttccccaaggccctctccaatggcagtttctgtccctcggggaacagttctgtgaactggaggactggaagctttcacggccctggccacctcagcctacggagagaaaacagcagcgacagtcctaaggagctgaagagacgcaactcctccagctccgtrarmarmmrwawrarmatctatgacaacgtgccgggctctatcctttactccagctcgggcgaactggccgacctggagaacgaggacatcttccctgagctcgatgacattctctaccacgtgaaggggatgcagcggatagtcaaccagtggtctgaaaagttctcggacgagggcgactcggactcagccctggactctgtgtctccttgcccgtcgtccccaaaacagatacacctggacgtggaccacgaccgaaggacacccagtgacctggacagcacaggcaactccctcaacgagcccgaggagcccaccgatatccctgaaagaagagactcaggggtgggggcttccctgaccaggtgtaataggcacagactgagatggcatagctttcagagctctcaccggccgagcctgaactctgtgtctctgcagattaactgtcagtctgtggcccagatgaacctactgcagaaatactcgctcctgaaattgacggccctgctggaaaagtacacgccttccaacaagcatggcttcagctgggccgtgcccaagtttatgaaaaggatcaaggttccagactacaaggaccggagtgtgtttggggtccccctgaccgtgaatgtgcagcgctcaggacagcccctgcctcagagcatccagcaggccatgcgctacctccgtaaccattgtctggaccaggttgggctcttcaggaagtcaggtgtcaaatcccggatccaggccctacgccagatgaacgaaagcgcggaagattacgtcaactatgaaggccaatctgcttacgatgtggcagacatgttaaagcaatatttccgagatctccccgagcccctcatgacgaacaaactctccgaaacgttcctgcagatctaccagtatgtgcccaaggaccagcgcctccaagccatcaaggcagccattatgctcctgcctgacgagaaccgggaggttctccagacacttctctatttcttgagccatgtcacggcggctgtgaaagaaaaccagatgactcccaccaacctggctgtgtgcttagctccgtctctcttccacctcaacaccctgaagcgagagaattcttctccaagggtaatgcaaagaaaacagagtttgggcaaaccagaccagaaagatctgaatgaaaacctagccgccactcaagggttggcccacatgattgccgagtgcaagaagctctttcaggttcctgaggaaatgagccggtgccgtaactcatacactgaacaggagctgaagcccctgacactggaggccttgggacacctgagtaatgatcagcccgctgactacagacacttcctccaggactgtgtggatggcctgttcaaggaggtcaaagagaagttcaaaggctgggtcagctaccctacctctgaacaggccgagctgtcctataagaaggtaagcgaaggacccccactaaggctttggagggcaaccattgaagtccctgcggcccccgaggagatcttaaagcgccttctgaaggagcagcacctctgggatgtcgacctgctggactcaaaggtgatcgaaatcctggacagccagactgaaatctaccagtacgtccaaaacagcatggcgccccaccctgcgagggactacgtcgtactgaggacctggaggactaacttgcccaggggagcctgtgctctcttattcacctctgtggatcacgaccgggcacccgtggcgggggtgagggttaatgtgctcctgtccagatatttgattgaaccctgcgggtcaggaaaatccaagctcacctacatgtgcagagctgatttaaggggccacatgccggagtggtacacaaaatctttcggacatttgtgtgcagctgaagtggtaaagatccgagactccttcagtaatcagagcactgaatccaaggataccagatctaggtgatgaccgaagggaggcagccgtgtctgcaacctgggtgatattgctagaaccttgcaagtccttggaggaagagttcatctgggtctgattgactacagagattcgacacgttcttaaagctgcttcctgtttgtcttaggtctctgttgtagaccttgactggaatatgtaagacacggcggggcggggtacctgtattattcagattgcttctgagaagcaagaactctttcagcacctaatggaagatacggaagaggcgtcgtcgatcttttgcgacgtcagcgtctgtgtaccttattccttattgttttcggcgtactgagggactgatgtatccactggaacagctggtactcgtggacaggttttctcactgagacgagcagagaakggtttgcacagaggagtgtgaatgtgtgtgttgctggctgagtggcatagatgaagggatgggaggcagtgtctggcacactgagatgctccacaaaggatgctattatacctggtttagctcaacctggaatagctgactacccagggatccacccagaaggggaatccagatcccttcctcatcccccacccccaccccacccctggttattaagctttttttttttttttcttttctgtaaagctytgctgtcccataaactgtagcttccccacgactaggaatttaaccatagactagttcaggaataagcatcagcttcacctctttgactggctccaaagaaaggcttttctttacgtgagatagaaaagctgaacacagacacagccataagcaaagtaagaacgctttctcatttccaatactgggtgttgaacccagagccttttatataccaagcaagcgctttacagtgaagtcatccccacctctgttttcactccttgttctgaggcagtgtctcgccgtgttgcccaggctggtcttgaacaactgactcgctgtatagctcaagttatctaggtctaatagttgggataagggactcagcaaaactttttacctgttataattcggagtatagtgttgcttgtaacataaactcaaagatacccagcggaacccagaactatgtccccagtacgtttaacccagccaagcacaagaggcttctgattgtgggtggtggtg

SEQ ID NO: 1827 - DNA, 5042 bp, Rattus norvegicus
  misc_feature (4747)..(4747): n is a, c, g, or t
tggcgggtggaggatcgagcgctgttctcgctctggagccgctgcacatctcggaatcatttgcagcttattcactgtgtaaggaaaaaccaaattacatccataattctattgaactggaagcatagacgctgccatatatgtcacagtatacagaaaaagaaccatcagtaatggwtcaagactccagcaaggctgcgtggcctagagcagcaggaggataccagacgattacaggcaggaggtacggaaggagacatgcgtatgtcagttttaagccatgtatgaccaggcatgaacggagcttgggtcgggstggcgatgactatgaagttctggaactggatgacgttgccaaggaaaacaccgcaggttccagktcattggatcaagtccatccttctttacccagtgaaactacagttgaaaaaagtgaaacagaaattcctacttgtggtccagcactgaatcaaagcacggagagcaacccatccgttgccacagtgtgtcatagtgaggaagtcagggagaccttagacagcagtacgaatcttcagaatcacgctgagagagagtgtacgccagcagtttgtaatgcctcaagtgtccagaatggaattgtgttggttcatactgactcttatgatccagacagcaagcatgatgagaatgactctcttcaactttgtgcccaagctgtggaaggtggtagacgtcagaaggtattaggcaatgcagtctttgagctggaaaatggagaggtagagagatatgctgatctrkgtccctcagyyycctctctcagtggtgaaataagggaggagtctgaagagctaggttcagcactcttagagaaaaattctgctggcgatgcggaggctgtccatcaggatgggcaggaatttcagaggtcttctgaagacggcattgttagaaagaggcgacaagatgataccgatcagggaagacagacagaaaattcaactgaagatgcagactgtgttccaggccatgttgaacaaaatactagtgagagagccaatcaccatggaagttctcctgaacaggtagtgaggcccaaagttagaaaagtgatcagttcaagccaggtggaccaagagagcggttttaataggcacgaggctaagcaaagaagtgttcagaggtggagagaggctctggaagttgaggaatgcagttcagatgaccctataatcaagtgtgacgattatgatggagaccatgactgcatgttcctaaccccatcctactcaagagttacgccaagggaagcagaacgtcaccgtgcgacagcagaaaatggagccacagcttcaggaaggcaagaggctcgggaaaatgccttttggaatgcctgtggagagtattaccagctctttgacaaagacgaagacagttcagagtgcagtgatggggaatggtctgcttctctgcctcaccgattttctggcacagaaaaagaccagtcctcaagcgatgaaagctgggaaactctgccaggaaaagatgagaatgaacctgagctacagagtgatagtagtggccctgaggaagaaaaccaagaattgtctcttcaggagggagaacagacgtccttggaggagggggagattccctggttacagtacaatgaggtcaatgagagcagcagcgatgaagggaacgagcctgccaatgagtttgcacaaccagaagctttcatgttggatgggaacaacaacctggaggacgactcgagcgtgagtgaagacctggatgtggactggagcctatttgatggttttgcggatggacttggtgttgctgaagctatttcctacgtggatcctcagttcctcacctacatggcactasamgarsgcttagcccaggctatggagactgcactggcacacttagagtctcttgctgtagacgttgaggtggctaacccacctgccagtaaggaaagcatcgacggacttccagaaacccttgtcctagaagatcacacygctattggtcaggagcagtgctgtcccatctgctgcagtgagtacattaaggatgacatcgcaacagagctkscctgccatcacttctttcataagccttgtgtctccatttggctacagaagtccggaacgtgccctgtgtgccgscgccacttyccacctksagtgattgacgcatctgmrgytgcttcytytgaaccagaccttgatgcctcgcctgcaaacgacaatgctgaggaagccccgtaagccgtcacggggaaatgagatcgaaattctatcacagtaaatctgcaaattccttctaaatctgatgtgcaaataattatatataaatatatttaaaatgctctatatagtatatgccgtagtttagaaagagaatattaacctttctaaactgaatttaggtttgcagaagatactaaacattttcaagctgaatgttgaagcagtgcatccattttctttagttgaacatggtgtccattgtaacgtcagtagtcatctctgtggcatacgtttctgttttgtctgaagtgctgccactaagagatcagaattaagctctcctttccacatcagatgtgaaaggagagcttaattctgatctctgtggcatacgtttctgttttgtctgaagtgctgccactaagagatcagaattaagctctcctttccacatcagatgtgaaaactgtgatcacaacagtagtacagtttggtttcattgaaaataaactgaattctaaagcatgctttttcactggtccctttgcttttgctacttcgagacctcttggtttatataacactgaggttaagattaaagcttttcagaatgccaggcaaagactagagttttgacccgaacacacacacaaaataaaaaaataaaaaataaattacatcttagatgtaaacttcctgaaactgtcatgtaataaactattcagtgaacgttggatgtttaaaggctagtaaagcatgtgaattatctgatgtgcttcatgctcggcacagtctcatgagcttggcctatgaaacactgtctaagccctcatgcagtctgcttctacttgttaaacactgaaggtccagaccagtcttggcatctgattaagaaattggatgtagttagctaaggtagtttgggttctactttaggagatctgaagatttgcacatggccatgtctgttacagcatcaccccagattagaaaggcacagcttttaggtggtcacacgagtaggcaagtctgtgcagacgctggtgtgataggtagcttacaggtgagccctgacatcagcacagggacaacggctcagcaggcccagcactggagcccatccgcgtgcacatctacctgccctgctcatccagttcgggaatatttctatagcttcccaaatcagcttcatctgatttgtgtaatatatctgagtatttatagkctttcttttttctccagyswkraaaataaatgaattttcactgttggcacatttgaggcttaaatataagaaacctaacacttgcattctgatttttgcayrwrktgkaaatgtggctggtatttacagcgaatcctgtgtgtccttttatgggtaaaacaaaagtgaacattgcatgcaagtaatgtggtgaatttgtaatttargggttttctggsgcttctgwgactgtggatgcttaaattcaggccttaatgktgctctagctagcatgtttccttctaatgtacatagwcagcctgtatccactaatctctgcttgkcttctcctccgwggtcttcacaccgtatccactgatggtcagytagtgtcagaggtcacccaggttagcatcagttcccatgtgtgccgwgcggattgtgagccgwgtggttgcttggwtgsytttcttttatgtactttgattarctgwggcacttactgagtaaamwwamrwwrmwrmagactgctgtgtaacaagccacgttttgtgtttagtcagtattacacacgggaccttgttttattcttctagatagcagctgtcccaaagaaaatatttcttctttgcctattaagatttagctattatctgccagttgttaaggggtttgattccaaactcaaccagagttgaacgtaagaaagctgctgtactcttgctgtccatctgttacgtcctccgttgttggctcctgaytacgtacccasggytgytraagragacttgttttaathtgttttaaaaaggawaatraagttttaggactttgatggtggggaagctgacaagttcagaccccagtctgtcatttgctctwagcttggatccttttgaaaagttaagaatatatgaaggtaaattagaaaaagtaaaaatattgataaaatgtcatttatcttatgtctattttakgttgttatttggcctattaattttaattktttgaacattttcttatttcttgtaatatgaatgccgatatttaaagtttgactcacttgggtttcttttgtgtttcttagttgttatctctaagcctaactaacttttaagattatttgtgatatggatttatataagctgttaaatatatatgagctgttaaaatggaatgcaaggttttccaaagaccaggtctaactgtaatgattggtttattgttcwacaatcccagcccggcattttccgtgtmmmtcataamcaataaacaggatatactcarkddhhhwdhnhwwwwdwwraaaaaaaaaaagagagggaaagagagaacaaaaaacaacggagcccacaccgaagaagaaaggagaagcaacacgaacaacacaacgaaggaccaagcagacacacgaacagacacaccgcgacgctccccaagccccggcgggaactctccacacagagtccccccccagaacggggcagccccacggtggagcccccctccaaggcagtgcccccacggcggcgcacacggccgcgtgccaaaaaccccctctgcaccggggcgcaccaccgcagtcggcccag

SEQ ID NO: 1828 - DNA, 4510 bp, Rattus norvegicus
gtggtcgacggtatcgataagcttgatatcgaattccggcaccacaacmtakstkatgggtgatgccaaagaagaggcaggcactggtagagtttgaagatgtgctgggggcttgtaatgcagtaaactacgctgcagacaaccagatctacattgctggtcaccctgcttttgtcaattattctaccagccagaagatctctcgccccggtgactctgatgactcccggagcgtcaacagtgtgcttctgtttaccatcctgaaccccatctamtycataaccacggatgttctttacactatctgtaatccttgtggccccttgctgatgagggaggcgaagggctgcacctgcagggaggtgcccatgatgatgaggaggtccacctttgagagtctgactgcatgcaggagaagaagcgcggtgggaggttctcaccgaaaaacacgatatcgggctttaccacattctgacacttctcacacttgggagttgcttctgagaagatcttctctttcatccagctcatcgtgtactcttttccacaggaggtgttgacacagtgtgatgtgtagaaggtgccgtgggcctccaccaggtcctggggctccagccccgccactcgttccagagtgtcaatattctgcgtgtagcagcgcagcagcagccccttctccttcagcaggcggatgaagtagtggcagatggtcggcttgaactgcccaggatagagctccttagcaagggcaaagaagggttctggatgtttcttgaagtagctgatctcaaagatggcctctgggtatggaaggtggtatttctccaagtttgcatagaggccagtggatggggagcggaagtcagggattcctgcggatgtggagattccagctcccaccaaacagatgaccctgcgacagcgctcgctctgcatgtagcgtgtcactccttcaagggtcagctcgtccagcagacgctccttctgggaaccaggcccagggtctgggtgaataatattccgcaggaaggtccatctctgcctctccgccagtggctcctccctcagtgtccgagtctgaatcggtccggctcggccatgggaacggggtgggggctctcgggactgtcaccgactgctctgtcccgtgacggctacgagaccgagacccctttttcccccgagggagccttcccaggtggggggccggccgaggaggaaggggtccctcggccacgggctccccccgagccacccgacccaggagcgccccggccacccccagacccgggtcccctcccactcccagggtcccaggagaagccaacctttgtagttcaggtgagcaccgagcagctgctgatgtctacgggaggatgtgacaaagaacctcctaggggacaaggggtcgacacccggggagacaggacccaggaaggcggggagaagccccgcgaacagagagaagggcccaggcccgaacagggacctgacatccctggtcagcaggaagaaagtccccagcaggagccttccagtgaacggggtgacagtgttggagaacgggaagccaggagtcccggacatgaaggagaaggtggcggagaatggcctggaatctccggagagaggagagagagccctggtgaatggggagccgatgtccccagaggccggggagaaggtgctggcgaatggggttctgatgtccccaaagatcgaggagaaggtggcagagaatggggtcctgaggctgcccaggaacacggagaggccgccagagactggacttcggagagtcccaggaccctgggagaagatgcccgagactgggggtctagctcccgagacgctgctggatcgagcccctgcgccctgcgaggcagtcttgccccagaacggcttggagatggcccctggccagcttggcccagtccccaagagcgggaacccggaccccgggaccgagtggagagtccccgagagtgggggggcaccgagagcccccggggctgggaagctggacctcgggagtgggggccgagccccggggggcgcggggacggtccccgccggcggccccgcaagcgccgtggacgcaaaggccggatgggtagacaactcgagaccactgccacctccgcctcagccactgggggcccagcagaggaggccggagccagtgcccctgaaggccaggccggaggtggccccagaggaagagccaggggtcccagacaacaggctcggcggagacatggcccccaacgtagacgaggacccccccaagccggagaggaagggcccggagatgccacgcttgttcttggacttgggaccacctcaggggaacagcgagcagatcaaagccaaactctcccggctctcgctggcgctcccaccgctcacgctcacgccgttcccgggcccgggcccgcggcggccaccttgggagggcgcggacgcaggggcagctggcggggaggccggcggggcgggggcgccggggccagcggaggaggacggggaggacgaggacgaggacgaggaggacgacgaggcagcgggctctcggggacccgggaggacgcgggaagccccagtgcccgtcgtggtgagcagcgccgacggggacacggcccgcccgctgcgggggctgctcaagtctccacgcgcggccgacgagccagaggacagcgaactggagaggaagcgcaagatggtctccttccacggggacgtgaccgtctacctcttcgaccaggagactccaaccaacgagttgagcgtccagggcacccccgagggggacacggagccatcaacgcccccagcgcccccgacgcctccccaccccaccaccccaggagatgggtttcccaacaacgacagcggctttggcggcagtttcgagtgggcggaggatttccccctcctccccccaccaggcccccccctgtgcttctcccgcttctccgtctcacctgcgctggagaccccggggcctcccgcccgggctcccgacgcccggcccgcaggccccgtggagaactgactccccaaagacccagcccttttgcaccccaagaagagggtttgcgagcagaatcttgtgtggacgatggagccattgcccccgacactgacacagcctctggggaggtgcctgaggctgggccctccctctcctccaccatgtgccaaatgggaaggcccaggccctcccccaagtcccccagatgagtcccctgatccccctgatccccccgaccccctcggagccacatgaggcagraagccccatcgctgracagccacacttcttggaactgaactgaactctgtgggcccagagccyctggcacagcagaggcccctcctggcctcatgagggtcactggcttcaggaacctgggcccccatcttgcgtctccccttcccccaagcctggcccctagagggggcctctaattcaaaccttcgcgtgacattttcacattatttaaaaaaaaacmrramywwhwwwwdddddwwmwwwrwwwwarwmamcatcttaggcttttactgctgtgaacagacaccattaccaaggcaaatcttataaggacaacatttaattggggctggctttcaggttcagaggttcagtccattattatcaatgcaggaacatggcagcatccaggcaggcatggtgcaggcagagctgagagttctacatcttcatttgatgtctgctagcagaatattggcttctaggcaactaggttaagggcttaaagccacaagcacagtgacacacctattccccttctaatagtgcactccctggactgagcatatacaaaacatcacagtcccaataactagtgccaagggacataaaatgttctgccagtggttaaaagtatcttctgtgctttttgaaatttcttgggctactccaatgaaagctgtgtatgtatctctccctgcacagctttcattggagtagcccaagaaagctgtgcagggagagatacatacaccgttctttactggtgatagcatccccaaagtttaccaaagaatagctcttgcttaatatctagacatgctctcaatttgttagctatgcattttctccaccgcagccacctgaggttagcaatcagcgggtgcatgagttcactccacwgggwwgcwamcgaakkrrttcgcrgmskccacaactccagtgctgttggcccatggggaacgggcggagtggccactgaggagtttctccctgtcaccccaattmtggaaggctttgtcattcttcgaaagaaccccaactacratckykgrawwatggctgacactagagaccctggctgcagctgactttttttagcaggctgtactgcccctgccaggggcagatactgttccagatctttgggggaattgttacctcctgctgttttgttactgagtaagataatcttgtcgaataaagacctttatccccaaaaaaaamaawaaaaaa

SEQ ID NO: 1829 - DNA, 779 bp, Rattus norvegicus
  misc_feature (761)..(761): n is a, c, g, or t
cacgaggggrgaagccagtgggaaccttacactgcggagctttcgtcctggcctggcccggcccggccccgcgctatggagttcctttgggcccctctcttgggtctgtgctgcagtctggccgctgytgaccgccacatcgtcttctggaacagttcaaatcccaagttccgagaggaggaytacaccgtgcacgtgyakctgaatgactatctkgacatcatctgcccacattacgaggacgactctgtggcagatgctgccatggagagatacwcgctgtacatggtggaacaccaggagtatgtgacatgcgagccccaktccaaggaccaggttcgckkkaagtgcaaccagcccagtgccaagcacggcccggagaagctgtctgagaaattccagcgcttcacgcctttcaccttgggcaaggagttcaaggaaggacacagctactactacatctccaaacctatctaccatcaggaaacccagtgcctgaagttgaaggtgactgtcaatggcaaaatcactcacagcccccacgcccatgycaacccacaggagaagagactccaagcagatgamccsgaagtgcaggttttgcacagcattggtcacagcgccgccccccgcctcttcccattggtctgggcagtattgctcctaccactgctgctgctgcaaactcagtgaaggtatttgcttkccctggcttacggattggmacgggactaaggggcagggttaagcacccccaaagncccagtcctggggaacct

SEQ ID NO: 1830 - DNA, 1608 bp, Rattus norvegicus
ccggccggtgccgctggcagccgctagccgcctcgctgctggcggtggtagggtagggcggtgctcggagcgagctggggaagacggagcgggcgctgcggcgcgcgggcgggcggcgggggggacgcgggaggatggagcaagtggagattctgaggaggttcatccagagggtccaggccatgaaaagtccggaccacaatggggaggacaacttcgcccgggacttcatgcgattgagaagattgtctaccaaatatagaacagaaaagatttatcccacagccactggagaaaaagaagaaaatgttaaaaagaacagatataaggacatactgccatttgatcacagccgagttaagttgactttgaagacaccatcccaagattcagattatatcaatgcaaattttattaagggtgtatatgggccgagagcatacgtggcaacccaagggcctttggcgaatacagtcatagacttctggaggatgatatgggagtacaatgtggtgatcattgtaatggcctgtcgtgaatttgagatgggaaggaaaaagtgtgagcgctattggcctttgtatggagaagatcctataacatttgcaccatttaaaatttcttgtgaaaatgaacaagcaagaacagactacttcattcgaacacttttacttgaatttcaaaatgaatcccgtcgactctatcagtttcattacgtgaactggccagaccatgatgtcccttcgtcattcgattctatcctggacatgataagtctaatgaggaagtaccaagagcacgaagatgtgcctatttgtatccattgcagtgcaggctgtggacggacaggtgctatttgtgccatcgactacacgtggaacttactgaaagcagggaaaattccagaggaatttaatgtatttaatttaatacaagaaatgagaacacaaaggcactctgcagtacaaacgaaggagcagtatgaactcgtccatagagctattgcccaactgtttgaaaaacagctacaactgtatgaaatccacggagcccagaaaatcactgatggtaatgaaattagcactggaaacatggtcagttccattgatagtgaaaaacaagattctcctcctccaaagccaccacggactcgaagttgtcttgtagagggggatgccaaggaagaaatcctccagccaccagagcctcacccggtgccgcccatcctgacaccgtcgcctccttcagcattcccaacgttacactgtgtggcaagacagtgacaggtaccacccaaagccagtgctgcacatggcttccccagagcagcccccaacggacctcaacagaaactatgataagtcagcggacctaatggggagaagcgaatctgctgttgagcacacagataaaaagttagaacaaaatttaagttttgagattaagaaagtccctctccaagaagggcccaaaagttttgatgggaacacactcttgaataggggacatgcgattaaaattaagtctgcttcatcttctgtagttgacaaaagctctaagccacaggagttaagttcaggtgatctaaaggttcacgatgtgtctcag

SEQ ID NO: 1831 - DNA, 3582 bp, Rattus norvegicus
cacgagctcgttcccctcgcagcctcagctaagacccggagaggtggaatttcgatttgaaactccctagccagggccggggctgggcatgctcagtgcctcggtgtatcgggctgctgctagctgcacaggcagcagaggcgctgcctggcttggaagctggcacaagagtccaccccactgtcaccaccgactgcgggcttcaggaaggccaaacactcacctcctctgagcgctttacacccaccaacctcgagtccccatctcccgcagcatcctactctcccgtctccccatcccttagggagacgaagccagtgctcggttctgtaggcacgccacagactgctctgtgaaccccagcggaggaccctgtcatcggatgcctcgggatcaaaggactcttggcagtgtttctctcaaatagcactttgcctggagtgggattgcggtggagtttctcccccgcccctcaatgcacacactatgaggagagcggtcggtttccctgcactgtgcctgcttcttaatcttcacgctgcagggtgtttttccaggaacaatgaccactttttggctattcgtcaaaagaagagttggaaacccatgttcatttatgaccattcccaagacattaagaagagcctggatatcgctcaagaggcatataaacacaactaccccgccccctcagaagttcaaataagcaaacgtcaccagatcgttgattcagcatttcctagacctgcatatgacccatctcttaatctgttggctssatctggtcaagacctcgaaatagaaaatctcccaattccagcagcaaatgtgattgtggtgacactgcaaatggatatagacaagctgaacataaccttgcttcggatcttccgccaaggagtagctgcagccctgggactcttacctcagcaagtacacatcaaccgcctcattgaaaagaagagccagattgagttgtttgtgtctcccggaaaccggaaaccaggagagccgcaggccctgcaggctgaggaagtactgcgttcccttaatgtggatgttttgcgtcagagtttaccacagtttggaaktatagacgtctcccctgagaaaaatgttttacaagggcagcatgaagcggacaagatctggagcaaagaaggcttttacgccgtcgtcatcttcctcagcatctttatcattatagtaacctgtttgatgatcatttataggttaaaagaaaggcttcagctttccttmcgacaagataaagagaaaaaccaggagatccacctatcgcccattgcactccagcaagcacaatcggaggccaaggcagcccacagcatggtccagcccgaccaggcgccaaaggtgctgaatgttgttgtggaccctcaaggccaatgcactcctgagattcgaaacaccgcctccacttctgtctgcccttctcccttcaggatgaagcccataggactccaggagcgacgaggttccaatgtatctcttacactggacatgagtagcctgggcaacgtggaaccctttgtggccgtctccaccccccgggagaaggtagccatggagtacctgcagtcagccagccgagttctcacaagkccacagctgagggacgtcgtggcaagttcccacctgcttcaaagtgaattcatggaaataccaatgaactttgtggatcccaaagaaattgatattccacgtcatggaactaaaaatcgttataagaccattttgccaaatcccctcagcwgggtgtgcttaagaccaaaaaatatwwctgwcccattgagtacttacatcaatgctaattacattcggggctacwgtggcaaggwgaawgccttcattgccacacwgggccccatgatcaacactgtgaatgacttctggcagatggtttggcaagaagacagtcctgtgattgttatgatcacgaaactcawagagaaaaatgagaaatgtgtgctctactggccagaaawgagagggayyyayggcaaggttgaggttctggtcatcggtgtcaatgaatgtgataactacaccatccgcaacctcgtcttgwagcgaggaagtcacacccaacatgtgaagcattactggtacacttcatggcccgatcacaagactccagacwgtgcccagccccttctgcagctcatgctggacgtagaggwagacagactggcctctgaaggccgagggcctgtggttgtccactgcagtgcagggattgggagaaccggatgtttcatcgctacatccattggctgtcaacagttgaaagaagaaggagtcgtagatgcactaagtatcgtctgccagcttcgtgtagacaggggtggaatggtccaaaccagtgagcagtatgaatttgtgcaccacgctctgtgcctgttcgagagcagactttcgccagaaacggtccagtgactctgaagatctaccagagcgtcaatctatcacgggtgattcgtcaagttacctacwgagggctccgagaaggagctccccacgatggatgaggaggctctaaagccagcctgaggcgtggattgwggaagctatggtaacttgaaagattgccacctttgtgtataggactgtgttctaggcatccccctagktactccgaaggacctgtgctgatggaggtgtgacagtcctcatgcagcctgaggaggattctgttttgtctgtgtcgactctcacacagaacctgtatgtgtaatattcagagtctgtgcttatggtgactggaggagctgcggaagatatcgttatcctgtgttagatgctttaatgttcacaaagcctgtcttgtgactggactgtcagctgttcaactgttcctgtattaagtgctattacctatctcagttaccagagtcttgctgctaaagttgcaagtgaccgacaatggatttttaaccatgacgtttttwgtytttgaaaaaaaaaaaatcaaaggcagtaactattttatatggagatgtgtcttgattatctctaataagtgtgtatttatagtatctcctatggatcaattacagagcacaatgattgtcactggatatatatgtatatgtacattacaggtatatgtacgcatatatattctattatyaagcatagaggtagctcctgttttacaactctaactactatatttctacattgtgacttgttttactttaaaaggggataaacaaatttatagtaactataaagtatcaataattttaaatactcatctctcwttwactaagaagggattyttgaawawagtgwytacttggtttctctctcccagtaagaagcaggtgcctttggggatgctccaacctgtttcatccccraaagtttttytgaggacaccgtcatgcacgcatgmccttaaatttctaaaaggttttyttcctcaagagaccaatgaaggcaagataaccgcactcagcaaacatgagatgttctgctcagatgtgaattttcaatgcagcaaagttgactttcgtactcccaataaatgactcttaacagcmaaaaaaaaaaaaaaaa

SEQ ID NO: 1832 - DNA, 3831 bp, Rattus norvegicus
cggccgcgcctccctcccaccccatctcgaggacggctggttaggcgatgagcagacgtgaggggctagccggctgcccggctctgcaggacgctgcctggctcccgagcgtcggtccctccgcgcccggggcaggagcggctgtgcgctggggctcagaggccgggcaggagagtacaagcccccggcttcgctatggggcacaacggcagctgggtgtcaccgaacaccagccacccgcgtaacacgtcgggcgcccaggctggcgccaacagcagcgcgttcggggagctgagcgaggcgcagctgtaccgccagttcaccaccaccgtgcaggtcgtcmtctycawtksttcgctgctcgggaacttcacggtgttatggtcaacctgccgcacgaccgtgttcaaatctgtcaccaacaggttcattaaaaacctggcctgctccgggatttgtgccagcgtggtctgcgtgcccttcgacatcatcctgagcaccagccctcactgctgctggtggatctacacgatgctcttctgcaaggtgcttaaattcctacacaaggtgttctgctcsgtgactgtcctcagctttcctgccattgccctggacaggtactattcagtcctctaccctctggagagaaaaatctctgacgccaagtcttcgggaactagtgatgtacatctgggcccatgcagtggtggccagcgtccctgtgtttgctgtgaccaatgtagctgacatctatgctacatccacctgcacggaagtctggagcaactccttgggccacctggtgtatgtcctgatctacaacrtcaccacggtcattgtgcctgtggctgtggtattcctctttcttatcctgatccggagggccctgagtgccagtcagaagaagaaagtcatcatcgctgcactgaggaccccacagaacaccatctctatcccctatgcatcccagcgggaggcagagctacatgccaccctgctctccatggtgacagttttcatcctctgcagcgtaccctatgccaccctggttgtctaccagactgtgctcaatgtacctaacacttctgtgttcttgcttctcactgctatttggctgcccaaagtctcactgttggccaaccctgtgctcttcctaactgtgaacagatcagtacgcaaatgcttggtggggaccctggtgcagttgcaccaccggtacagtcgccgcaatgtggttagtacagggagtggggtggttgagcctagccttgagcccagcatgcgctctggtagccagctcttggagatgttccacattggacagcaacagatctttaagccctcggaggatgaggaagagagtgaggccaagtatcttggctcaactgatttccaggccaaggaggtactcacctcctccccagagggcgaggagtcacagcttgcaccctctgtgccgcctccaggcacagtagactctgtatctcgggtgtccccagtagcccccgtggaacctggcatattccctgataagtattccctgcagtttggctttgggcctttcgagttgccccctcagtggctctctgagactcgaaatagcaagaagaggctgcttcccccactgggcaataccccagaagagctgatccagacaaaggtgcccagagtgagcagggtggagcggaagatgagcagaaacaataaagtgagcatttttccaaaggtagactcctagcgaggactatgagtgcctgagagtgtaagggagcttgtatattcctgttctcccttccctctggctgccactgtggggcgataactcctttacatggcaaatgcttctgaatgaaagggaagtctacagaaaacccaatgtcctctttattgagggagtatatatctatcttagtgatctgtgtccttcatcacattcagtgtaagctgggcagaatggaacaggtctgagggctctctgacacattttctgggagattcctcctttttttgtgtgcagcaaagaactcaaatggagcaggcactccaaggaggcccaggataattctgggcttcaatggccacagagaagaagctaatttgtttttaaaatgtttgttttgttttgttttgttttgtttttgagactggatttctctatgtagccccaccctacagattgggctggccttgaactcagagagccacctgtctctgccttctgagtgctgggcttaaaggtctgtgcccacatgcccacttaagaagcctatttgggtagctaaataagaataacaaataggaaaatatctgagaagacagagccatggtgtcgaatggtttttgctagatttcacaatcacccaactcctggttgctaatacccctcgtctggatttctgggtcataaaggggggatgactggatttatcttaggatagacagggcagtgtctgagggagcctttttgtccttgattatctctccaccctgttggtatcaccaaggcctccaacaaatgtacctgcttccaccagtcagccatgctgcctggaaaccactgccaaccattcactgtgtgtccattttatcagcaacaagaagggaagatttgtggtggcgaagacaggctgagaaatgcccaccatgaataaccttttttctctctcacgtgattaagagcaaaagactagactcagctataggggggtataggcacaaagtaaaacgtcctaactggcaaatgtttggaattaaaaggtgcttaagaaatgtaggtggcatgcactgggtcgtttggcaccattaaggtaaaaatccttgattagcacaagcgactctgccctaagacttattagtttgacatacaggacacgcccacccgccagtctcattttcagtgtgttctgattctggatcccacagaaggtgagcagagcaggagaaataatgattgcaaatgctaaagcaattcccaccctgatttagcactccatcctctacttccaatgaagttcaggtatgagccatggtggatgggagaatgtgctctctcagcagctcagtgccctggctctcatgtgtgagccactctgggactgatgtaccagacctaattcaaacccaactctcccctcatacatcaagttgggagctctgctcttcttagggtgttttgttcttgtttgtggtccttggtggagccagtcgggcaccttgaatggataggtattcctacgagcaaacttctacatctcaaaggcagtggtcctagcagcacgtttagccatgctggcccatcgcccctaagaggaagctcagcccgtgtatagggagactccttttyttttyttytwttgkgttatgtcttgtgaaccccaacatctcctccttggagagggggcgccttcctttctgtgcactgcctcacagacttgttttctcacktcagagacagggtactgtgcccctcttgtggctctgtggccctctgggccctgtgtacctgccatctgtagctcttcgtcctgatgctgtgttaatgctgtggccctccaagctcatctttcaaagccttcttaattgttacagcttttactaaggggaaaaataatccctcagagaatcctatgtaccagagaagaacctgtgaaatgtacgtgtgttgctgtcgtcctgacctgtatgtgtgacttaataaattctcaacagcggagtttggttcaccaaattctcatgtatgttggaaagagaaggctgacgtctagcmkctgtcgccgartgtmttkstatactctttgaagaataacattttaataaaaattataaagctgt

SEQ ID NO: 1833 - DNA, 3677 bp, Rattus norvegicus
ccgccaaaggggcaatttgaagcagatattataccgagaccggcagatgattcaacacatacggtctttcatagttgtcaactgccataaagctcccattccttctggaaactgacccatctattcaacagaagatgaaaaccccattgctggtcagtcatctcctgctaatctccttaacatcctgtctaggagagtttacatggcacagaagatatggtcatggagtttctgaggaggataaaggatttggacccatttttgaagagcaaccaatcaataccatttacccagaagagtcactggaaggcaaagtgtcgctcaactgccgggcacgggcaagcccatttccggtttacaagtggagaatgaataacggggacgttgacctgacgaacgatcgatacagcatggtcggagggaaccttgttatcaataaccctgacaaacagaaagacgcaggaatatactactgcttggcgtccaacaactacgggatggtcagaagcaccgaggccaccctgagctttgggtatcttgacccctttcctcctgaggatcgtcctgaagtgaaggtgaaggaagggaagggcatggtgcttctctgcgaccctccctaccacttcccagacgatcttagctaccgctggcttctgaatgaatttcccgtctttatcacaatggataagcgaagattcgtgtctcagaccaacggtaatctctacatcgcgaacgttgagtcttctgatagaggcaactattcctgcttcgtgtccagcccttctattacaaagagcgtgttcagcaaatttatacccctcattccgatacctgagcgaacaacgaagccatatcctgctgacattgtagtgcagttcaaggacatatacaccatgatgggccaaaatgtgaccttagagtgcttcgctcttggaaaccctgttcctgatattcggtggcggaaggtgctagaacccatgcctaccacagctgagatcagcacctcaggggctgtcctcaagatcttcaacatccagctagaagatgaagggctctacgagtgcgaggctgagaacattaggggaaaggacaagcaccaggcaagaatttatgttcaagcatttcctgaatgggtagagcatatcaatgacactgaagtggacataggcagtgacctctactggccttgtgtggccacagggaagcccatccctaccatcaggtggctgaaaaatgggtacgcgtatcacaaaggggaactgaggctgtatgacgtgacttttgaaaacgccgggatgtaccagtgcatagcagaaaacgcgtatgggaccatttatgcaaatgctgaactcaagatcctggctttagctccaacttttgaaatgaatcccatgaagaagaagatcctggctgcgaaaggaggaagggttatcattgagtgcaaacccaaggctgcaccaaaacccaagttttcatggagcaaagggacagagtggcttgtcaacagcagcagaatactcatatgggaagatggtagcttggaaatcaataatattacaagaaatgatggaggaatctatacatgctttgcagaaaacaacagagggaaagctaatagcaccgggactctggtgatcacaaatcccacacgaatcattttggccccaatcaatgctgatatcactgttggagaaaacgctaccatgcagtgtgctgcctcctttgatccttccttggatctcacgttcgtctggtctttcaatggctacgtgattgactttaacaaggaaattacaaatattcattaccagaggaattttatgctcgacgccaatggggaactgctcatccgaaacgcgcagctgaaacacgcaggacggtacacgtgcacagcgcagacaatcgtggacaattcttcagcttcagctgaccttgtcgtacgaggccccccaggccctccaggtggcctgagaatagaagacatcagagctacctctgtggcactgacttggagccgtggttcagacaatcacagccctatctctaaatacactatccagaccaagacgattctctcagatgactggaaagacgcaaagacggatcccccaatcattgaaggaaacatggagtcagcaaaagcagtcgatttgatcccatggatggagtacgaatttcgagtggtagcaaccaatactttggggactggagagcccagcataccctcaaacaggatcaaaaccgatggcgctgcaccaaatgtggctccctcagacgtaggtggtgggggcggaaccaacagagagctgacaataacgtgggcgcctttgtccagagaataccattatggtaacaattttggttacatagtggcattcaagccattcgatggagaagagtggaagaaagtgaccgttaccaatccggatactggccgctacgtccacaaggacgaaaccatgaccccttccaccgcgtttcaagtcaaagtgaaggcattcaacaataaaggagacgggccctacagcctcatagctgtcatcaactcagcacaagacgctcccagtgaagcccccacagaagtaggggtcaaagtgctatcgtcctctgagatctctgtccattggaagcacgttctagagaagattgtggaaagctatcaaattcggtactgggccggtcacgacaaagaagcagcggcgcacagagttcaagtcaccagccaggagtactcagccaggctggagaaccttctgccggacactcagtacttcatagaggtgggagcctgtaacagcgcggggtgcggaccttccagcgacgtgatcgagaccttcaccagaaaagcccctcccagccaaccaccaaggatcatcagttccgtgaggtctggctcccgatacataatcacgtgggatcatgtcgtggcactatccaatgaatctacagtgacaggctacaagatactctatagacctgacggccaacatgacggtaagctgttctccacgcacaagcactccatagaagtccccatccccagagacggagagtacgtagtcgaagttcgagcacacagtgatggaggagatggggtagtgtcccaagtcaaaatttcaggtgtgtccacgctgtcatcgggtctcctcagcttgctcctgccctcccttggctttcttgtcttctattcggaattctgaacgttgtgacatttgctgttctcatcctcgctcagaggatgctcttcatcgtgggatgactgtaattccttctaatccctgcggctccatcctaagccaaataaattagactctaacaagctcttcaaccgatttcccaacacattacgamtgaggcattcaggaaccccttcatccaaaagaataacttgcaaatggaaataaaaatgatttttaactcgttmmaawawrmmwwawaaammatttaacctgawwmwrwraaarwwrmatgatttaattcaatgggcaagttacagtgttcagttcaatgccataggctgtagagtgaagtaagctcaccatacacaggtgctttacatttaatgacaagttgtgaaatatattagaggttgaattgttgattgtatgtggtatgtgtaagagtaaggccgyctcttgtattagcctatatgtttggggtcctgcctatctttgaaa

SEQ ID NO: 1834 - DNA, 844 bp, Rattus norvegicus
tctagaacatccgcggtggcctccactttaatcaccctgcacctcgagtcttccaagttactggttgggttgggaaatgaacccgtttggaaatgagctcagataagggctgcccgtccgctacacggacatccagaaacgaacactagcacagaacacttggaaaacaatctggaaaagatcctcactgccccatgtgcaagaagctgctgtggactgcagctgtgactgtccccaactccccaggcccaccctaggctttcctttctccagcacagcggagattgacgtggaacagcccaccccacgcaggcgcaagagcctggagactaggacgtggcagggtgtgtcctaatagggggagtggcggggggctgggacttaagttagggacgtgttcatggtggggcgtggcctgtttgaggacctagtcactcagcgaaagtttggtagctaagggtgtggcgggtgccggggacaaggcggggcttatagtgtagcgtcgctgggggcggggccctgatgggtgtgtgatcttggcaggggcgtggcgtagcggggccaggtggggctccgctgggctggccagggcgtttccgttgcacggagagtactgcctgtctctcggcgtgtgcatctgtcctgctctcaaccgcagcctgcgccctaccttctggtgagtgaccatagtaccgggagcgactcctccaccaagggcgcaggacccttttgggggcgggagaccagagctccagtgaccatctctctcttttcccctcttccagcagctccagcctactcctgaccgacagcatcatggtaagccgtgcgcccgccaccaggg

SEQ ID NO: 1835 - DNA, 728 bp, Rattus norvegicus
ctgctcctgcccacagctgtgcgtgctgatcgaatgcggggcggccggaacaagtttgggcccatgtacaagagagaccgggccttgaagcagcagaagaaagcacagattcgggccaatggcttcaaactggagaccggaccaccgatgggggttcccccgccaccccctcccccaccggactacatgttaccccctagcctgcatgcaccggagcccaaggccctggtctctggcccacccagtgggccgctgggtgactttggagccccatctctgcccatggccgtgcctggtccccacgggcctctggctggctacctctatcctgccttctctaaccgcaccatcaagtctgagtatccagagccctacgccagcccccctcaacagccagggccaccctacagctatccggagcccttctcaggagggcccaatgtaccagagctcatattgcagctgctgcaactagagccagaggaggaccaggtgcgtgctcgcatcgtgggctgcctgcaggagccagccaaaagccgccctgaccagccagcgcccttcagcctcctctgcaggatggcggaccagacctttatctccattgtcgactgggcacgaaggtgcatggtatttaaggagctggaggtgggtacctccttacagacccccaacccctggctctagctactaatcttggctgcctggcatcaccctttgatggacagccc

SEQ ID NO: 1836 - DNA, 1692 bp, Rattus norvegicus
atggtgacaagagggtgatgggctgctcccgttgcagatgtgaaattcctgaacaaccacagcctggtaaaggacgcccaggagaaggccaacgccgccctgctggattacaccttgtgtcactacccacactgcggggacaaattccagcagttgctattgtgcctggtggaggtgcgggcactgagcatgcaggccaaggagtatctgtaccataagcatttgggcaacgagatgccccgcaacaaccttctcattgagatgctgcaggccaagcagacttgagcctgggtgccaggcagcgggcagtaggcagggatgccactgcctccaaaagactccttgcattaggtgatccaggagccctgtccctaagcccctgcccctgagctccagagctgtgtgtttgggatgatgggcaaggatgggcggggactgcccgggacaggttgccttcgctagccactggcatgtgtctgccacttggagtgccccagagggtgacttctaaccactccttcctccgtctgcccccagctttttttcctggtatctgaggtcccaggaggaggcttgggattccttggtgggcctgaatgtctgttgggtcagaggtcatcctttccctctctcctgtgatcagaggcagaggaaggtctgtaggcatcaatgaaggcaggggaggggggtctccagactcccctgaagcagggaaggaagtccacattgcaaactgagtttgctaaattgggtctctagaggacaccatgagatcggatagggcaaaaagaccgcctccagccccccccatctaattctgatccactccctggaaagggactttgttgtgatcatccttttctgcatcccagctacccaaggaggaggaggagtctggccctgccctccacsagctggctgggctggtacttatctgcaaggttgcagtcaccaggattctcttccttttacctagacagtccttggaaagtgtgtgagagagaaatgggcaggagacagactgaggactgaactgggatgtggggattagcaccaaagctctttctcctgacatctccttcctgatcatctggtcatcttcatgtatcttgcctcactcctgagaagagctgttgcttgccctctgtcccagccccactataggagcaacgagaggcctgcaagggcttagagtcctttcaggtggggatatgggtaaacctaggagaactcacggatctttatatgacgacagtgctgaggactctctcatggctctatccttttgggtcccttgtcacaaccyttgaagctggcctcagtcccctggmtgctgctttgcctccaaaagtcactcttcagggccaagcactgargggagaggcctaagctatyctctgtttcagactgggcatccactgtctttcctgctttcgtgtcagatttacagttacgctaggcctgcccaactggacaaggctgtctcctgtcttcaaccaccytggctcagaccccacctctgcccctgaaatgcgtgatcccaccaaggccagagacccacagccccaagacaagaagtgcccttataaacccctgcagccctgcwgccctgaaataaattttgcaattagtttccagtarmmwwwrwrawwwrawtgtgaagcaaggtgtagtccctggggtaggttgggg

SEQ ID NO: 1837 - DNA, 867 bp, Rattus norvegicus
cgttgcwskmgggcgstggccagcktkttgcagcggccgakgccgrygartywkywykkkttttttggactcggaggtcgtgcasatctgctggacttgggtccggggagtcctggtgatgggctgagcctagccgcgccgagctggggtgtcccggaggagccacgaatcgaaatgcttcatggaaccaccaccctggccttcaagtttcagcatggagtcattgttgcascggattcccgggccacsgmwkgtsvctamakwgmkkcccrgrcmgtswaswawgtgayasagatsarssswtacvttctgggcaccatggctgggggtgcascggattgcagcttctgggagcggttgttggctcgacagtgtcgaatctatgagcttcgcaacaaggaacgcathtcggtcgyggcggcykccaaactgctkgccrashtkswgyatsagtacawwggcatgsgsmtgtccmkggscaccatgatmtgtggctggsmtwwrakaggccsgrgcytmtamtatgtagacagtgaggggaacaggatctctggaaccgccttctcagtgggatctggctccgtgtatgcgtttggagtcatgratcgaggctactcytatgacctacaagtggaggagscctmtgacbtggcccgmcgagccatytaccaagcyacctacagagatgcctactcsggaggagcagtcaacctbtaccatgtgcgggargatggctgsatcygtgtytccagtgacaatgtagctgacttacatgacamgtatacttcatctatcccctgakggaaggtggagtgccctggttataataamtaatagtacccgtwmmmwaaaaaaaaaaaaaaaaaa

SEQ ID NO: 1838 - DNA, 1973 bp, Rattus norvegicus
gaattccgactagttctcagagagttgggcatgcaaaaccaaccaccttttgtgggtaggtcctattgattcctctcgttttctttacttagtaccagctgctgtcaacatcacatcctgcatcagcacttctgggggttatgggatcatcctgacctggtcctgcccatctgggagttatgagacctttgaggtggaagtgggcaggaagtggagctcccaaaatggatctttgtgtgggaagggcatgaccgtgttagatcttgagccagctcagtcctatacagctaccgtcacgactgtctctaatagcctgaaggtccagtctgcccctgcaacctgccgcacagagagtacagccgtcattgctggagccattgtaggcatcctcctgcttttcatcctggtgggcctgcttattgtcttcctgaagaggaggagaaagaagcagcagccaaaggaagtgcccaaggatctggtgttccgcttcccaggggatatcctggccaaagactttgctgaccatgtcagggagaatgaaaaggacagcaactgtggatttgctgaggagtaccagcaattggctctggagggccaaggccagtctcagatgacagcattggctctagagaatgtatccaagaaccgctacaggaatgtgctgccctatgactggtcccgggttcccctgcagcccctccatgaggaaccaggctcagactacatcaacgccagttttatgcctggtctctggagccccaaggagttcattgcaacccagggtcccctgcctcacactgtgagtgacttctggcgaatggtgtgggaacagcagagccacaccctggtcatgctggccaactgcatggagtctggacaggtgaagtgtgagcattactggcccctggatgctcagccctgcactcatggccagctgcaggtgacgctggttagtgaggaggtgacagagaactggacagtgaggcatcttcagctcttccatatgaaagaacagcagactctctctgtgcgccaattccactacgtggcctggccagatcacggagttccttactccccagaccccttgctggctttccaaaagttgcttcggcaatggttggatcagaccatggatggaggtccgcccattgtgcattgcagtgctggtgtgggccggacgggcaccctcattgcactggatgtcctgctgcggcagctggagtgtgaggggctggtggatcccttcagctttgtgaagaagatgagagagagccggccattgatggtgcagacagaggcccagtatgtgtttctacatcagtgcatcttgagatccctccagaagccagatccagccctccctgcaaaggaggcaacctatgagaacgtggcaagcttagtttatgagaatgcatccgccatcagggcccatgagtctgaggtctcagcttytgggtgctgaacctagacaaagcaatactcaggcctggtctgggcctgtgctggagcccagatacctggacctccaagtgaactgaggattggagtcctagcctcctcaacccttgggaggaagcactgaaaacccatctctgttgtccaagggcaggaaggactgatgtacttcaacttgtgagccctgcctgagagctggaacctgagaacaggggtgacggtaggtttcctgttctttgagtggaaacagctacagcctgggtaggcaggctctcaaagaaacaggctggaacctggattcaaaagaaggaatcagggtcttgaattctactacctgaagagcaaaggcaggcgggtacctgccccttttttacttcagaaaccaaatcagtctcctttaatccaaggctgaagggagtccctttgcttgtggtctccttgtgccccatgtctgtacattttttccttctgtataatttattaaactcttctccccgaaaaaaaaaaaaaaaaaa

SEQ ID NO: 1839 - DNA, 2710 bp, Rattus norvegicus
gaagcagkcamgwgcaaaggagaaaaggagtcttctcattctcagtggagagcattgtggakctcgggagacgacgctcacagacacaggattactatcctacccacggtgactctggcaccagctggtggagcagtgggggatggcatctcagattcaaaagctactgaccactaatcaggacctgctgctgatgcaaaaaggaacgatgatgcgcaaggtgaggaccaaaagctggaagaagctaagatacttcagacttcaggatgacggcatgacggtctggcatgggmggcaccttgaaagcatatccaagcccactttttcaatctctgatgtggagaggatccgtaagggccaggattctgagctgttgcgctatctggtggaagagttccccctggagcaaggcttcaccattgtctttaatgggcgccgccccaacctggacctagtggccaacagtgttgaagaggcccagacttggatgcgaggactccagctgttggtggatctcgtcgccagaatgaactaccaggagcagctggatcaaatgttgagagaatggttccaacaagcagacmgraaccaggacagccggatgagtttcagagaagctcaacggctgctgcttctgatgaatgtggaaatggatgaagaatatgccttcagtctttttcaggaagcagatgtttcccaatctaatactctggattcagaagaatttgtacagttctataaggccctgactaagcgcactgagattgaagaactatttgagaacttttcatctgacaaacagaagctgaccttgctggaatttgtagatttccttagagaggaacagaaagaaagcgaccattcctctgaccttgctctgaaactcattgaccgctatgagccttctgagaatggcagattgctacgtgtgctgagcaaggatggcttcctcagctacctctgctcagcggatggaaacatcttcaaccccgactgcctccctatctatcaggatatgactcagcctctgagtcactactacatcaactcctctcacaacacctacctactgggtgaccagttttgtggccagagcagcgttgaaggatacatacgggccttgaaacgggggtgccgctgtgtggaggtggatacrtgggacggacctgacggagagcccgttgtttatcatgggcgtacactgacctctcgtatcctgttcaargatgttttggcaacattagcacaatatgccttccagtcgtcagactacccactcatcttatctctggataaccactgcacttgggaacagcagaagaccatgctggcacaccatctgattgcgatcctgggagagcagctkctgagtaccaccctagaggaacaactgattgatataatgccctcgccagagcagcttcgggggaagatcttggtaaaaggaaagaagttgagaacaattgaggttgttgagtctgacaaggaggaagaagagctggagaaagatgaggggtcagatctggacccagcctccgctgagcttgacatgcagtctcagcccgagtcccaggagcaggcctctgggaacaagagcaagaacaagaagaagtttctyctccagagttccacaaccatcctatgcccrgacctatctgccctggttgtctacttgaggactgctcccttctgcagckwsrctcactccaaagaaaactaccacatctacgacatttcatccttttctgagtccaaggccaagaacctcatcagggaggcaggcaatgagtttgtacagcacaatgccagacagctatgccgtgtataccccagtggtctgaggacagattcatcgaactataacccccaggaacactggaatgttggctgccaaatggtggccatgaacatgcagactgcaggaagtgcaatggacatctgtgatgggctcttccgccagaatgggggctctggctatgtgctgaarccagaattcctgagagatacccagagttccttcaatcccatgaagcccgttagtctttataaagcccagatccttgtagtccaggtgatcagtggtcaaagactccccaaagtggacaaaaccaaagagacaaccgttswsgakccactggtgagagtagagctctatggtgttcctgaagacacaaagcagcaagagaccagctatgtggagaacaatggtattaatccatactggggggagacattctatttccagatccaggtgcctgaacttgctatgctgcgttttgtggtaaaggattatagcaggacatcccgaaataactttataggccaatacaccctgccttggacctgcatgaaacatggctaccgacatgtatccttgctctccaaagacggcactagcctccatccagcctcccatctttgtgtacacctgcatgcaagaagacctggatatggatgagccctgagaaacacagggagggtcttgaagcagracaatctacagatgcactcttttccaacctacaacttcctcagcatccagagccagccaaaggatcagwggcggaccaaggttcccargtgmmggttgaggaagaatcctgacccagaactatgactytagagaacagtgcacagccgagtccccactggactgctgctccttagctggtctaaatagagcttcwmwrwmmaamwwraaaaaaaaaaa

SEQ ID NO: 1840 - DNA, 2228 bp, Rattus norvegicus
ggaaagtcttcctggctggctgaatgctgtggtctgggggctcctgcttctcttctgccaagtgcagggccaggactcagccagccccatcagaaacacgcacacgggtcaagtgagaggcagttttgtccatgtgaaggacactaaatctggtgtccacaccttcctgggaattccctttgccaagcctcctataggaccgctgcgctttgcacctcctgagccacctgagccatggagtggtgtgagagatgggacatcccaccctgccatgtgtctacagaatatcgatggactgaatctagaaaatctgaaaattaagatgagcaggtctcctgtctctatgtctgaagactgcctatacctcagcatctacacaccagcccacacccataaggactctaatctgcctgtgatggtatggatccatggaggtgggctatgttggggcatggcttccacatatgatggatctatgctggcagccattgaggatgtggtggtggtcactatccagtaccgcctaggtatcctgggcttcttcagcactggagatgaacatgccagaggcaactggggatacctagaccaagtggctgccctacggtgggtccagcagaacatcgtccactttggaggcaaccctgaccgggtcactatttttggagagtcagcaggtggcataagtgtgtcttcacatgttgtgtcccccatgtcccaagggctcttccatggtgccatcatggagagtggagtggcactactacctaaccttatctccaacacctctgaggtgatctacacaatggtagccaacctatctggatgtgagcctgtggattcagaggccttgatgagctgcctacgagagaagagtgaagaggaaatgctggctattaacaatatcgtcaggaccatctctggtgtggtagatgggaagttcttacccaggcaccccttggagttgttggcctctgtggattttcaccctgtccccagcatcattggtatcaatagtgatgaatatggttggataattcccatgctccaccctgatagcaccatgaaggaaataaacagagagaccatgcgggctgttctgaagaacacagcagtacagatgatgctgcctcctgagtgtagtgatttgttgacggaagagtacatgggggacactgaggattccaagactctccaaatacagttcaatgagatgatgggggacttcatatttgtgattcctgctcttcaagtagcacactttcagcgttcccatgctcctgtctatttttatgagttccagcatcagtccaacttcctgaaggatatcaggccacctcatgtgaaggctgaccatggtgatgagcttccttatgtgattggatacttattctgggacatgaaatttgtcttcactgaggaggagaagctgctaagcaggaagatgataaagtactgggccaattttgcacgtcacgggaatcccaacagtgagggtctaccctactggcctgcattggaccatgatgagcagtacctgcagctggacatccagcctgttgtgggccgagccctgaaggccagaaggctgaaattctggaccaagactctgccccagaagatccaagagctaaagggttctcaggacaatcacacagagctataatgtcctgtgtcaagaaaactgtgtagacttgagtacagggtttctgaagcctctaaagtctacacttgaatggatatatcacatctgttggatgaccctgcaattaaggttgaagtcgaccatgtctagataagctctctgaacctggtgcaaaatggaagactccctttctcagtggggtttcctctcctttacccaatcttatctggaaagtgttctaagcacaagtgcctgaccttatctagagaatggccttgcacaaagcttcctgcaagtgccacaaggttcagcacatacatcccactcagtccttcccaccatatgataattaggtactgttatgaccaatcagccactcctgcctgtaaccccagaaatcctctgaggaaagtcacataacttatggccagattacagattcaacttcctctttcaggatatgaacttgtccagcaggttcttggcatattcctcttcatgtaaatgaaacattcccaccctaataaataatctaccttcaccctggaaatccctacccacaccccaagatctacatagtgct

SEQ ID NO: 1841 - DNA, 3032 bp, Rattus norvegicus
gcgtgaactcctgcttgccagtcgccggtcaggagcctcggagccgccacaatggggatgtccaagtctcggggttgctttggctacccattgagcatcttcttcatcgtggtcaatgarttctgygaaagrttctcctactatgggatgcgagctctcctggttctgtacttcaggaacttccttggctgggatgatgacctctccacggccatctaccatacgtytgttgccctcygctacctgactccaattcttggagctctgatcgcagactcgtggctggggaagttcaagacaattgtctcactatccatcgtctacacgatcggacaggccgtcatctcagtgagctcaattaatgaccttacagaccatgaccacgacggcagtcctaacaaccttcctttgcacgtagcactgtccatgatcggsctggscctgatagsccttggtacaggaggratcaagccctgtgtgtctgcatttggyggcgatcagtttgragagggtcargaaaaacagsgaaaccsgktcttttccatcttttatttggctatcaacgcaggaagcctgctctccacgatcatcactcccatactcagagttcagcagtgcggaatccacagccaacaagcttgttacccactggcctttggggttccggcagctctcatggctgttgccctaattgtgtttgtcctcggcagtggaatgtacaagaagtttcagccccagggcaacatcatgggcaaagtggccaagtgcattsgstttgccatcaaaaacaggtttcggcaccgaagtaaggcatttcccaagaggramcactggctggactgggctaaagagaaatacgatgagaggctcatctcgcagattaagatrrtgacgaaggtgatgttcctgtacattcccctccccatgtyttgggccttgtttgaccagcagggttccaggtggacactgcaagcaacgaccatgactgggaaaattggaacaattgagattcagccggaccagatgcagacggtgaacgccatcttgattgtcatcatggtccccattgtggacgccgtggtgtatccgctcattgcaaaatgtggtttcaactwcacctccctgaagaagatgaccgttgggatgttcctggcatccatggcctttgtggtggctgcaattgtgcaggtggaaatcgataaaactcttccagtcttccccagcggaaatcaagttcaaattaaggtcttgaacattggaaacaatgacatggccgtgtattttcctggaaagaatgtgacagttgcccaaatgtctcagacagacacattcatgactttcgatgtagaccagctgacaagcataaacgtgtcttctcccggatctccaggcgtcaccacggtagctcatgagtttgagccgggtcaccggcacacccttctagtgtggggccccaatmwmtaccgwgtggtmaaagacggtcttaaccaaaagccagagaaaggggagaacggaatcagattcgtcagcacccttaacgagatgatcaccatcaaaatgagtggaaaagtgtacgaaaatgtcaccagtcacagcgccagcaactatcagtttttcccttctggccaaaaagactacacaataaacaccacagagattgcaccaaactgttcatctgattttaaatcttccaaccttgacttcggcagcgcgtacacctacgtgatcagaagtagggcgagtgatggctgcctggaagtgaaggaattcgaagacatcccacccaacacggtgaacatggccctgcagatcccacagtacttcctcctcacctgcggcgaggtggtcttctctgtcacaggactggagttctcctattcccaggccccgtctaacatgaagtccgtgcttcaggcaggatggcttctaaccgtggccatcggtaatatcattgtcctcattgtggctgaggcaggccacttcgacaaacagtgggctgagtatgttctgttcgcctccttgctcctggtcgtctgcatcatatttgccattatggcccgattctacacctacatcaacccagcagagatcgaggcacagttcgatgaggatgagaagaaaaagggcgtagggaaggaaaacccgtattcctcgttggaacctgtctcacagacaaacatgtgaagatcagaaagcaagtggagaacataccaagtccagcattcaccatgacctctgcccaagggacaggaccctccaccacagagtccttgcctggagaaagacttcagacattgtgagccaaaataataacaaagccaggttttcaggctgacggctgtgaatctgaaactctaggggagcctttttaatttgtttttcttgagacagggtatctctgtgtaaccctggctatcctggaactcactctatagaccaggctggcctcgaactcacagatatctgtctgcctctgcctcctaagtactgggattcaaggcatgtacggcaactgcccagctaaaatattatttataacatgcactttctgggttttttgtttttaaaacatacttttttttttaacactgggccatttctaacatttctgcacagaagtggatttagctcagattaacttaattttgaaaaggtaacagtactgtttttttttccttaatgctcttatgaaaacaatgttgaatttacagagggctttttgtgtttttgtttttttgttttttgttttttgtttgggagctggggaccgaacccagggccttgagcttcctaggtaagcgctctatcactgagctaaatccccagccgacagagggcttttttagtagtgtgtagtgagtatcagctgattcgagctaataactttaccttggggtttttgtttgtttgttttcctggtctcctttgcctgacctctttttaaattatgtgtaattcaaaagactattcaagtgatggttagtcatgagtcgtgacgtttgactggtgtgaagtaaattcttgttcttaag

SEQ ID NO: 1842 - DNA, 1860 bp, Rattus norvegicus
caaagagacacagcccgtgagtgatgccagtctacttaatctacaaaaacaacgggcagcactgagggcagcgtctgcttgtttcttcttagttcattttcgtgacatgatatttattttgtgaaagacgcgtggtcaggaaacctcagtagctgtgttggtggcatctcccagcattccttccttctggaagacatggtcctggctttttggttggccttcttcacctacacctggatcacactgatgctggatgcttctgccgtcaaggaaccccaccagcaatgcctctcttcaccgaaacaaacccgcattcgggaaactagaatgaggaaagatgaccttactaaagtctggcccctgaaacgtgaacaactgttgcacattgaagaccatgatttctccacgaggcctggatttggaggttcaccagtgccagtgggtatagatgtccaggttgaaagcattgacagcatttcagaggtcaacatggactttaccatgacgttttatctcaggcactattggaaggatgagaggctctcctttcctagcactacaaacaaaagcatgacctttgatcgcagattgattcaaaagatttgggtgcctgatatcttctttgtccattctaaaagatccttcatccatgacacaactgtggagaatatcatgcttcgagtacatcccgatggaaacgttctcttcagtctcaggataacagtttcagccatgtgctttatggacttcagcaggtttcctctggacactcagaactgttctctagagctggaaagctatgcctataatgaagaggacctaatgctctactggaaacatggtaacaagtccttaaacacagaagagcacatttccctttctcagttcttcattgaggagttcagtgcatccagtggattggctttctatagcagcacagggtggtactacaggcttttcatcaactttgtgctacggaggcacattttcttctttgtactgcagacctatttcccagccatgttgatggtaatgctttcatgggtttcattctggatcgaccgaagagctgttcctgcaagagtttccctgggaatcaccacggtgctcaccatgtccacaatcgtcactggtgtgagcgcctctatgccccaggtgtcatatgtgaaggcagtggatgtgtacatgtgggtcagctccctcttcgtgtttctgtcagtcattgagtatgcagccgtgaattacctcaccacagtggaagagtggaagcagctcaacaggaggggaaagatatctggaatgtacaatattgatgcagttcaagccatggccttcgatggctgctatcatgacggtgagactgacgtggaccagacttccttctttctacactctgaagaggactccatgagaacaaagttcacaggaagtccctgtgcagattcatctcagataaagagaaaatccctgggaggaaatgttggtagaatcatcctggaaaataaccacgtcattgatacctactctagaattgtcttccccgttgtttacataatatttaatttgttttactggggtatatatgtgtgaagaggactttttgcttgctgactttttcctttctttgcagtactcaggatgttgcatgtgctagataattattttaccatccacagcctgaagaggagtgttttctataaacttccgttggagtcagatggtgttatttacctcctggatataagttgggcagttaaactgggatagagccagtcatgtctcttggcctcaagaagatgtaaagatgattgattaacatttattgaaatgttcggagtcttggggaattttggctttttt

SEQ ID NO: 1843 - DNA, 1582 bp, Rattus norvegicus
acgactgaaggagagatgggtcaaagtcagagkggtggccatggtcctgggggtggcaagaaggatgacaaggacaagaaaaagaaatatgaacctcctgtcccaactagagyggggaaaaagaagaagaaaaccaagggaccagatgctgccagcaaactgccactggtaacacctcacacccagtgccgcctgaaattactaaagctggagagaataaaagactatcttctcatggaggaagaattcattagaaatcaggaacagatgaaaccactagaagaaaagcaagaggaggaaagatcaaaggtggatgatcttaggggaaccccsatgtctgtargaaccttggaagagatcatcgatgataatcacgccattgtgtccacatcggtgggctcagaacactacgtcagcatcctgtcatttgtagacaaggatctgctggaascgggctgttcagtmctgctcaaccacaaggtgcatgctgtgataggggtgctcatggatgacacsgatcccctggtcacagtgatgaaggtggaaaaggccccccwrgaaacctatgcagatattgggggactggacaaccagatccagkaaattaaggaatctgtggagctccctcttacccaccctgagtaytatgaggagatggggataaaaccacctaagggggtcattctctacggccmgycaggracaggkwaaactstattggccaaagcmgtakcgarccasacttcagcgactttcttgcgagkggktggctcagagcttattcagaagtacctaggtgacgggcccaagctggtccgggagctcttccgggtcgctgaggaacacgcaccgtccattgtgttcattgatgaaatcgacgccattgggaccaaaagatatgattcaaactctggaggtgagcgggaaatccagcggacaatgttggaactgttgaaccagttggatggatttgattcgaggggagatgtaaaagttatcatggccacaaaccgaatagaaactttggatccagcacttatcagaccaggccgmrktgacagaaagatcgagttccccctgcctgatgaaaagaccaagaagcgcatcttccagatccacmcaagcaggatgacgctggctgatgatgtamccttggatgacttgatcatggcaaaggatgmcytctytgggsctgrcaysarggcaatytgcacaraggctggcttgatggctctgcgggaacgcasgakgaaagtgmcaaacgaagacttcaagaaatytaaggagaacgttctgtataaaaaacaaraaggcacccctgaggggctgtatctctagtgacacagttktcttcagggaacttaatgagtttcccccacctgggaaratgggaagctgccccaaggaatccatctwccagttaagttttgytagtagaaagcccgtgtcgtggaggacgctgtgygsyctgtcbccaatmtgttgttggtcaktgtsccstgcagctykccgctcmcaataaaggattgtmmtggwwwrmwwwmwawwamwrhaadraaammatgaaaaaaaaaaaaaaaaa

SEQ ID NO: 1844 - DNA, 114 bp, Rattus norvegicus
ttcttggagctgctgagccactcagctgatggtgttgttgatctgaactgggcagccgaggtgctgaaggtgcagaaacgacgcatctatgacatcaccaatgtcctggagggg

SEQ ID NO: 1845 - DNA, 1945 bp, Rattus norvegicus
tggaactcttggaaccagagctgaacagcttgaccgcagggaccgcaaggctggtgctgcgcagggcagaacgccatcaaccaagcccaagaccagccccagccacacggcgagaccttgtctccagcacgagagactctgtactcaggaagccatggttgctcactcccctcccagcccctgcttgtctattctgtctctggataagttcttcctataaactctgactgaaagaacatggctctcgaaggtggaattcaggctgaggacggtggtgcttctctcagagaactctgtgtgtgtgcactgtccacaggggtaaactaagacccaacctgccttgacaacgaggaacaccagagctggtacatcctcctaagacatcgtccatcttgcatgagacagattctccaagcataggaaaagcaggccgccagttatggagcgggacaatggcaccatccaggctccaggcttgccgcccaccacctgcgtctaccgtgaggatttcaagcgactgctgctacccccagtttactcagtggtgctggtggtcggcctgccactgaacgtctgtgtcatcgcccagatatgcgcatcccgccggaccctgacccgttccgctgtgtacaccctgaacttggcactggcggacctgctgtatgcctgttcactgcccctacttatctataactacgccagaggggaccactggcccttcggagaccttgcctgccgcctggtacgcttcctcttctatgccaacctacacggcagcatcctgttcctcacctgcattagcttccagcgatacctaggcatctgccatcccctggccccctggcacaagcgtggaggtcgccgtgctgcttgggtggtatgtggagtcgtttggctggttgtgacagcccagtgcctgcccacagcagtctttgccgccacgggcatccagcgcaaccgcactgtctgctacgacctgagcccacccatcctgtccacccgctacctgccgtatggcatggccctcacggtcatcggcttcttgcttcccttcacagccttactggcctgctactgtcgcatggcccgccgcctgtgtcgccaggatggcccagcaggtcctgtggcccaagagcgtcgcagcaaggcggcccgtatggctgtcgtggtagcagctgtctttgttatcagcttcctgcctttccacatcaccaagacagcctacttggctgtgcgctccacgcccggcgtctcttgcccggtactggagaccttcgctgcagcctacaaaggcacccsrcsmkkcgccagtgctaacagcgttctggaccctatcctcttctacttcacacaacagaagttccggcggcaaccacacgatctcctacagaagctcacagccaagtggcagaggcagagagtctgagaccccaggggaggccctgaagcactggctgcaatgtgtttgcccactggggtcatggtgcctgaagctttctcccaatcggaaaccataccgagaagaagcaaaacttggcccaacatgcctggccctccaaaatttctatgtcaaccacaaaactaagacacctgtgtttcggggactggtcagttcatgcttgttataccagaattcaggatgtcatgacaggataacaagctctaagccagcctggtctacatggtgaaaccccatctcagacaatcaagggttgagctaggtcctggaatagcactgcaaattctaacaaaggtcttcccgcctgaccgttcttgtgtttacaaggtagaggggaccactggtacaccatcacgaacgtgaggcaaggcccctcctgtagaggaagaagctgggaaagctcacattcccatccatttgccaagacttttgcacaggagagagaaataaatgtgttcttgtgtttgttaaaaaaaaaaaaaaaaa

SEQ ID NO: 1846 - DNA, 693 bp, Rattus norvegicus
agcagttttggtggtggatttggtggaggacttggtggtggatttggtggaagacttggtggtggatttggtggtggtcttggcgatgggctcctggttggcagtgagaaagtgaccatgcaaaacctcaatgaccgcttggccacctacctggataaggtgcgtgccctggaagaggccaacagtgacctggaggtgaagatccgtgactggtaccagaggcagcgccccactgagatcaaagactacagcccctacttcaagaccatcgaggacctgaagagcaagatcctggcagccactgtggacaatgccaatgtcctcctgcagattgacaatgcacggctggcagctaatgacttaaggaccaagtatgataatgagacgtccttgcgtcagttagtggaaagtgacatcaacaaccttcgctgtgtgctggatgaactgactatgtccagggcagacctggagatgcagatcgagagtctcacggaggagctggcctacctgaagaagaatcacgaggaggagatgcttgccttgagggtcagacttggtggggacgtcaacgtggagatggacgcagctcctggcgtggacctgagccgcatcctgaacgagatgagggaccagtatgagcagatggcagagaagaaccgcaaagatgtggaggcatggttagaagccacctct

SEQ ID NO: 1847 - DNA, 768 bp, Rattus norvegicus
ggacaaaaaggcaagaaaacaagttttgatgagaatgatagtgaagaattggaagataaagattcaaaatcaaaaaagcctgccagacctaactcagaggtgctcctctctgggagtgaggatgcagatgatcctaataaactttctaaaaaaggtaaaaaagccywkwwwtywwytwwwwwamgkgatkrgtyggaagaggatgaagacrrymgcaaarkaagtaaagaacgttcgagagtaaactcctcaggtgaaagtggtggtgagtctgatgaatttttgcagtccagaaaaggacagawaaaraatcagaagaacaagtcagttcctaccatagacagtgggaatgaggacgatgactcttccttcaaaattaagacggtggcccagaagaaggcagwaaagaaagagcgtgakaggaaaaagakagaagaggagaaagcaaagttgcgaaaggtgaaagagaaagaagagctagagaagggcaggaaggagcagagtaagcagagggagcctcaraagagaccggacgagkaggtgttggtgctcaragggactcctgatgcaggtgctgcctcagaaragaaaggagacattgctgcaacyctggmmgawkdcwatkaaggagwcaaaaagaaaaaagataagaagaaaaagaaaacagaaaaagatgataaagaaaaagagaagaagaaaggsccaagcaaatccactgttaaagctatccaggaagctttggctaagctcagagaggaggaggagaga

SEQ ID NO: 1848 - DNA, 1490 bp, Rattus norvegicus
aagaaagatgatcctgaaacacacgggaaaggcctacctaaaaaagaggcaaagtctgctaaggagagacctgagaaagagaaagctcaatcagaagaaaaatcctcatcaaaacacaaacacaaaagtgacagtgtccataaagtgggtgacgagactgaacctcattcttctgagaagagtgaagcagaggaaagtgttcggaagcaaagtcagcaaaccaagctttcttcagatgataaaactgagcgtaagcgtaaacacaggaatgaaaggaaattgtcggtgttgggtagagatgggaagccggtgtctgtatacactataaaaacagatgagcatgcacgtaaagataacaaaaaggacaagcacctgtcatctgaaaaaaccaaggcagaacacaaatcaagaaggtcaagwgaytckrmacktcagraagatgttctaagctccaagcaacacagtgtaaccttgcagaaaagaagtgagagctgttctgaagacaagtatgagacagactccactaatgctgacagcagctcaaagccagaagagcttcttcataaggagaggcgacggacaaagagtytgttggaagagaagcttgtgttaaagtctaaatcaaaaagtcaaggcaaacaaataaaagttgctgaaacagaatcacaggaaggtgtcacaaaacaggtgacaactccaaagcctgataaggagaagaacacagaggacaacgacacagaacggcagcgcaagtccaaacttgaagacagaacttgtgaagaagctgtcgctgaacctgcattagagagtgctgtgccttcagcacatagttcacaaaaggactctgggcacagagctaaggtagcatcagttaaggagaagcataagacggataaagactcaacctcctccaaacttgagcggagggtctcagatggtcacagaagcagaagcctaaagcacagtaataaagacgtgaaaarraaaraaraaaawaagccagacgacaagaatggtaaagaggttgacagcagccatgaaaagggcagagggaatggcccagtcacagaaaaaaaamwaarwaraaggctgtgtgaaaaccgaagaggaagcacgtcacaggaaatggccaaggaggataagttagcagcgaacttgtcaggcactgccagtacttcctctctgcagagacccaaaaaaagcacagagaccgcattgatccctgaacaagagccaatggaaattgattctgaggcagctgttgaaaatgtgtctgaactttctaaaaccgaggacatcagtagtaatagttctcagcaagacactgactttgaaaatgttacaaaacataaagccgctgctggagttttaaaggatgagttaagaacttctatggtcgattcaaaaccagcagcagctgtgacctgtaaatcagggcgtgggctaacaataacgagcaattctgaaaagcatgctgaccataaaagcac

SEQ ID NO: 1849 - DNA, 2155 bp, Rattus norvegicus
cccaaacagttcagataccgctggtcaggcctgcgctgtacacagctcagccatgagcagcagaaagaacttttccaggctcacctggttcaggaagcagaggaaagccgtggtcaacagcaacgacaagaagatgcctaacgggatcctagaagaacaagagcagcagagagtgatgctactgagcagatctccatcgggtcccaagaagtacttccccatccctgtggagcacctggaggaggagatccgggtgagatctgcggatgactgcaagcggttccgagaggagttcaattcattgccatccggacacatacaaggaacctttgaactagcaaataaagaagaaaacagagaaaaaaacagataccccaacattctgcccaatgatcattgcagagtgattttgagccaattggatggaatcccctgctctgactacattaatgcttcctacatagatggctacaaagaaaagaacaaattcatagcagctcaaggccccaagcaggagacagtgaatgacttctggagaatggtctgggagcaaaggtcagccaccattgtcatgttgacgaacctgaaggaaaggaaggaggagaagtgctaccagtaytggccagaccagggctsttggacttatgggaacatccgggtgtgtgtagaggactgcgtggtcctggtggattacaccatccgcaagttctgcatccatccgcaactccccgacagctgcaaagctccacggctggtctcacagctgcacttcaccagctggcctgactttggggtaccatttacccccatcggaatgctgaagttcctgaagaaagtgaagacactcaacccctcacatgctgggcccattgtggtccaytgtagcgcsggcgtsggtcggactggcaccttcattgtgatcgatgccatgatggacatgatccactcggaacagaaggttgacgtcttcgagtttgtgtctagaatccgcaatcagcgccctcagatggtccagacagatgttcagtatacattcatctaccaagccttactggaatactacctctatggggacacggagctggatgtgtcctccttggagaggcacctgcagacgctacatggcacagccacccattttgacaagatcgggctggaggaagaattcaggaaactgaccaacgtgcgaatcatgaaggagaacatgaggacgggcaacctgccggccaacatgaagaaggcccgtgtaatccagatcatcccatatgacttcaatcgggtaatcctgtccatgaaaagagggcaagagttcacagactacatcaatgcatccttcatagatggctacaggcagaaggactacttcatggctacacaggggcctctggcgcacacagttgaggacttctggaggatggtctgggagtggaagtcacacacaatcgtcatgctgactgaggtgcaggagcgggagcaggataaatgctrymagtattggccaaccgagggctcagtgactcacggagatataactatagaaataaagagtgacaccctgtctgaagcaatcagcatacgagactttctggttactttcamacagcccctggcccgccaggaagagcaggtccggatggtgagacaattccatttccatgsctggcctgaggttggaatccccactgagggtaaaggcatgattgacctgmtckcggcagtgcagaagcagcagcagcagacagrcaaccaccccatcaccgtgcaytgcagygcsggarcmgggcggacaggtacattcatagcactcagtaacattttggaacgagtgaaagccgagggactcctagatgtgtttcaagctgtgaagagcttaagacttcagagaccacacatggtgcaaaccctggagcaatatgaattctgctacaaagtggtacaagattttatcgatatattttctgattatgctaatttcaaatgaagatccctgccttaaaatattttttaatttaatggtcagtatattttgtaaaaaaaatcatgttaatttatttcctagtggatattaatatccgtcctgattcctttggtatatattttgttatgttctaaaggctacctgctgtaagattattaaatcataaatgtccttttt

SEQ ID NO: 1850 - DNA, 416 bp, Rattus norvegicus
ctgcatcccaacgacaaagtcatgggacctggggtttcctacttggttcggtacatgggttgcgtggaggtcttacagtcaatgcgagcccttgacttcaatacccggactcaggtcaccagggaggctatcagtttggtgtgtgaagctgtgcctggtgccaaaggggcaacgaggaggagaaagccctgcagccgcccactcagctctatcctgggaaggagtaacctgaagtttgctggaatgccgatcactctcactgtgtctaccagcagccttaacctcatggcagcagactgcaaacagatcattgccaaccatcacatgcaatctatctcattcgcgtctggtggggatccggacacagctgagtacgttgcctatgttgccaaagaccctgtgaatcagagagcctg

SEQ ID NO: 1851 - DNA, 6857 bp, Rattus norvegicus
ttccagaatcgatagtggttcggcccacctctgaaggttccagaatcgatagtggttcggcccacctctgaaggttccagaatcgatagtggttcggcccacctctgaaggttccagaatcgatagtggttcggcccacctctgatggttccagcacctcccgaggtttttatttcaacacagtgctttcactggcccgctccctggctgtgcagagacctgcatccctagagaaggttcaaaattcggcccacctctgaaggttccagaatcgataggctctggttccagcacctcccgaggtttttatttcaacacagtgccttcactggcccgctccctggctgtgcagagacctgcatccttagagaaggttcaaaagctgctgtgcatgtgcccagtagattttcatggaatcttccagctagatgaaagacggagagatgcagtgattgctctgggcatttttctcattgagtctgatcttcagcacaaagattgtattgttccttatcttcttcgacttctcaggggtcttccaaaagtctattgggtagaagaaagcacagctcggaaaggcagaggtaacctcccggttgcagaaagcttcagcttctgcctggtgaccttgctgtctgatgtggcttgcagggacccctcgcttagggatgagattttagaggcacttttgcaggttttacatgtccttctggggatgtgccaggccctggagattcaagagaaagaatacctttgcaagtatgcaatcccatgcctgatagggatctcgaaatcttttggacgttacagcaattcagaagaatctctcctctcaaagctttttcccaaagtccctcctcattccctgagaatccccgaagagctagaaggtgtccgaaggcgttcctttaatgacttccgctccatcctgcccagcaacctgctgactgtctgtcaggagggcacactgaagaggaaaaccagcagtgtgtccagcatctctcaggttagcccagaacgtggcatgccccctcccagctcccctggaggatctgcttttcactattttgaagcctcttgcctgcctgatggaaccaccttggagcccgaatactacttctctaccatcagctccagtttttctgtctctcccctgttcaatggtatcacctataaggagttctatattccactggaaatgcttcgagaactcttaaacttggtaaagaagattgttgaggagcctgttctcaagtccttagatgcagctgtagccagagtgatggaggccaatcccagtgctgacctatactacacgaccttcagtgatcccgtctacctgaccatgttcaagatgcttcgagacactctgtactatatgaaagacttacccacctcctttgtgaaagagatccatgattttgtgttggagcagttcaacatgagccaaggggaactccaaaagattctccatgatgcagacaggatccacagtgagatgagcccactcaaactgcgctgccaagcaaatgctgcctgcgtagacctcatggtgtgggctgtgaaggatgagcagggtgcagaaaacctttgcatcaagctgtctgaaaagctgcagtccaagacatccagcaaggtcatcatcgcccatttgcccttgctgatctgctgcctacagggtctgggccgcctatgtgaacggttcccggtggtggtccactcagtgacaccatctttgagagactttctggtgattccatccccagtgctggtgaagctctataagtaccacagtcagtaccacacagttgctggcagtgatataaaaattagtgtcaccaatgagcattctgagtcaactctgaatgtcttgcccggcaagaagaaccagccatccatgtatgagcagctccgggacatcgccattgacaacatctgcaggtgcctgaaggccggcctcaccgtggaccctgtgatcgtggaggccttcctggccagcctctccaaccggctctatatctcccaggagagcgataaggatgctcacttgattcctgaccataccattcgtgccttgggacacattgcagtggctctgagggataccccaaaggtcatggagccaattctgcagcagaaattttgccagcmmscytmwcccctcgatgtgctcatcatcgaccagctgggctgcctggttatcactggaaatcaatacatttatcaggaagtgtggaatctcttccaacaaatcagtgtgaaggccagttcagttgtatattcagccaccaaagactacaaagaccatggctacaggcactgctccctcgcagtcatcaatgccctggccaacatcgcagccaacattcaggaggagcaccttgtggatgagctgttgatgaacctgctggaactgtttgtgcagctggggctggaggggaagagagccagtgagagggccagcgagaaggggcccgccctgaaggcttccagcagtgcagggaatttgggagtgctcattcctgtaatagccgtgctcacccgacgattgccacccatcaaagaagctaaacctaggctacaaaagcttttccgagacttctggctctactctgtgctaatgggattcgctgtggaaggctcagggctctggccggaagagtggtatgaaggagtctgtgaaatagcaaccaagtcacctctgcttacctttcccagcaaagagcctcttcgatcagtcctccagtacaactcagccatgaaaaatgatacagtgaccccggctgagctgaatgagctccgaagtaccatcatcaacttgctagatcctcctcctgaggtgtctgccctcatcaacaagctggactttgccatgtccacctatctcttgtctgtgtatcggctggaatacatgagggtgctgcgttctacagatccagatcgcttccaggtaatgttctgctacttcgaggataaagctattcagaaagacaaatctgggatgatgcagtgtgtcatcgctgttgctgacaaagtatttgatgccttcctgaacatgatggcagaaaaagccaagaccaaggagaatgaagaggagttggagcggcatgcccagtttctgctggtgaacttcaaccacattcacaagaggatacgcagagtggctgacaagtacctgtctggtctggtggataagtttccacacttgctctggagtgggactgtgctgaagaccatgttggacatcctgcagaccctgtcactatcactaagtgctgatattcacaaggaccaaccttattatgacattcctgacgccccctatcggatcacggttcctgacacgtatgaagcccgggagagcatcgtgaaagactttgctgcacgctgtgggatgatcctgcaggaagccatgaagtgggcacccacggtcactaagtcccacctgcaggaatatctgaacaagcatcagaactgggtgtcaggactgtcccagcacacgggattggccatggccactgagagcatccttcactttgccggctacaacaagcagaacacaactcttggggtaactcagctcactgagcgcccggcctgtgtgaagaaagactactccaacttcatggcatccttgaatttgcgcaaccgctatgccggcgaggtgcacgggatgattcggttctcaggtgccacaggccagatgtccgacctgaacaaaatgatggtccaggatctgattacagctctggaccacagtcatcctcagcactatacccaagccatgttcaaattgacggccatgctcattagcagcaaagattgtgacccacagctccttcatcatctgtgttggggtcccctccggatgttcaacgagcatggcatggagactgcactagcctgctgggagtggctgctggctggcaagaatggagtggaagtgccgttcatgcgggagatggcaggagcctggcacatgacagtggagcagaagttcggcctcttctctgcagaaacaaaggaagcagaccccctggcagcgtcagaagcaagtcagccacgaccctgtccccctgaagtgacacctcactacatctggattgatttcctggtgcagcggtttgagattgccaagtactgtagctctgaccaggtggagatcttctcaagcctgctgcagcgctccatgtccctccacatcggtggagccagggggagcatgaacaggcatgtggcagccattggaccacgtttcaaactgctgaccctggggctgtccctcctacacgctgatgtggttccaaatgcaaccattcgaaacgtgcttcgagagaagatctactcaacagcctttgactatttcagttgtccaccaaagttccctactcaaggagaaaagaggctgcgtgaagatataagcatcatgattaagttttggactgccatgttctcagataagaagtacctgactgccagccaactcgttcccccagataaccaggacacccgaagcaacttggatataactgyrsgmkstcgacaacaggctacacagggatggwtcaacacataccccctctccagtggcatgtcaactatctccaaaaaatcaggcatgtctaagaaaaccaaccgaggttcccagctgcacaagtactacatgaagcgtaggacgctgctgctgtcactgttggccactgagatcgagcgcctcatcacttggtacaacccgctgtcagccccagagctagagctggaccaggcaggtgagaacagtgttgccaactggaggtccaagtatatcagcctgagtgagaagcagtggaaggacaacgtgaaccttgcctggaccatctctccatacctcgctgtgcagctgccagccaggttcaagaatacagaagccattggaaatgaagtgacccgtctcgttcgcctggacccaggagctgttagtgatgtccctgaagctatcaagttccttgtcacctggcacaccatcgatgctgatgctccagagcttagccatgtgttatgctgggcacccacggacccgcccacgggcctctcctacttctccagcatgtaccccccacaccctctcactgcacagtatggggtgaaagtcctgcggtccttccctccggatgccattctgttctacatcccccagattgtgcaggccctcagatatgacaagatgggctatgtgcgcgagtacattctctgggctgcagccaaatcccagcttctggcacaccagtttatttggaatatgaaaactaacatctaccttgatgaagaagggcaccagaaagaccctgacattggtgaccttctggagcagttagtagaagaaatcacagggtctctatcaggcccagccaaagatttctatcaacgggaatttgatttctttaacaagatcaccaacgtgtcagctatcatcaagccctaccctaaaggcgatgaaagaaagaaggcttgtctgtcagccctgtctgaagtgaaggtgcagcctggctgctacctgcccagcaaccctgaagcaattgtgctagacattgactacaagtcagggacaccaatgcagagtgctgcaaaagcgccgtatcttgccaagtttaaggtgaagcgatgcggagtgagtgaacttgaaaaagaaggtctgcagtgccgctcagacacagaggatgagtgccgcaggcaagaggctgatggcaagaagatctgctggcaagcagccatcttcaaagtgggggatgactgccgacaggacatgctagccctgcagatcatcgaccttttcaagaacatcttccagctggttggcctggacctcttcgtttttccctatcgggtagtggctactgcccctgggtgtggggtgattgagtgcattccagactgtacctcccgagaccagctaggccgccagactgacttcggcatgtatgactactttacacgccagtatggggacgagtctaccttggccttccagcaggcacgctacaactttatcagaagcatggcggcctacagcctcctgctgtkcctgckgymgmtcwmggacagrcacaacggyaacatyatgctggacaagaagggacacatcatccacatagactttggcttcatgtttgaaagctcaccgggtggcaaccttggctgggagccagacatcaagctgacagacgagatgktgatgattatggggggcaagatgraagccacacccttcaagtggwwcakgragatgtgcgtccgaggttatctggctgtgcgcccctatatggatgcagtcgtctccctggttacactcatgttggacacaggcytgccctgtttccgtggccagacaatcaaacttttgaaacacmggywcagsccgaacatgacagagcgggaggctgcaaattttatcatgaagatcatccaaaactgtttcctcagcaacaggagccggacctacgacatgatccagtactaccagaatgatatcccctactgaggagactgtacctgaagccttgagtgtcmcagagcagcttgwrctgtcaccataagcctgggtgtggaggtgacaggcacatggaacttggatgcacaggtgtgagtctttttcacactggayacaytccctatttgttsacccatcttamtatgttggtacatgaagtattttcctgtgtaaacatgagmaattgacataaaaaataarwrmmmwaaaawrwrmwamwwmwrytygwkrggksrccmrgacttygyccttagtcaaaggtaccctttgaatccctggtccttccaactcacacctagcttagtcttgctttgatttggtcctgaggatc

SEQ ID NO: 1852 - DNA, 3895 bp, Rattus norvegicus
ggatccacaccaattcaggggaaccctgactgcttcctctagcctactcaggggctttttcttccagccctcagtcacagtttctgcagaaagcacaagaaaagaacattaccccaattctttcagcctcaactctagccatgtgcccattcccagctttctgacctaggggttcccattgtctggcttccaatcccctaaaatggcaaaactcttccaacctgctttggcaaggtcatatgccaccaccccctaccttgggctgaagatgccccccctagattcagagttaaagctccttgccctatgtgaggaaaaggaagaagccatatattaaaaaacattttctttctttctttatatttcattttatttaaagatgtttttcttatgcatataaacatttatatgtgtgtatactacacgtgtgtctggtgctcttgaaactgggtctacaatcagtggtgagctgccctgtaggttctgggaattgaacctgggtcttctggaaacacaatacatgctctttactgctgagtcgtctattcaacctccacattaaaaaattttttttatttacattttattttattttttatttttaaaacatttatttgattttttacatttcttttttacattagagacagatgtgtgtgtgtgtgtggtgtgtgtgtgtgtgtgtgtgtgagagagagagagagagagagagagagagagagagagagagagaagagtcatgtactgaccagacaggacaacagtctcagtctctctccttccaccatgtgaggtctggagattaaattcaagctgtcaggcttggtggcaggcacctttatggtttaccaaatgagctacatcaatgactctatttacattttatttaaggggtttctgtggggatcaaaggacaactgcaggagttaaggatcaaactcaagtttggctgcaagcacctttacccagtgagccacctccctggcccagtaaatgttatcaattcacttggcttctcctcctttttgagcctcagaatggaaaatgggggcttcccagctgagtaaaaggctctgagccctcgctggaggggatagcaggaaaaagggattgccccagggacctggtagaatcaataaccccccccactcccatcctctaagccacccctggttgaaagccactgtgtgtgtgtgtgtgtgtgcgcgtgcgtgcgtgcgtgtgtgtgtgtgtgtgtgtgtgtgtgtgtgtgtgtctgtctgtctgtctgtctgtctgcctgcctgcctgcctgcctgcctgcatttgacagtgaacatattggcgagactgtcaacatgtgtgactgtgaacaaagatgaatcggattgtgtgtactttggtgtaattcgtgtgttgggtgaatctgggacagatttggggactgggcataggtgttgctctcaggtgtgtagctgtacatgttggaaagaatcactgcttttatgtttcagcatgataaggcccagactgtgatggtggtacctgcgagaggaggaggggtagggggtgacgcacgatgtcgtcggtgtttaccagtggtctcctgtgtttacaggcgggctgcgtagaggggcggcataggcaggaggactctcagtctttcatagctggtgcttcccctgcttggagcagatcggacagtgttcctgctgccctggtctgtgacctgtgcctcgggagcaggcattaaggtttgcctgtgttgaaaggtgtgtttgggttgggggtctgtggagcaagtgcatctgcaccttccccaaactccacaatggcaaggctcgtcggagggcttcggcttttcgtggtggttttcgtgtgtgcatctgtgatcatgtgcgtctttcacatcttcgtggtgtgcgtttgggtcctcctgggcttctgacccgcgccatgtgtgcgcgggactccagccctaagtgtcttactgtgttttgtgagcgttttgtattctgggtgcgtacgagggctttcgctcgcctggcttggttcctgagacttgcgctaagcgggcctgtgcgagcgccgccacctccgcctccagccgcgtgctgtcctgtgtgcggaccgcgtgcccatcgtgcgcaggtacccgtctagccaaagagtgcagccgcgtgcgcgagccgcttccgggcgccgcggcgctggggggcggccccgccagggggtgggtcaccgggactggccggcgcctgccccgtgcgcgcgaggcgtgggcgtgggcgggggccgcgggggggtacgacagtacgaaaaggcggcgcgcgggccgcagcggcagctcctcggcagccgcacttagtagcgtgcgccccggtgcaaccctggctttctttccgctggacacccgtgcccccttcgtggtccgcaaccagaagcccagcgcagccccggagcagcccctgcaccgccaccgctacccggaccacgacccaggccgccccgagatgatcgcgaccggagccctcctgcgcgtcctcttgctcctgctggctttcggccacagcacctatggggctgagtgcgacccggcctgtgaccctcagcatggattctgtgaggctgacaatgtctgcaggtgtgagcctggctgggagggccccctgtgtgagaagtgcgtaacctcccctggctgtgttaatggactctgtgaagaaccatggcagtgtgtctgcaaggaaggctgggacgggaaattctgcgaaatagatattcgggcttgcacctctaccccctgcgccaacaatgggacttgcgtggacctcgagaaaggccagtacgaatgctcctgcacccctggattctctggaaaggactgycagcacaaggctgggccctgcgtgatcaatggttctccctgccagcacggaggcgcctgcgtggatgatgagggccgggcctcgcatgcttcctgcctgtgcccccctggcttctcgggcaacttcyrygagatcgtgaccaacagctgtacccctaacccatgcgagaacgatggcgtctgcaccgacatcgggggcgacttccgttgccgctgcccagctggattcgtcgacaagacctgcagccgtccggtgagcaactgcgccagtggcccgtgcctgaacgggggcacctgcctccagcacacccaggtgagcttcgagtgtctgtgcaagcccccgttcatgggtcccacatgcgcgaagaagcgcgggaccagccccgtgcaggtcacccacctacccagcggctacgggctcacctaccgcctgacccccggggtgcasgagctacctgtccagcagcccgagcaccacatcctgaaggtgtccatgaaagagctcaacaagagtgcccctctcctcaccgagggacaggccatctgcttcaccatcctgggcgtgctcaccagsctggtkgtgctggrcaccgtggscatcgtctttctcaacaagtgcgargcctgggtgtccaacctgcgctacaaccacatgcttcgcaagaagaagaacctgctgttgcagtacaacagcggcgaggagctggcggtcaatatcatcttcccggagaagatcgacatgaccaccttcaacaaggaggctggtgatgaggatatctaagcagcgtgtcccctccccctcccccaggcccttctacattatcggggttcctcacagctccctctatgcgctctatgcttctttgtggtggagttcgctcttgtgtggaatctagtgaacgctacgcttacatttattttctcgtgttgctgtgtgacaagctgccgctaagaacccctccctccctccctccctccctccctattaatgcatgatataatgaataataataagaatttcatctctaaatg

SEQ ID NO: 1853 - DNA, 3534 bp, Rattus norvegicus
ctggaggggagcagagaggagggaaggagcagcggaggcagtgagctgggagcggctgaggcccttcccgcagaaactgggggcaccggcggcgtaggaggtggagaaggcggaggacgcacgggctggaggcggcggctgcgactcggcggcgctgggaatcggaaccgcgggtgaacttgggcgccacgttccgggcgacggccgggtgaggatggtgaacacttgcagccgctgaccctgcctttcctctgtttcctcgcgggttgccgagcctggcgcccatccccacccctggacgggtgggtgaacctgcaagcttctacccaccccaggactattttttcttttaaaaggaaacagggagtgggcattcggaaagagggagaaaacgcaggggagctcgtccatccgttgaggcagagttcactatgatcttactcgcattcagctctggaagaaggttggatttcgtgcatcgttcgggggtgtttttcttccaaaccttgctttggattttatgtgctacagtctgcggaacggagcagtatttcaatgtggaggtttggttacagaaatacggctaccttccaccgactgaccccagaatgtctgtgctgcgctctgcagagaccatgcagtcagccttagctgccatgcagcagttctatggcattaacatgacaggaaaagtggacagaaacacaattgactggatgaagaagcctcgatgtggtgtaccagaccaaacaagaggcagctctaaattcaacatccgacgaaagcgctatgcattaactgggcagaagtggcaacacaagcatatcacttacagtataaagaacgtaactcccaaggttggagatcctgagacccggagagcaattcgccgtgcctttgatgtgtggcagaatgtaacacctctaacgtttgaagaagttccctacagtgaactagaaaatggcaaacgtgatgtggatataaccatcatttttgcttctggtttccatggagacagatccccctttgatggggagggaggatttttggcccatgcttatttccctgggccaggaattggaggcgatactcattttgattctgatgagccatggacactgggaaatcccaatcatgatggaaatgatttatttcttgtagcagtccatgagctgggacatgctctagggctggagcattccaacgacccaacagctatcatggcaccattttaccagtacatggaaacagacaacttcaagcttcctaatgatgatttgcaaggcatccagaagatatatggtccacctgacaagatccctccacctacaagacctctaccgacagtgccccctcaccgatctgtccctccggccgacccaaggaaaaatgacaggcccaaacctcctcgacctcccactggcagaccttcctatccaggagccaaacccaacatctgtgatgggaacttcaacactctagctattcttcgaagggagatgtttgttttcaaggaccagtggttttggcgagtgagaaacaacagggtgatggatggataccccatgcaaattacttacttctggcggggccttcctcccagtattgatgcagtttatgaaaacagtgatggaaattttgtcttctttaaaggtaacaaatactgggtgttcaaagacacaactcttcaacctggataccctcatgacttgattacccttggaaatggaatcccccctcatggtattgattctgccatatggtgggaagatgttggcaaaacctatttcttcaaaggcgaccggtattggagatatagtgaagaaatgaaaaccatggaccctggctatcccaagcccatcaccatctggaaaggaatccctgaatcacctcagggagctttcgtccacaaggaaaatggctttacctatttctacaaaggaaaggagtattggaaattcaacaaccagatactcaaagtagaacctgggtatccaagatccatcctcaaggactttatgggctgtgatggaccaacagacsgrgataaagaaggtctcagcccaccasatgatgtagacattgtcatcaaactggacaacacagccagcactgtgaaagccatagctattgtcattccctgcatcttggccttatgcctccttgtattggtttacactgtgtkccagttcaagcggaaaggaacacmccgccacatactgtactgtaaacgctctatgcaagagtgggtgtgatgtagggatttcttttttctttcttttccggagtttgtggtaacttgagattcaagacaagagctgttatgctgtttcctagctaggagcaggcttgtggcagctgatcgaggctgaccttccaaacctagatggttgctggtcctgcacatgagtggaaatatattcatggagaaacttccatgatgcacagtawmwrmmrwwmwwmarwmctctgtctttctttgtcattcagttctaggctttcctctgcacgctcaatgcccagtaaaatttcaggattaactgaagaagaggaaatatagaagaaaagtttcttcttatttttttttaaaatacttttccttctgaaatctgagcccatttctgggaaagagaaagaaagagagagagagagagagagagagagagagagagagagagagagagagagaaagcaaatcagaaaacccataggtttttgctttaaagcaaaagagagtttaaaaacaacaaaatccacaactgaactttcagaaaagtgtgaagatccaaaacagctttgtctccaaagaagatagctctgtgaccactatggatagtttcctgcgcattgtcttgtcaggtgggagatctggaacatacatgcaggacgctagactgttgggacagacattttccaacaaacaaggggccaaaatatctgcaatatagtaacagccttaataatacatgcattttcattttctacagctgttctcaactatgtccacaatgtatcatcacctccatactcatagctgtattcaaacaggaccttttggttgttttgaaatgtttctgaaccccctcttgcctcctgacacagcatcattgtgacattcttcccagttgtgttaggcctttgtcccaggccgtccattggtctgtcagcaatactcagcgcaaagcagagcgagaagcattgtgtctctgaagtaaagaaagtgatggtcatattataaagatatgttcctctttaawacatcggtgtaaccctttgagaactatcagaccagcttacagagtcaggatgatcagtcttgcaatctggtcatttgtagaagtggccaaaagggaaagccatcacatgttcgagaagttcagacttgtaaagcataccttacaatcccatgtaattctttaatgactgacagtaytgcataaatgcttttataacaaacaacagtggtgtgacttgccaaaacttttctggcaaataaaaaagatattttgttamcawtaaaaaaaaaaaaaaaaa

SEQ ID NO: 1854 - DNA, 1020 bp, Rattus norvegicus
ggagcaggctcgctggccaagatcacagactggagcacctttcttgtgagcccctggcttcccaggcagcttcaactctggaggacatggggcgaaaggaggaggaggactgtagctcctggaagaaacagaccaccaacatcaggaaaaccttcatcttcatggaagtgctcggatcaggagcgttctcagaggtgywcmkggtgaagcaaagagtgactgggaaactctttgctctgaagtgcatcaagaagtcaccagccttccgggacagtagcctagagaatgagattgctgtgttgaaaaggatcaagcatgaaaacattgtgaccctggaggatatctatgagagcaccacccactactacctggtcatgcagcttgtttctggaggtgagctttttgaccgaatcctagagcgtggtgtctacacagaaaaggatgccagtctggtcatccagcargtcttgtctgccgtgaaatacyttcatgagaatggcatcgttcacagagatctaaagcctgaaaacctgctgtacctcacccctgaggagaactccaagataatgatcactgattttggcctatccaagatggagcagaatggagtcatgtccacagcttgtgggaccccaggctatgtggctccagaagtgctggcccagaagccctacagtaaggctgtggactgctggtccattggtgtcatcacatacatactgctgtgtgggtatccccctttctatgaagaaacagaatcaaagctttttgagaagatcaaagagggttactacgagtttgagtctccattctgggatgacatttctgagtcagccaaggactttatttgccatctgcttgagaaggacccaaatgaacgatacacctgcgagaaagccctcagacacccttggattgacgggaacacagccctgcaccgggacatctacccatctgtcagcctccagattcagaagaactttgccaagagcaagtggaggcaagccttcaatgcggccg

SEQ ID NO: 1855 - DNA, 528 bp, Rattus norvegicus
ggaggcctgcgcctggcctcagaaggagtgcggatgtccttggctccaaatggagaggcagctacatcacccatgctgcctgctgggcccggccctgaagcccccgtaccagccaaacacggcagctctgggagaccccgagatcctaacacatgtttcttcgaggggcagcagcgtccccacggggctcgctgggcacccaactatgacccactctgctccctctgcacctgccagagacggacagtgatctgtgatcctgtagtatgcccaccaccaaggtgttcccaaccggtgcaggcactggaccagtggtgtcccgtgtgttcagagaaacaacggagtagagacctttccagcctaccaaatctggagccaggagagggctgctattttgatggtgaccggagctggagggcagcgggtacccgatggcaccccgttgtgcccccctttgggctaattaagtgtggtgtttgtacttgtaagggggttaacggagaggtgcactctgagaaggtgcagtgt

SEQ ID NO: 1856 - DNA, 889 bp, Rattus norvegicus
caacgttcccgagaactcccgtgggcccttcccccagcagctcgtcaggatcaggtcggacaaagacaatgacatccccatccgctacagcatcacgggggtaggcgccgaccagccccccatggaggtcttcaacatcgactccatgtctggccggatgtatgttactcggcccatggacagagaggaaagagcctcttaccacctccgagcccacgcggtggatatgaacggtaacaaggtggagaatccgattgatctgtatatctacgtcatcgacatgaatgacaaccgtcccgagttcatcaaccaggtctacaacggctctgtggatgagggctccaagccaggtacatacgtaatgacggtcaccgccaacgatgcagatgacagcaccacagccaacggcatggtgagataccggattgtcacccagacgccccagagcccatcccagaacatgttcaccatcaacagtgagacaggggacatcgtgactgtggcagcgggcctggaccgagagaaagtccagcagtacacggtcatcgtccaggccactgacatggaaggaaaccttaattatggtctctcgaacacggccacggccatcatcacggtgacagacgtaaatgacaaccctccagaattcaccaccagcacatttgcaggagaggtccccgaaaaccgtatagagacagtagtggccaacctcacagtgatggaccgagaccagccccactcacccaactggaatgctgtctaccgaatcataagtggagacccctccgggcacttcagtgtccgcacagaccctgtgaccaatgagggcatggtcaccgtggtgaaggcagtggactatgagctgaaccgtgccttcatgctgaccata

SEQ ID NO: 1857 - DNA, 4615 bp, Rattus norvegicus
tctggcctcttgccctaagaagcgagtgcggagggagtgggagcgagactgcccgaacgcaagtgtctggcttcccggcgaggcccaggcgtccgtcccgccgcccatgaactcgttgccccgcgagcagcgccgtcgttaggccgtccccgtcactctcgctcgcccccatccccgggcagccattcccccctacccacgtctggccggggactggacgtcgtgtcgaagcgccttccccagtccgcgtcgcgctgcgaccctggaagcgggcgccgccgccaacgagaggaggagccccggccgcggggcccagcagccactgagccagcaggcgggatcgaggccggcaacatggcgagcgcttcgtaccacatctccaacttgctggaaaaaatgacatccagcgacaaggacttcaggtttatggctacaaatgatctgatgacagaactgcagaaagactccatcaagctggatgatgacagcgaaaggaaagtcgtaaagatgattctgaagttgctggaggataaaaatggcgaagtgcagaacttagctgtgaaatgtcttggtcctttagtgagtaaagtgaaagagtaccaagttgagacgattgtagacaccctctgtacaaacatgctttctgacaaggagcagcttcgagatatttccagtattggccttaaaacagtaattggagaactccctccagcttccagtggctctgcattagctgctaatgtatgtaaaaagattactggacgccttaccagtgcaatagcaaagcaggaagatgtttctgttcagctagaagctttagatattatggctgatatgttgagcaggcaaggaggactgcttgttaatttccatccttcaattctgacctgtctacttccccagctgactagccctagacttgcagtcaggaaaagaacaattattgctcttggccacctagttatgagctgcggaaacatagtttttgtagaccttattgaacatctgttgtcagagttgtccaaaaatgactccatgtcaacaacaaggacctacatacagtgtattgctgctattagtaggcaagctggccatagaataggtgaataccttgaaaagataattcctttggtggtaaaattttgtaatgtagatgatgatgaattaagagaatactgcattcaagcttttgaatcatttgtgagaagatgccctaaggaagtttatcctcatgtttctaccattataaacatttgtctaaaataccttacctatgatccaaattacaactatgatgatgaagatgaagatgagaatgctatggatgctgatggcggagatgacgatgaccaagggagtgacgatgaatacagtgatgacgatgacatgagttggaaagtgaggcgtgcggctgccaagtgcctggatgccgtagttagcacacggcatgagatgctcccggaattctacaagaccgtctctcctgcactgatatccagatttaaagagcgcgaagagaatgtaaaggcagatgtttttcatgcatacctttctcttttgaagcaaactcgtccagtacaaagttggctgtgcgaccctgatgcaatggagcaaggagaaacacccttaacaatgcttcagagtcaggttcccaacattgttaaagccctacataaacagatgaaagaaaaaagtgtaaagacccgacagtgttgttttaacatgttaactgaactggtaaatgtgttgcctggggcactaacccaacacattcctgtacttgtaccaggaatcattttctcactcaatgataagtccagctcatcgaatctgaagattgatgcattgtcctgtctgtatgtgatcctctgtaaccactctccgcaagttttccacccgcatgttcaggctttggtccctccagtggtggcttgtgttggtgacccattttacaagatcacatcagaagcccttcttgtcactcagcagcttgtcaaagtaatccgtcctctggaccaaccctcctccttcgatgcaacgccttacatcaaagatctcttcacttgtacaattaagcgcttaaaagcagctgacattgatcaggaagtcaaggagagggctatttcctgtatgggacagattatttgcaatcttggagacaatttgggccctgacttatcaaatacacttcagattttcttggagagactcaagaatgaaatcacccggctaacgacagtgaaagcactgaccctgattgctgggtcacctttgaagatagatctgaggcctgtgctgggagagggagtccctatccttgcttcatttctcaggaaaaatcagagagctttgaaactggggaccctctctgccctagatattctcattaaaaactatagtgacagtttgacggccgccatgattgatgcagttctggatgagctccctcctcttatcagcgaaagtgatatgcacgtgtcccagatggctatcagcttccttactaccctggcaaaagtatatccctcctccctttcaaagataagcggatctattctcaatgaactgattggacttgtaaggtcacctctgctgcagggaggagctcttagtgccatgctagacttcttccaagctttggttgtcactggaacaaacaatctaggatacatggatttgctgcgcatgctaacgggtccagtttactctcagagcacagctcttactcataagcagtcttactattccattgccaaatgtgtagctgcccttactcgagcatgccctaaagagggaccggctgtagtaggtcagtttattcaagatgtcaagaactccaggtctacagattccattcgtctcttagcgctcctttctctaggagaagttggacaccatattgacttaagtgggcagttggagctaaaatctgtaatattagaggctttctcctctcctagtgaagaagttaaatcagctgcatcctatgcgttaggcagcatcagtgtaggcaacctccctgagtatctgccatttgtactacaagaaataaccagtcagcccaaaaggcagtacctgctgctgcattccctgaaggaaatcattagctctgcgtcagtggtcggccttaagccgtatgtcgagaacatctgggccttgctgctaaagcactgtgagtgcgcggaggagggcaccagaaacgtcgtcgccgagtgtctagggaagctcactcttattgatcctgaaactctcctcccgaggcttaaagggtatttgatatcagggtcatcctatgccagaagctcagtggttacagctgtgaagttcactatttctgaccaccctcagcccattgatccactgctcaagaactgcataggtgattttctaaaaacgttggaagacccagatttgaatgtaagaagagtggccttggtcacattcaattctgcagcccataacaagccgtcactgatacgggaccttctggattctgttcttccacatctttacaatgagacaaaagttaggaaggaacttataagagaggtagagatgggcccgtttaagcacacggttgatgacggcctggacattagaaaggcagcttttgagtgtatgtacacacttctagacagctgtcttgacagactggatatctttgawtttctamaysakgtggaagatggtttgaaggaccattatgatattaagayrckarcatttttaatgttsstgwgmctatctaccctttgtccaagtgcagtactacagaggttggaccggcttgttgagccactacgagctacgtgtacaactaaggtgaaggcgaactctgtaaagcaggagtttgwaaagcasgacgagttaaagcgctcggccatgagggcagtagctgcactgctcaccattccagaggcagagaagagccctctcatgagtgagtkccagtcacagatcagctccaacccggagctggcagccatctttgaaagtatccagaaagattcttcgtscactaacttggaatcaatggacactagttagacgtgtgttccacatgaggaccattacatttgaccgcacagtgcactgaacsgacaagttgwccatagacacgggagagaagtgtytagagckkcmgsatgwtmcacttttwttttcattcatgggaagtttgttcagctttctwccattgttgtktttgtagcttttacttcagaaatctgtatttccataatccagaggttgtaagvscactgwkggttttagtggttaggkcaacgtttgaaatgrgaactaaagtttggatytatggaatgtggaaatagggtccagtatctgtytgccctgtaatgtgtrggattaaaatgttaaaactttawrammrwrrawwwmdwrvhhwhrwrmmttctctcatttaaaatcaattstgcaacacaarrammawrwwwmwwtccttgtataacctcttctttcagtgacataaaatgatkwdaaytkgcarawaaaraawawmmawwtaagatatgctatatttcggagagattggcatcgtcacaaagataatmmwgtrccactttataaggcttaamaawaaaaaaaaaaaaaaaaa

SEQ ID NO: 1858 - DNA, 959 bp, Rattus norvegicus
tggtaattaatgaaactgcataaagtttttataaatctctacagtttgcatacattttaatccagtgaatagtatataaaatagccaggagcttaaataaaatgaatattagaagctgttagaataagagaaaaatgacggaggaaaactgaaagggagaactgaaagtgggaaattcctctgaggcagaaaggaccatcccttataaatagcacagaccatgaaggaagatcattctcactgcagcctttggtagcctttgcctcatcgtgcaggtagcagccaacaccagcccagcttccatcatggccaacaggtggaccctccacattgcgttcctgctgtgcttctccaccactgccctctccatcgactacaagcagctccagttccgacaaagcactagcattcggacatgtcagaagctcctgaggcagctgaatggaaggctcaacctcagctacaggacggacttcaagatccctatggaggtgatgcacccgtcacagatggagaagagttacactgcctttgccattcaagtgatgctccagaatgtctttcttgtcttcagaagcaatttctccagcactgggtggaatgagactattgttgaaagtctcttggatgaactacatcagcagacagagcttctggagataatactaaaggaaaagcaagaggaaagattgacttgggtgacatccacgactactttaggcttgaagagctattactggagggtacaaaggtaccttaaagacaagaagtacaacagctatgcctggatggtggtccgagcagaagtcttcaggaacttttccattattctaagacttaatagaaacttccagaactgaagacctgtcagccaatgcctccaagagcaggtgatggttgcaggcaatcttaaaacattagagtctgactctgtgactggtagtgaatctactgcattt

SEQ ID NO: 1859 - DNA, 399 bp, Rattus norvegicus
ccatggcccctcccacccgccggctcctcaatgctgcactgcttctgctgcttctgctgatggccaccagccaccagccttcagggactgttgtggcccgtgagctgcgctgtcagtgcctgaagaccctaccaagggttgattttgagaacatccagagcttgacggtgacccctccaggaccgcactgcacccagacagaagtcatagccactctcaaggatggtcaagaagtttgtctcaaccctcaagctcccaggcttcagaaaatcatccagaagttactgaagagtgacaagtccagctgagctgggaaagggggaagtatcttgtacggtgatggaggacctgcctctgaagcagagcagcgatccatccaatgctgcctggatgagcctc

SEQ ID NO: 1860 - DNA, 2924 bp, Rattus norvegicus
ggaggtatcgaggaagagagaacagggaggtggggcggaggttcctcgcagagcctctggagccgcaggggcttcacggcatgaccagaagcaggagaggaggctgacccacttgttcccatcagctcctgaaggtgacactgagccctgggtggcccctcactgccaaagcagtcacctgtatttgtcagataaagacggccagcccggctgccctttacctccaagtcagagatccagagagccatgggcaaatcgccagagmkgygstrctttgtcttcttttctcttttggcatcgttttctgctgagcctaccatgtatggggagatcctgtcccctaattatccccaggcgtaccccaatgaggtcgtgaaaacttggkacatagaagtcccagaggggtttgggattcacctttacttcacccatctggacatggagctgtcagagaactgtgcrtacgactcagtgcagataatctcaggaggyatcgaggaagagagactctgtggccagaggwccagcaagagtcccaactcccccaytgtagaagagtttcaattcccatacaataggctccaggtggtctttacgtcagacttctccaacgaggaacggtttactggctttgcagcgtattactcagccgtagatgtaaatgaatgcacagactttacagatgtcccttgcagccacywckrsrataacttcattggtggatacttctgctcctgccccccagaatacttcctccacgatgacatgaggacttgtggggtcaactgtagtggggatgtattcactgccytgattggggagatcgcaagtcccaattatcccaacccatacccggagaactcaaggtgtgaataccagattcggctgcaggagggcttccgactggtgttgactatccggagagaagattttgatgtggaaccagckgactcagaggggaactgccacgacagtttgacttttgctgcaaaaaaccaacagtttggtccttactgtggcaatggattccctggacckctaactattaaaacccagagcaatactcttgatattgtctttcaaactgacctaacggggcaaaataaaggctggaagcttcgttaccatggagatcccatcccctgtcccaaagaaatcagtgctaattctatctgggagcccgaaaaggcaaaatacgtgttcaaagatgtcgtgaagataacctgtgtggatggattcgaagttgtggagggaaatgttggctcaacatcattctattccacttgtcaaagcaacggacagtggagcaattccaggctagagtgtcaacctgtggactgtggtgttccagaacccattgagaatggtaaagttgaagacccagaagacactgtattcggctccgtcatccactacacgtgcgaagagccatattactacatggaacaggaagaaggcggagagtatcactgtgctgctaatgggagctgggtgaatgaccagctgggtgtcgagcttccaaaatgtattccagtctgtggagtacccaccgagccctttaaagtacagcagaggatatttggaggatactctacaaagattcaaagttttccttggcaggtctactttgagtccccccgaggtggcggggctcttatcgatgagtactgggtgctgacggccgctcacgttgtggagggaaactctgacccagtgatgtatgtcgggtccacacttctgaaaatagagcggttgagaaatgcccagaggctcatcactgaacgtgtgattattcatcccagctggaaacaagasgacsacctgaatacacggacaaattttgacaatgacattgccctggtgcagctcaaagaccctgtgaaaatgggacccactgttgcccccatctgcctgccagaaacctyctcakactacaacccctcaraggktgacctgrggctgatctctgggtggggccgaacagasawtakaaccaatgttatycaactcakaggggcgaagttacccataacatctttasaaaagygccagcaggtgaaagtggaaaaccckamagcgaggtcaaacgactatgttytcactgacaacatgatctgtgctsgggaamagggtgtggacagctgwgaaggtgacagcgsaggggctttygctctgccggtccccaatgtcaaggaccccaamttctatgtsgctgscctggtgtcctgggggaaaaagtgtgggacctatgggatctacacaaaggtaaagaactacgtggrcwsgaksctgaaaactatgcaggagaatagtgggcccaagaaggactgatccgtagtracaacacccctccaggrctagcaaggtcatttttctcagatcctgggacggtcccattatttcraaatgatggagagagggtgtgggagcatggttaacgttgaacatrattgtcaaraagcytgcttrgaggcaragttgatcactgagccgtgttggttattcagttgctattgctaacaacatgcggaagcctttctgtcttgmttcatcccacagggatatyttaaacgatttccccytcatttaacchrcttgaaatccttattgcttacagtaaagcatgttyccaatytggtwctgkctsctskagagcycakaaggagagggaaatttgagggtattytgtcatggaattcaggcatcracaggttgtytgaaacactatgcagtcagggaacacagccttttttctaagtgagatttacccaatagytggaagtcagaattgaytaccttagctttcctttgtgagttgtttcaatatgttycctagaaattagttttcttataatcctcctttgtatcatmcaatgtaatgacttartaaaararwaawwrwamawhraaaaaaaaaaaaaaaa

SEQ ID NO: 1861 - DNA, 2817 bp, Rattus norvegicus
cggcacgagcccgcccgagcgaggtccgcgccgcggctgccccgatcgcgcgtcctccgggcccgggtccccgcgaggtaagctgcctgggctgaaggggagccctctcccggagaggtgtcgcggaagatggctggcggcgtggacggccccatcgggatcccgttcccagaccacagcagcgacatcctgagcggcctgaatgagcagcggactcaggggctgctgtgtgatgtggtgatcttggtggagggacgtgagttccccacgcatcgctcggtgctggccgcctgcagtcagtacttcaagaagctgttcacttcgggcgctgtcgtggaccagcagaacgtgtacgagattgactttgtgagcgccgaggcgctgacggcgctcatggactttgcctacacagccacgctcacggtcagcacggccaatgtgggcgacatcctgagtgcggcccggctgctggagatcccggccgtgagccgagtgtgcactgacctgctggagcgccagattcttgcggccgacgatgtgggggatgcgggccagcccgatggggcgggtcccacggaccagcgcaacctgctgcgtgccaaggagtacctggagttcttccgcagcaaccccatgaatagcctgccccccactgccttccagtggcctggcttcagtgcccccgatgacgacctggatgccaccaaggaggcagtggctgccgctgtggctgctgtggctgcaggtgactgcaatggcttagacttctacggcccagggcctccagctgatcggcccccaacgggcgatggggaggagggtgacagcaccccagggctgtggcctgagcgggatgaagatgccccgcctggggggctcttcccgcctcctactgccccgccagccactacacagaacggccactatggccgtgcaggggccagcactggtgaggaagaagcagtggcgctctctgaggccgcccctgagccgggtgactccccgggcttcctgtcaggtgctgcagaaggcgaggatggggatgccgctgatgtggacgggctagcggccagcacactgctacagcagatgatgtcgtccgtgggccgggcaggggacagtgatgaggagtcccgcccggacgacaagggtgtcatggactactacctgaagtacttcagcggagcccatgagggtgatgtgtacccggcctggtcacagaagggcgagaagaaaatccgggccaaggccttccagaagtgccccatttgcgagaaggtgattcagggcgcaggcaagctgccccggcacatccgcacgcacaccggcgagaagccctatgagtgcaacatctgcaaggtccgcttcaccagacaggacaagctgaaggtgcacatgcggaagcacacgggtgagaaaccgtacctgtgccagcagtgcggcgcggccttcgcacacaactacgacctgaagaaccacatgcgggtgcacacagggctgcgaccgtaccagtgtgacagctgctgcaagaccttcgtgcgctccgaccacctgcacagacacctcaagaaggacggctgcaatggggtcccctcgcgccgtggccgcaagccccgcgtgcggggtgtgccacctgatgtcccctccggggctggcgcaccccccgggctcccggatgctccacgcaatggccaggagaagcactttaaggacgaggaggacgacgaggaggaggccagccttgacggcttgggccgcctgaatgtagcgggcagtggaggagacgatggtgcgggtggccccacggtggccgccactgagggtaacttcgcaacctgactcgtattaaaacaaaccaaaaacaaaacaaaaaactaagaacagagagaaaccaccacccacccccagcaccacaagtaagcagttctctgtccagacgccctccatccatccgcgcggacatgtgtgcgtgtatataccatggccgcgggcgcctgcctttctcagatccttaggatgtggccccatctgctcctgtgcccctcgccccgtccacccagaggtcccacccaggggcccagcctgctcctgctaaggcgagggcgatagggtcgccaggacaggcgcccagctccttgctggttggttttagggggtcttagacagaccttaaatgctctgtccactatgagtggacgttaaaatggtccccagctccccaccctccttcctcagggcacttactaaaagaggggggtgtcccctcgggctccctccccgcctgtggcctcacatctctgcacatccaccatggccaccactgacatacaaatctatttattcccaagcctggatggccagagcggrgatttggggggctgctggggtccmtgccaccctytttcacggcayttagacctgacggggtccttggggccactgctcagggcgaccccccccaaccttcccatctctgcttggccatgccccaccctgtgttcagagattgaaaattcgtcgttaccccgcgccccactttttaaggcactttttagatctatttccccttttctccttaaagacagtttatatagagatatatatagagagagatatataaaatattcttttcctcagaggagccggcagcagttgtgggtggacgtagccaagatcagaggtaaccccaggaactcaggcagagacaggcgagggagcgagagaaaggccacagcttaatgtcacaaaacagcaataaaaccccaagactttagaaacacgaaaacagaacmttaaaaaaaaaaaaaaaaaaaaaaa

SEQ ID NO: 1862 - DNA, 4562 bp, Rattus norvegicus
ggctccttgctgagttctgctccctctgckwssgwrymsgctcskkcgcygrgkycygcwyccmwgstkcygssccccggacgtagtgccgctgaggtccggagccccgggaaccgggcggggacgttgtcaggctggagctgctcgggccttctgactcagccgctcatccagatttcaggatttctcttctgggmggggagcgcgtaacttcctcattcccgccgggaccctcgcttccagtcagtctggcctgactttgagcsctgctgtcaccagggctcctcccttggacttaacctcgccccagttcgaggccatcccatcttggctaggatgactgtaacccagacggacctctttccctatggggactacctgaactccagccagttgcacatggagccagatgwggttgacactctgaaggaaggagaggatccagctgatcgaatgcatcccttyctggccatctatgaccttcagcctytgagagcacaccccttggtgtttgctcctggggtccctgttatagcccaggtggtaggcaccgaaagatacaccagcggatccaaggtgggaacctgtactctttattctgttcgattgacccatggcgactttacctggacaaccaagaagaaattccgacactttcaggagctgcatcgggacctccagagacacaaagtcttgatgagtctgctmmmtctggctcgctttgctgcggcccattctccagcccgagaggcagccaatgagaatattccctccctaccccgaggaggttccgagggctctgccagacacacagccagcaagcagaagtacctggaaaattacctcaaccgcctcctgaccatgtctttctatcgaaattaccatgccatgacagaatttctggaagtcagtcaactttcctttatcccagaccttggctccaaaggactggaaggggtgatccggaagcgctcaggtgggcatcgagttcctggcttcacctgctgtggtcgagaccaagtttgttatcgatggtccaagaggtggctggtggtgaaggactccttcctgctgtacatgcgtccagagactggcgccatctcatttgttcaactttttgaccctggctttgaggtccaggtggggaaaaggagcacagaggcacggtatggggtgaggatcgacacctcccacaggtccctgatcctcaaatgcagcagctaccggcaggcacggtggtggggccaggagatcacggagctggcacagggtccgggcagagattttctacagctacaccagcatgacagctatgccccaccccggcctggcaccctggcccggtggtttgtgaatggggcaggttactttgctgctgtggcagatgccatcctccgagctcgagaggagattttcatcacagactggtggctgagtcctgagatttacctgaagcgtccagcccactcagatgactggagactggacattatgctcaagaggaaggcggaagaaggtgtccgtgtttccatmctgctgtttaaggaagtggaactggccttgggcatcaacagtggctatagcaagaggacrctgatgctrctgcaycccaacataaaggtgatgcgacacccagaccttgtracaytgtgggctcatcaygagaagctcctggtggtagaccaagcggtggcattcttgggtgggctggaccttgcctatggccgctgggatgatgtgcagtaccgactgactgacctgggggacccctccgaatctgcagattcacagactcccacgccaggttcagatcctgcagccactccagacctctcgcataatcacttcttctggctgggaaaagactacagcaacctcattaccaaggactgggtacagctggaccggccttttgaagatttcatcgacagggagaccacacccagaatgccatggagggatgttggagtggttgtacatggagtagctgcccgggaccttgcccgscacttcatccagcgctggaacttcaccaagaccatcaaggccagatacaagatacctcagtacccctacctgctgcctaagtccgccagcactgcaaaccatcttcccttcataatcccaggygsgcagtgcgccactgtgcaggtcttgcggtctgtggatcgatggtcagcagggactttggagagctccatcctcaatgcctacctacataccatccgagagagccagcactttctctacattgagaatcagttcttcatcagctgctcagatgggcgtacagttctgaacaaggtgggcgatgagattgtggacaggatcctaaaggctcatgaacaggggcagtgtttccgagtctacgtgcttctgcctttgctccctggctttgagggggacatctccacagggggtggcaactccatccaggccattctgcacttcacctacaggaccctgtgtcgtggggaatattcaatcttacatcgtctcaaagcagccatggggacagcatggcgggattacatgtccatctgtgggcttcgcacacatggagagctgggcgggcacccgatctccgagctcatctatatccacagcaagttgctcattgcagatgacagaacagtcatcatcggctctgcaaacatcaacgacaggagcttgctggggaagcgcgacagtgagctagccatactgatcraggacacagaaatggagccatccctcatggatggggtggagtaccaggcaggcagatttgccytgagtytgcggaagcactgyttcagtgtsattcttggggcaaatacctggccagacctggatctccgagaccctgtctgtgatgacttcttccagctgtggcargaaacagcggagaacaatgccaccatctatgagcagatcttccgctgcctgccgtccaatgctactcgttcyctgcgggctctccgggagtacgtggctgtggagtccttggctacagtcagcccttctttggctcagtctgagcttgcccacatccggggccacttagttcacttccccctcaagtttctggaggatgagtccttgttgcctccactggggagcaaagaggggatgatacctttagaagtgtggacatagctggggcttccgctcagcggcagttgctagccgttgggccctatcgtgcctggatccttgccccacaccctgagttctgagggcagtgccctttgatccttggggaggacatctctgaggactcctagagaatcacagaggacctttacttgagaagtagccaaagggagcactcccaagcctggcctgggaaagcaggagagagttctagagaggtttgccttcttgtyaccwtgttcagaccaytatsccacagaaccctagtcctacgaggaggcctgaggtcaagccttttattccaggaaaagggactcctgccctgggtcgtcttcatctcactcttcctcctgcccttgaacccctacatgccctagggcctctcccagcccgttgctgcaaagatgggggggggggagtatagagccactttgactgcagtccccaccagcggtggtgaggacaccttaactgcctccaccagcytgctgacagacactaactctgtaccggttcaccaagcatttcataaataaatgtgtrgaaaarrmmawrmwwmwwmwwrraratggatgttgtcttaggtgctccctgcctcagttctaacttctttcttctgcttgcatctctgtgcttgcttgccccccctttctccctccctccctttccttcttccttttccttccttcctccctccctttccttcttccccttccttccttccttccttccttccttccttccttccttccttccttccagggggtggggtggggttgatttccaaatagagtttctctgtgtagccctagctgtcctggaactctgttaacaaggctgccctcgaactcggagagatccacctgcctctgcctcctaagtgcttggacataggcttgggccacagctccatctctgtgcttctcagcagcttctgagttcattcacctaactcctgaagatctgggctaattctgtgtgtgtgtgtgtgtgtgtgtgtgtgtgtgtgtgtgtgtgtgtgtgcgtgatacatatcttcataacttttcatatgtctgaagtattttgcaattagaaaactgctgaacacagatagccacagaagcaggaagaaaataaggagaatggagaattaggaaggcatcatagaaggcagtgggggtgggtgagaatgtgaccagaaggtattaggttgctctcccatccctctagttctcttgagaagtgaattctagggttagtgagagatgcttcagcagaggaagatgcttcctgttaggcttaacaacttgagttcgatccccaggacccacagtctaggaggagaaaacagtctcctgaaagttgtcctctgacctccacacacagaccatggcattcctgtgtgtgctcacaataaataaattcattttcaaaatcaaaaaaaa

SEQ ID NO: 1863 - DNA, 1342 bp, Rattus norvegicus
acaggaacagacggccttctgagtagtgttggctgaagacagacttggcgcctagggaagttgtcattttggatgaggaagacataagagctcaagctgagaggaaggaacagagggctgcatttcagagataggaaagattcgggtaccccagagcagagagtccagctgagcgcggaagtcccagggaaaggtgaatgcagatgacttctggaataaagaattcaggactaggtctctcacgttgaagcatggagcagcaaagagctggccgacttgggtgggggagaaatcacttcctgcctcacagccctccgtacaaagccctgcaaggcgagggcgtgcaccgcgggcttttgggcggggacagagacgactggcaagatcaggcaggctgagcgtcccgggttgggcagcggggtcctccggggtgtggcgtctcgcgtcccgccccgcgcccctcctctccgcgcgccggctggtggtcgttctcgtctctgctctcttcgctctccgctggcaccagccgacccaccagctttcggtaaggcttggatgcactccccgccccaacatcaccccacctcaggctcccgcggtctcctttctgggcctcccgggtggggcagaaatatctggaaagccacgtgtcctccgcagcggcggcagtggcaggaacccacgtggcttcctgggccggctagggtcgtccgggcctcatmgmckammchhchwgcttctgcaggaccatggccaacctcgagcgtaccttcattgccatcaagccagatggcgtgcagcgcggcctggtgggcgagatcatcaagcgattcgagcagaaggggttccgcctggtggccatgaagttccttcgggctwmtrasgaacacctgwmgcascmctaymttgacctgaaagaccgtcctttcttcccggggctggtgaagtacatgaactcagggcctgtggtggccatggtctgggaggggctcaatgtggtgaaaacaggccgagtgatgctgggggagaccaatccagctgattcgaagccaggcaccattcgtggggatttctgcattcaagttggcaggaacatcattcacgscagtgattcagtggagagtgccgagaaagagatcggtctatggkttaagcccgaagaactgattgactmtaagtcttgtgmycatgactgggtgtatgagtagacgcggagaamccagagtccttttcagcactactgatggggttcctggacacagctcttcatcccactgactggatggaccatcttttctaaaacawtaaagactktggaactgggwaaaaaaaaaaaaaaaaa

SEQ ID NO: 1864 - DNA, 2635 bp, Rattus norvegicus
ctgcagcagggctcatggcagatacccagtacatcctgcccaatgacatcggtgtgtctagcctggactgccgggaggcattccgcctgctgtcacccacagagcgcctctatgcccatcacctgtctagagccgcttggtatggaggcctggctgtgctgctccagacatctcctgaagccccctacatctatgccctgcttagccgcctcttccgtgcccaggaccctgaccagctacgccaacatgccctggctgagggcctgactgaagaagagtatcaggcattcctggtctacgctgcaggggtctactccaacatgggcaactataagtccttcggtgacaccaagtttgtccctaacctgcccaaggaaaagctggagcgtgtgatccttgggagtaaggctgcccaacagcatccagaagaagtcaggagcctttggcagacctgtggggagcttatgttctccctggaaccaaggcttcgacatcttgggctggggaaggagggagtcaccacctatttctctggggattgtgccatggaagatgccaagctggcccaggacttcctggactctcagaacctcagtgcatacaacacccggctcttcaaggtggtcggccaggaagggaagtaccactatgaggtgcgactggcttcagtactcaacacagaacctgctctcgactctgagttgacttccaagctgaagagctacgagttccaggggaatcatttccaggtcacccgtggggactatgcccccatcctccagaaggtggtagaacacttggagaaagctaaggcttatgcagccaatagccaccaggagcaaatgctggcccagtatgtggagagcttcacccagggttccattgaggcccataagaggggctcccgcttctggattcaggacaaaggtcccattgtagagagttacattggcttcattgagagctaccgtgacccctttggctcccgaggagaatttgaaggcttcgtggccatggtaaacaaagacatgagtgcaaagttcgagcggctggttgcaagtgctgagcagctgctgaaggagctgccttggcctcctgcctttgagaaggacaagttcctcacccctgacttcacttccctggatgtccttacctttgccggctctggcatccctgcaggcatcaacatccccaactatgatgacctgagacagacagagggctttaagaatgtgtctctggggaatgtgctggctgtggcctatgccacaaagcgggagaaactcaccttcatggaggaagaagacaaggacctgtacatccgctggaaggggccgtcctttgatgtgcaggtggggttacatgagctgttgggccatggcagcggcaagctctttgtacaggatgagaaaggtgctttcaactttgaccaggagacagtgatcaacccagagactggggagcagatccagagctggtaccggagtggagagacatgggatagcaaatttagcaccattgcctccagctacgaagagtgccgggctgagagcgtgggcctctacctctgtctcaacccccaagtacttcagatctttggctttgagggaactgacgcagaagatgtcatctatgtgaactggctcaacatggtccgggctgggctgttggctttggagttctacaccccagagacggccaactggcgacaggcccacatgcaggcccggtttgtgatcctgagggttttgctggaagctggcgaaggactcgttaccgwsrcccccaccacaggctctgatgggcgcccagatgcycgtgtccacctggaccgcagcaagatccggtcagtgggcaaacctgctttggagcggttcctccggagactgcaggtgctgaagtccacaggggatgtggttgcagggcgcgccctgtacgagggctatgcggcggtcactgacgcacccccagagtgcttcctcactctaagggacacggtattgctgcgcaaggaatcccggaagcttattgtccagcccaacactcgcctggaaggyycagaagtgcaacttgtagagtatgaggcctcagcggctggtctcatccgatccttctgtgaacggtttccggaggatgggcytgagttggaggaggttctwacccagctgsccacagcagatgctcaattctggaggratcaggtccaggaggccccatctggccaggcttgagaagatctgtgtggmmtytcccctttcatcaaaccagggctgtctgtggccctgaattgtgtttagraggtggggraagggcaggagctcrgactttggtgctacctcagctgagggtggtgatgctaacccyttccatttgtcagcactttccwgttyaccattatgtcctcatttcctggatctgcactgccatctgtggygggagctcaacagggtgcctagtctggttttccaaatgggaakgtggcagttytgagaagtaactrttctagatccagcaggtggcatgtgacagagccagggctcaaagcattctcaccaaatccagtgctcttcgtgtattaccttttatagccagaaaaataaatwtgmcaaccmmmawmaaaaaaaaaaaaaaaaaa

SEQ ID NO: 1865 - DNA, 1939 bp, Rattus norvegicus
gatgttgcaaacagttttcctaactatgctgactctggctctggtcaagtcacaggtcacggaggaaaccattacatacacgcaatgcaccgatggatatgaatgggaccctgtaagacagcagtgsaaakatattgatgaktgtgacattgtaccagatgcttgsraaggtggaatgaaatgtgtcaaccactatggaggatacctctgccttcctaaaacagcccaaattattgtcaataacgaacagcctcagcaagaaacaccagctgccgaakcatcgtcgggtgctgccactgggaccatakctgccaggagcatggctaccagtggtgtgatccctgggggtkgcttcatagccagtgctactgcagttgctggtcctgaagttcagacaggccgaaataacttcgtcattcggaggaacccggctgaccctcakcgcatyccttmcaacccttcccaccggatccagtgtgcakcargctatgaacagagtgagcataatgtgtgccaagacattgatgagtgcacctcagggacccacaattgtagattggaccaagtgtgcatcaattyacgtggwtccttcacatgccactgtcttmctgggtatcagaagcgaggcgaacagtgtgtggatatagatgagtgctcagtgcccccatactgccaccaaggatgtgtgaacaccccgggttccttttactgtcagtgcaatcccgggtttcagctggcagcaaacaactacacttgtgtggatataaatgaatgtgatgccagcaaccagtgcgctcagcaatgctacaacattcttggctcattcatctgtcagtgcaaccaaggatatgaactgagcagtgacagactcaactgtgaagacatcgatgaatgcagaacctcaagctacctgtgccagtatcaatgtgtcaatgaacctgggaagttctcatgtatgtgtcctcagggttaccaagtggtgcgaagcagaacctgtcaggatataaatgaatgtgagaccaccaatgaatgccgagaagatgaaatgtgctggaattaccatggtggcttccgctgttacccacaaaacccatgtcaagatccctatgttctaacgtcagaaaaccgatgcgtttgcccggtctcaaacaccatgtgccgagacgtgccccagtctatagtctacaaatacatgaacatccgatctgacaggtccgtgccatcagacatcttccagatacaggcaacaacgatttatgcaaacaccattaatacttttcggattaaatctggaaatgaaaatggagagttctacctacgacaaacaagccctgtgagtgcaatgctggtgcttgtsamgksgytaacaggaccaagagaacacatcgtggrcctggagatgctgacagtcagtagwatwsggmmckwscgcacaagctytgtgttaarattracaataatagtgggsccgttttcattttaaacttttattcacataaagcctaccacaggcatttaaatcagccaaagaatatcattacattaaagtytatdttatttatagctctatctagtayatctatattyaaacagctagactatggtaggaagtgggcatttaatccataagagtcaayatttatctttatcaytgtgtgtaaattagacattagtccaayattcttcttgaagagagctaagcatatattatctagtgaaayttggattctttcctacaaaaatgggrccaagcaatgatactgttctgtggtgaatmgagaaatatacacctccacaaacaatctcatgaggattggccatctaaacatcaagagcaagaagggtttyttttttaacttytttgtaagaaaatggaaaaaagtcaataaagatatatttctttagaaaawraraaaaaaaaaaaaaaaaaaagtgagcg

SEQ ID NO: 1866 - DNA, 3779 bp, Rattus norvegicus
cggccgcgactccttaaatagcatcgcaaccctgcgcggggcagttcgtggattgcagtgacagccgcctgcggagcgcccgggcagcgsagrwgaattctgcctaragaagcgccaacacagaactatggaagtccacgaattgttccggtattttcgaatgccagagctgattgacattcggcagtacgtgcgtacccttccaaccaacacactcatgggcttcggggcttttgcagcgctcaccaccttctggtatgccacccggccgaaggccctgaagccaccatgtgatctgtccatgcagtctgtggaagtaacgggtactactgakggtgtccgaagatcagcagtccttgaggacgacaagctcttgctgtactactacgacgatgtcagaacgatgtacgatggcttccagagggggattcaggtgtcaaatgatggcccttgtttaggttctagaaagccaaaccagccatatgagtggatttcttacaaacaggttgcagaaatggctgagtgcataggctcggcgctgatccagaagggkttcaaaccttgctcagagcagttcatcggcatcttttctcagaacagacctgagtgggtgaccatcgagcaggggtgcttcacttactccatggtggttgttccgctctatgacacgcttggaaccgacgccatcacctacatagtgaacaaagctgaactctctgtgatttttgctgacaagccagaaaaagccaaactcttattagaaggtgtagaaaataagttaacaccatgccttaaaatcatagtcatcatggactcctacgacaatgatctggtggaacgcggccagaagtgtggggtggaaatcatcggcctaaaagctctggaggatcttggaagagtgaacagaacgaaacccaagcctccagaacctgaagatcttgcgataatctgtttcacaagtggaactacaggcaaccccaaaggagcaatggtcacccaccaaaacattatgaacgattgctccggttttataaaagcgacggagagtgcattcatcgcttccccagaggatgttctgatatctttcttgcctctcgcccatatgtttgagaccgttgtagagtgtgtaatgctatgtcatggagctaagataggatttttccaaggagacatcaggctgcttatggatgacctcaaggtgcttcagcctaccatcttccctgtggttccgagactgctaaaccggatgtttgacagaatttttggacaagcaaacacgtcagtgaagcgatggctgttggattttgcctccaaaaggaaagaggcggagcttcgcagtggcatcgtcagaaacaacagcctgtggsawaarctsakctytcacrmgrtrcrgycgmkcywgrrcgggawmsyccggctgakgatcrcasgagcagccccagtgtctgccacagtgctgacgtttctragggcggctctcggctgtcagttctatgaaggctacggacagaccgagtgcaccgctggttgctgcctgagcttgcctggagactggacagcakgccatgttggtgcccccatgccttgcaattatatcaagcttgtagatgtggaagatatgaattaccaggctgccaagggcgagggtgaggtgtgtgtgaaaggggcaaatgtgttcaaaggctacttgaaagacccagcaagaacagctgaagccctagataaagatggttggttacacacgggggacattggaaaatggctgccaaatggcaccttgaagattatcgacaggaaaaagcacatatttaaactagcccaaggagagtacatagctccagaaaagatcgaaaatatctacctgcggagcgaagccgtggcccargtgtttgtccatggagaaagcttgcaggcctttctcatagccattgtagtacctgatgtggagatcctaccttcctgggcacagaagagaggatttcaagggtcctttgaagaactgtgcaggaacaaggatatcaataaagctatcctggaagacatggtgaaacttggsamgarkgctggtttgaagccatttgaacaggtcaaaggcattgctgtgcacccggaattattttctattgacaatggcctcctgactccaacactgaaggcaaaaaggccagagctgcggaactatttcaggtcacagatagatgaactgtactccaccatcaagatttaacatgaggaagaatcsttagaggaaatggcgcaymkscacrakcytcctsgtaccaatggcctttgagttggtaamtctgcctgcagcgagtgtgggaaaggaaatgccatgstggacttgtgcacagggtcttaccatagggatagcagagggcacggaacactgccttacagtcacctgtgttgtagcccatgatsmtggggrtacacagttyccaaaacgagccktaaacattgtaaaggggaacccataaaagtgctaagttatttmagacttcaacsmayraggtgggtgttaaaamwwmwrwmwmmwrwttttctaaccaaggggttaggacttactctytytgatacgtmtgmtgytggctgcacaccctgcagccgtctgmtgctctgaagagtacagtacactggaagaaagctacccctttaagagcaactgtccagkctgaagaaagtcacagtggaccagagatktstcttcttaaccccttcccmttgtccctttccskcacsactcacatgcagtacatttatgtgacccttytggtttgtaagggtwccaaagggtccctgktgtgcytgctggtaacctsgtgtttccagtacactaaagaacrkakmskcctcagaacaatgcgggtacccagtytcaraaaarraaaaaaaaaaaaaggtggctcctgcgttgagccagcaacttgcaggctcacacagatgtcctcagactccgctccrtctctgctycctgcccctcccattcttcccaggggttatgagaaaccctgccttagactctgcagtgaagatggtgttccgaagaatgacctggatgggccatgctcaactgtgattcctcccccgctgtccactcgctcgctcgtcgtggaaccarcccgtatctgcagcggcctctgkgctccaaatgtggttttctagcaaatgctaatgtggtgatcaacttgcwttgtwttctttccctcccagttaaactcaggcacagcatgtcttcagaagtatctaggcagttggtataygtgggtacttattaaagtggacagtawtaagtaaawrwmmwwawwawaaaactrsckgmykyawgykwawtscmtttrataagccaaaaatctggggtgtagaaatctgggggaaaaaaaatcatatcctgggatcaacttcccaaggtawattttttaagttaatttgggaaatgaacagcatttcactttgccgcgagtcttggccacatttgacctatttgagcygtttatacatttgaagccactgttgttggctgtgtgacagtgtgtgtatcttgaagcacaactgggtttgcactaaagaatcatcattgtaataacmctatttggtagcctaacttcattttsgtattyttaactgcacaggaagtcgataatttgtcacmacggggttttgaatgtttgctttcagtgttggctatttctatgttttataaaccaaaacagaatttccamaaacaatgaaggaaaccaaaataaatatttctgcatttggarwrarwrraaaaaaaa

SEQ ID NO: 1867 - DNA, 1020 bp, Rattus norvegicus
ccgcacagcagtaggacccgtgctcgcttggcaatcctgctctgcaaccgcttgtcggactgctcaccggccgtcccggctgcagactgtctgcacccctcggtcccatcggcaccatgcacctctcccagctgatcgcctgtgccctgctgctcgcgctactctcactccggccctccgaagccaagcccgggacaccaccgaaggtcccgagaaccccgccaggggaggagctggcagagccccaggcagctggtggcaatcagaaaaagggtgacaagactccaggcggcgggggagccaatctcaagggagaccgatcgcgactgcttcgggacctgcgtgtggacaccaagtcccgggcggcgtgggctcgccttctgcacgagcaccccaacgcgcgcaaatacaaaggcggcaacaagaagggcttgtccaaaggctgctttggcctcaagctggaccggatcggctccatgagcggtctgggatgttagtgcagcgacccctggcggcggattgggaactgcactgtgcactgaggtcatccttggtcatcagcctccagcatctggaaacacctccaacgcaatgtggcttttacatttctttttattttttcctcctggtactggcaatacacaacaccagctgttttattattatttggggaggggaggggatgattttattgtttggggttttttttttgaaaatgaaaaataaaaaattatatattatatatatattatatacatgagacacacactcccacaccgacttgatgacaagggacggtttttaaagtgactgacaaaaccagctagctgtaaaaacattgctgtttgtaaattcacatcatgcataaatgtatttatgttgtaaagctatttatattgtttataaagagatatttataaaaattttatttatgtaactaaatgaaagaagccaaccattgtaatgtttttgtcctaactagttgaaaaaaaatgttaaaaaaaaaaaagccattccatg

SEQ ID NO: 1868 - DNA, 399 bp, Rattus norvegicus
cacgaggcgcggggaaaatggcggcggcggcggcggcggcggcggcggcggcggcggcgaacgggagcggaggcagcagcggcatggaggtggatgcagcagtccccagcgtgatggcctccggagtgactgggagtgtttccgtcgctcttcatccccttgtcatcctcaacatctcagaccattggatccgcatgcgctcccaggaggggcggcctatgcaggtgattggggctctgatcgggaagcaggaggggcgaaatatcgaagtgatgaactcctttgagctgctgtctcacaccgtgggaaaagaagattatcatttgacaaagaatattattacaccaaggaggagcaagtttaaacaggtttttcaaaggagctkgagtttttgggttg

SEQ ID NO: 1869 - DNA, 629 bp, Rattus norvegicus
tttttttttttttttttagatgtttacagtgattacatttatctaagcaacacacatacatgttcagttgtaagacggtaactaaatttctgtgacaaatatgctttttttaatagcaagaacattatagagttaatgcagagtcctaaagataatctagtagtcgctatgttttttttcgtaagtcttcactttagatgctgttatttctagcacagtaagcaggcagagtctttcaaatgctcgaacactggaatctttggttgctacmckaksagctagmwwgcarmcmagmagscagccwyyymmrgmawgbdhwtrcgwcarmavshhgmrwamcmysamaggtttctaagcatggaggaagagaagcagcagagcagaagattggagcaacatttgtttctccccagatctagaccttttagttcatatgtacactagccagtggttgtggacaaccatttacttggtgtaaaggacttactttccgtataaactggctctgggtagcactgctgatcctgagctgtagccgctgtaattgtgaatattaactgaggtagtgaaacatggtgtccggttttctattgcatttttttcaagtggaaaagttaactaaatgggtg

SEQ ID NO: 1870 - DNA, 406 bp, Rattus norvegicus
  misc_feature (183)..(183): n is a, c, g, or t
  misc_feature (403)..(403): n is a, c, g, or t
atggcggcctcaaccgtaattgggtcatggttgacgaaacccgaaaccctttgcactttgttgggtggtgaaatctcggatgaccttgacattggtgactgccccaaagggtccgaaaagctgccacagcacactctcatccgcttctggggacaggttgtacacgaagatgcaccagccaangcctgcagcgcctccagacaagccaacgcctgccaggccactcatgccatcgatggcgattggggagaacctcttgactccgtaggccatgttgagcaaattgtccagccggaagcgctgtgtctgatgatgcaggggaccagcgtagcgcctggcagaggactggtacaggtgggtgagcagggcctgccctgtcttctgacttgggttgtttgcaaanttg

SEQ ID NO: 1871 - DNA, 337 bp, Rattus norvegicus
ggggcgagtccacttcgtgcctggctggagttcaggggtccgaagtgtcagctgtaggcctggtgaagcttggtggccccatggccccgctcggagcttmcccgcgtctggtgttgctgtttagcgggaagagaaaatccgggaaggacttcgtgaccgaraggctgcagagcagacttggaggtaacatctgtgctgtcctgcggctctctggtccactcaaggagcagtacgctcgggagcatggcttggacttccagaaacttctggacgcaagcacttacaaggagacctatcggagggacatgatctkttgggggggaggagaagcgccagg

SEQ ID NO: 1872 - DNA, 834 bp, Rattus norvegicus
tggcctcgaggcataaactggcaccactagagggcagggatggtggccacaggagctggcttggctcacacattgggcctccctacaggcttgcatccgggcctgcagactcgacctctcggcggagacgcccgtgtttccaggcaacggagatgaacagcccttgactgaaaatccccggaagtacgtcatgggtcacttccgctgggaccgcttcggcccgagaaacagcagcagtgctggcggctcagcgcagaggcgtgcggaggaagagrcggygkggggagatggcmgtccrgagccragtccacgsgagggcaagcgctcctactccatggagcacttccgctggggcaagccggtgggcaagaarcggcgccckgtgaaggtgtaccccaaygtygcygagaacgagtcggcsgaggcctttcccctagagttcaagagggagctggaaggcgagcrscctkatggcttggagcavgtcctggagycsgayrcsgagaaggmcgacgggccctaycgggtggagcacttccgctggrgcaacccgcccaaggacaagcgytacggyggcttcatgacctccgagaagagccagacgcccctggtgacgctcttcaagaacgccatcatcaagaacgygcacaagaagggccagtgagggtgcaggggtcttctcaytccaaggccccctccctgcatgggcgagmkbactgacctcyagcctctyagagttacctgtagttaggaaataaaacytttmagayttcamarhmrrmwmwrawmwwcaataaaaactgcgtaaataarrwmaaaaaaaaaaaaaaaaaa

SEQ ID NO: 1873 - DNA, 716 bp, Rattus norvegicus
cgagggatcctcgtgcgcttccctacgccgctgatctgcrccatgcartgagcgaccctcgcgcccgccactctacgccacgcctggacggagacacttggacctgcactaaccagctacgcccggttcccaccactgctcaagatggccaggggcagcgttatcctgctagcctggctcctgttggttgcaaccctgtcagccactctggggctcgggatgccamcaaaggagaakakaggctggaccctgaacagcgctggctaccttctgggcccacatgccattgacaaccacagatcatttakcgacaagcatggcctcacaggcaagagggagttaccactggaagtggaggaagggagactaggaagtgttgctgtrcccctgcytgagagcaatatcgkccgcactataatggagtttctcagtttcttgcaccttaaagargccggggccctcgacagcctgcctggcatccccttggccacctcctcagaagacctagagcagtcctgagaccacacccactgtgcacctgtgtcctctgctataatttaaagtcattctaggctaaaaagaatcttccgccaactcctcaagccaacactttgttctctgctttgatgctgagttattacaattaagatgttttgattggagtaawkatattgtgtgacawaawaaaaamwarmaagtaaaaaaaaaaaaaaaaa

SEQ ID NO: 1874 - DNA, 4550 bp, Rattus norvegicus
gccaccggctgctcggccgcagctcgcccgcgcgccgcctcggggscaccgccaggctccagcgctccggttcaagaggagccacactggggagtcccaaggaagcagccaggcagatggggagcccaggatccgtggtttccctctccttagtctgctggaggacgcgcgtggtggtaccaagttccacacatgacttaatgaataagggaatgccagagctgaagaggacccagcatgactactaacctatgactcctaacagtatgacagaaaawygccttccagcctgggacaaacagaagccccatccagaccgaggccaggactggaagctggtaggaatgtccgaagcctgcctgcacaggaagagccatgtggagaggcgtggtgcattgaagaatgagcaaacatcctcacacctcatccaggccacttgggcgagctctatattccatctggatccagacgatgtgaacgatcagagcgtctcaagcgcccagactttccagaccgaagagaagaaatgtaaagggtatatccccagctatctagacaaggatgagctctgcgtagtgtgcggggacaaagccacggggtaccactatcgctgcatcacctgtgaaggctgcaagggtttctttagaagaaccattcagaaaagtctccatccatcttactcctgtaaatatgaagggaagtgcatcatagacaaagtcacccgtaaccagtgccaggaatgtcgctttaagaaatgcatctatgttggcatggcaacagacctggtgctggatgacagcaagaggctagccaagaggaagctgatagaagagaaccgtgagaagaggcggcgggaagagctacagaaatccattgggcataagccagagcccacggatgaggaatgggagctcatcaagacagtcaccgaggcccacgtggccaccaatgcccagggcagccactggaagcagaagcggaaatttctgcctgaagacattggacaagcacccattgtgaacgccccggaaggtggmmaggttgatctggaagccttcagccattttacaaaaatcatcacaccagcaatcaccagagtggtggatttcgccaaaaagttgcccatgttttgtgagctgccctgtgaagaccagatcatcctcctcaaaggctgctgcatggagatcatgtccctccgagctgctgtgcgctatgacccagacagcgagactctaaccttgaatggggaaatggcagtgacacggggccagctgaaaaacggaggtcttggggtggtgtcagatgcgatctttgacctgggcatgtctctgtcgtctttcaacctggatgacacggaggttgccctgcttcaagccgtcctgctgatgtcttcagatcgcccagggctagcttgtgttgagagaattgagaaataccaagacagtttcctgttggcctttgaacactatatcaattaccggaagcaccatgtgacacacttttggcccaaactcctgatgaaggtgacggacctgcggatgattggagcgtgccacgccagccgcttcctgcacatgaaggtggagtgccccaccgagctcttcccgcctctcttcttggaagtctttgaggactgaacggactggacaggttcttgtcattcctgcagcacgactgggtgtcgctgcattccacctgtagctctttctgttgtcgtttcttcgtttctttgtgtcaagtgagctcatcagtgggtcagcgggtcatcagtggcatagacttggatgaagtggtcctttgaatgtgggtctttgtaaccattgcgtttcgttctccagtccttagtgtgacggctttgaggggttcacagcagtgcaggccgagtgggggcgatcatctcaccagcaccacgtcgtcaccagctcccatctgtccctgggcagactcaagcaagccaaatggcattacagaagactaaagaagccttaaaaccgagacgacagtcatcttgatccaatgcgatccagttctgttgtttgtaaggtgaagctggcagagctcaggccacctcaggttgggcgtggcttttggcgcgtgaggggaggagccgttccagcttcaggaactcacagctactcaggagcttaccgcttccagcacccttactctccaagcaggctgacttggaatgtgcaggatacccacaccataacaaatcgacgttactttccatggccttctgtaaccttgtgatttacttcaagttgcgcaagagtagaacttggagacttgactggtttgaggccacaaggaaagtctccttttcaggatgcccatagagcttggaaatcatccatgttacagcatagtttccaaaaatggtgttacctcaagcaggaaggcacctttgcagcttagatagattcacaagccattcccacagagctcaaacctgtttacagagtgccgtccctcttccgatggcctatgaaccagccctctccccagcctgtggctgttgagctggtgatgtttccctgtacattgaatcttccaatcagagagagacgtgttgaaactccagtcttgttttggaaaaatccctggaaaagatcaatgcaggaacaatcagattcaaaggaaaagaactactcatgctgtaggctgtccaattagggagaatgctccccgtggatcggcaaggcgctttacccattcacaaatgtctcccagtcccatcccgtctctgctcccaaacccacctcctcagattctgagacactaaatagcttctcttctcttctcttctcttctcttctcttctcttctcttctcttctcttctcttcccttctcttctctctctcaacactaactcttctgtagcttatacactattaccttggcaaatagtcctcataaaatataggagaccatgcataggaaacaccattacgctgccccatccccagtgaccgtgtagagtagatgtctctaagcaaccagtagtgacaacttacccaaaaatgggcagactgtacccatgcaactgaatgtacgactcttcactgatgtcacagatgtgaactacttcttgtctgcctttcactgccttagcctggaaatgctgggaaaaacaagccatatcagtgagaattacctaaaagcaaaggaagtcactgtgaaaagcaagggaactcacttcttcccaccgggctcggtagagcatctttggcctcacagcaagtcagggtgcctgcggcctgggtcatttaggaccttatcagtgttagttttcttacctcctagtaaatgagttgatctccagaaacccctcttcccttctctagtgtttgacttttcagactaaggagggggcgtctttgaaagattccttttctattcaaacttctagcttcggaaacggaatgcatgtgggtgctcatggagtgagaatgaggatttgattcagaggaaggcagaatgacctcggaagcagagaggtacagccctgaaagtctttggaaataactgaggaaaagggaacagtctgtgcagggaactaaagatttagcctgatgttttagcagataaaaacatcgctgtagacttggtgtggagattaaatagaaacaagaagcccccagagagtcaagttcaagcatctgtctgagatttgctttcccaggcaacctgtacccagcctcctccctcaggaatttcattaaaacatctgtcccctctgtcagctctcctggaatgcctctgtccmgacaattaaaacacacttgctgtgagaccagttctccgtccaaagagggagagagggaggtgacaggtaggtgagtcccacacaggcatacaaacttytggggcaccagagtttctgaggaagtttcctgatgctgacagttttcaaatggcatcggaaaccctggcattagtgcagggtttgacccagggtcattcagagcgctgtaaagattaagcgctgggcactagcccggtcctcacaatccagccagccacagcacagtgaccctccctctgtagaggctcacctttcagggacgaaccaggctgtagcaaccgtggagactgrgyactgarsaagacaagcaagcttcagtcttytggcgggaaggaacaagaacggtaggcattcagaatggccttcgagaaactcattttatgcactagattgtgagggatttgctcccaatgtttttttttttcttcttcttcttcttctttttcaaagtcattcccttctaatcttgtccagactttsaawwmaarwrwrramrmggtgacaagaacctttacacctgctccaccgtggggagactttccagtcaaggagaacacgctcatcctgctggggcactcactgacaaatggtattcatgaacgagaaggctgtgcacatgcaaccgacatgtgcgtgtgcacacatgtgcgtacatccggtcgttgcctcaagtgtactttgcacttcagttaaaatgtgcagaacttccagaaactggaagaagaagaagaagaaaaaaa

SEQ ID NO: 1875 - DNA, 3013 bp, Rattus norvegicus
gaattcgggacagacatttgtcgtcatcagctgattattttcatcaggcagctggtcacggtccccttgggtttcatcaggctttgaaccactcacattttgtttttttaaaccctgatcctttccagtggaaacactctgcgcttgaaaggaaaatgtctctctgaagcagacgtcatgacaggcttcctaagggtcttcttggttctcagtgccactctctcaggttcctgggtgactcttacggccactgcaggactcagctcagtggctgaacacgaagacgcactcctcagacatttgttccaaggttaccagaaatgggtccgccctgtgttgaattccagtgacatcataaaagtgtattttggattaaaaatatcccagcttgtggatgtggatgaaaagaatcagctgatgacgacaaatgtgtggctgaagcaggaatggacagaccaaaaattacgctggaatccggaagaatatggtggaattaattcgataaaggttccatcagaatcgctctggctgccggacatagttctctttgaaaatgctgacggacgttttgagggctccctcatgaccaaggccattgtgaagtccagtggaaccgtcagctggactcctcccgccagctacaagagttcctgcaccatggatgtcacatttttcccgttcgacaggcagaactgctcgatgaagtttggatcctggacttacgacggtaccatggttgacctcattctaatcaatgaaaacgttgaccggaaagacttttttgataacggagagtgggagatactcaacgcaaaggggatgaagggcaacagaagagaaggcttttactcctatccgtttgttacctactcttttgtcctgagacgcctgcccttgttttacacgctctttttgataatcccctgcctggggttgtcttttctcacggtcctggtgttctacctaccctcggacgaaggggaaaaactctcattatccacctccgttttggtctctttgacggtgtttcttttagtgattgaagaaataatcccgtcctcttcgaaggtcatccccctcattggcgagtacctcctcttcattatgatttttgtcacgctgtctattatcgtcacggtttttgtaattaatgtccaccacagatcttcctcaacgtaccatcccatggccccctgggtgaagaggctgtttctacaaagactcccgagatggctttgcatgaaggaccccatggaccgcttctctttcccggatggaaaggagagtgatacagccgtgagggggaaagtctcaggcaaaaggaaacagactcccgccagcgatggagaaagagttctggtcgctttcctcgagaaggcctccgagtccatcagatacatttcgaggcatgtgaaaaaggaacacttcatcagccaggtagtgcaagactggaaatttgtggctcaagttctggaccgcatcttcctgtggctctttctgatmrckwskgtgttgggttccattctgatttttattccagccttgaagatgtggatacatcgtttccactaggagccactctctggacccatttagaagacatacatagagacaatcccaccttaggactgacagcggctggcatgctgacaggaagcagagccatgcaatcgtagtggtgcccttgtcttgtcctgggagctttctgtgattgcagggcactgagagaatgtgggtttgagttagtgagatggtggctgccattagaggtgtagttgggcaatttggagacgtctccatgttatattgttatgtgggagttcctgaactmctccctctgctcatccctgaacgcactgggsytatgtggtatttctctagcagtgtgcgtgaacgcattttgacaatagtttcaggaattacgcaggtacaactctccacacacaggtcaratttgccacttgtcaacgartgtcccacaaatagggtcattgaagatgaccttgaatggctatgacagttctmtaaggcaggtgttactggaagtttgctcactgacctgcgaacttttcgaatgcaggtaggaactcggktgatttstagcttgctgtaaggttccatcaaamtaacttaccccagaaaaacagccattcgctmgtagaactgtatttattcacacacatctcttttttttctcttagggaattaaaagtgttgaatattctttgawtgtggttttggaaggcctcttagccagtgttctattactgtgaagagwtaccatgrccatggcaaaaarawmararrwwwagtccactttcattacagtgggaagcatggtgccgctcggcagatacggtgctagacatgtacatctggatctgcaggcagcaggaagagagagactggcctgggtttttgaaatcccaaagcacatccccagtgacacacttcatccagcaaaactccaccwckaggtccttctcaagtagtgccaagccctgatgactaagtactaggatacaggaacctaggggggccatccctattcgagccayttcagatagaactggttttcacagagtcatctgccttcgccttcctctccctgtgtctccctcctttccacatctcaccysaatkctcctccaggactgtcagggagtgtctatcagattgactttgctgctgctattgagtctttcctgggttttgttaaaggagtttgttccttcacattggtgaagccctgcactctgttttatttcagacatggttcttctaagcagtttatccctgagattttaaaaaccctagtctaaggttttatttttagattattatcactgcatacatacagtaagttatttttttcttccaaaaccgcttaagcttttatcatcttcagtcttagaaatgtcataccgtgtctaagagaatgacatccatccatctttatttctgttaactctccaacctccccttcccctctcctttccttccatctcctctc

SEQ ID NO: 1876 - DNA, 2178 bp, Rattus norvegicus
cagagcggagctgcggccaggaggaggacgcggccatggggctgctgtcccaaggctcgccactgagctgggaagagacccagcgccacgccgaccacgtgcggagacacggcatcctccagttcctgcacatctaccacgcagtcaaggaccggcacaaggacgtgctcaagtggggtgacgaggtggagtacatgttggtgtcctttgatcatgaaaataggaaagtccagttgttactgaatggcggcgatgttcttgaaactctgcaagagaagggggagaggacaaaccccaaccacccaaccctctggagaccagagtatgggagttacatgattgaagggacacctggccagccgtacggaggaacgatgtccgagttcaacacagtggaggacaacatgaggaaacgccggaaggaggctacttctgtattaggagaacatcaggctctttgcacgataacttcatttcccaggctaggctgccctggattcacactgccagagcacagacccaacccagaggaaggaggtgcatctaagtccctcttctttccagacgaagccataaacaagcacccccgctttggtactctaacaagaaacatccggcatcggagaggagaaaaggttgtcatcaatgtgccaatattcaaggacaagaacacaccatctccgtttgtagaaacatttcctgaggatgaggaggcatcaaaggcctctaagccagaccacatctacatggatgccatgggatttgggatgggcaactgctgtcttcaggtgacattccaagcctgcagtatatctgaggcaagatacctttatgaccagttggccactatctgcccaattgttatggctttgagtgctgcatcgccattttaccgaggctacgtgtcagacattgattgtcgctggggagtgatttctgcatctgtagatgatagaacacgggaggagagaggactggagcccctgaagaacaatcgctttaaaatcagtaagtctcggtatgactcaatagatagctacctgtccaagtgtggagagaagtacaatgacatcgacctgaccatcgacacggagatctacgagcagctcttagaggaaggcatcgatcaccttctggcacagcacgttgctcatctctttattagagacccactgaccctttttgaagagaaaattcatctggatgatgccaacgagtctgaccattttgagaatattcagtccacaaactggcagacaatgaggtttaagcctcctcctccaaactcagatattggatggagagtagagttccgaccaatggaggtacagttgacagactttgagaactctgcctatgtggtatttgtggtactgctgaccagggtgatcctctcatacaaactagacttcctcattccactgtccaaggttgacgagaacatgaaagtggcacaggagcgagatgccgtcttacaggggatgttttatttcaggaaagacatttgcaaaggtggcaacgccgtggtggatgggtgtagcaaggcccagaccagctccgagccatctgcagaggagtacacgctcatgagcatagacaccatcatcaatgggaaggaaggcgtgtttcctggactcatccccattctgaactcctaccttgaaaacatggaagtcgacgtggacacccgatgcagtattctgaactacctgaagctaattaagaagagagcatctggagaactaatgactgttgccaggtggatgagagagtttattgcaaaccatcctgactacaagcaagacagtgtaataactgatgagatcaactatagcctcattttgaaatgcaatcaaattgcaaatgaattgtgtgaatgtccagagttacttggatcaggctttagaaaagcgaagtacagtggaggtaaaagcgacccttcagactagacatccagcaaagtggatggcagctgcagccctgaccccgagcccactcagacgctgtgaagaccaagatggcctacagtgttccagttgcccacaagtgactagaagcttccttcagtaggtgaatctgagtttgtatatgtatatactaaagtatttttatgattattaacaatgtattttaataacactgtatctacagtcatggtgaactggcttgtacattttt

SEQ ID NO: 1877 - DNA, 9870 bp, Rattus norvegicus
tggggtcacttccttcacacaggactttggcggaaatctctacacccgtgtctcgtcatccccttcgagagcattaactatttaaaaccaggagagaaagcgcacgccgagaggaggtgtgggtgttccgctcccatcctaacggaacgagctccctcttcgcggacatgggattgcccagcggctgctaacccctgtcctggtcctgatccctcaaaccggcgtggctccccggtcaccaaggagctgactacaaaggatttgcatccttggctgggagtccattggctacagagtgcctgacctgggtcaggcttttcaacaaggacatgtctgacaaaatgtctagtttcctacatatcggagacatttgttctctgtatgcagagggatctacgaatggatttatcagcaccttgggcttggttgatgaccgttgcgttgtacagccagaagctggggaccttaacaatccacccaagaaattcagagactgcctctttaagctatgtcctatgaatcgatattctgcacagaagcagttctggaaagctgctaagcccggggccaacagtacaacagatgcggtgctgctcaacaaattgcatcatgctgcagacttggaaaagaagcagaatgagacagaaaacaggaaattgctggggacggtcatccagtatggcaacgtgatccagctcytacatttgaaaagcaataaatacttaactgtgaataagaggcttcctgccctrctggagaagaacgccatgagagtgacgttggatgaggctggaaatgaagggtcttggttttacattcagccgttctacaagctccgctccatcggagacagtgtggtcataggtgacaaggtagttttgaaccctgtcaatgctgggcagccgctacatgccagcagccatcagctggtggataacccgggctgcaatgaggtcaactccgtcaactgtaacacaagctggaaaatagtgcttttcatgaaatggagtgataacaaagatgacattctaaaaggaggtgatgtggtaagactcttccatgctgagcaagagaagtttctcacgtgcgatgagcacaggaagaagcagcacgtcttcctgaggacaaccggcrgmcrgtcagccacgtcggccaccagctccaaagccctgtgggaagtggaggtagtccagcatgacccatgtcggggtggagctgggtactggaatagcctcttccggttcaagcacctggctacagggcattacttggcagcagaggtagaccctgactttgaggaagaatgcctggagtttcagccctcagtggaccctgatcaggacgcatctcggagcaggttgagaaatgcccaagaaaaaatggtgtactctctggtctctgtgcctgagggcaacgacatctcctccatctttgagctagaccccacaactctacgtggaggtgacagccttgtcccaaggaactcctatgtccggctcagacacctgtgtacaaacacctgggttcacagcacaaacatccccattgacaaggaagaggaaaaacctgtcatgctgaagattggtacctctcccctgaaggaggacaaggaagcttttgccatagtccccgtttctcctgctgaggttcgggacctggactttgccaatgatgccagcaaggtgctgggctccatcgctgggaagttggaaaagggcaccatcacccagaatgagagaaggtctgtcaccaagctgctggaagacttggtttactttgtcacgggtggaacgaactctggccaagacgtgcttgaagtagtcttctctaagcccaaccgagagcggcagaagctgatgagggaacagaatattctcaagcagatcttcaagcttttgcaggcccccttcacggactgcggggatggcccaatgcttcggctggaggagctgggggaccagcggcacgctcctttcagacacatttgccgactctgctacagggtcctgagacactcacagcaagactacaggaagaaccaggagtacatagccaagcagtttggcttcatgcagaagcagattggctatgatgtgctggccgaagacaccatcactgccctgctccacaacaaccgaaagctcctggaaaagcacatcaccgcagcagagattgacacgtttgtcagcctggtgcgaaagaacagggagcccaggttcttggattacctctctgacctctgtgtatccatgaataagtcaatccctgtgacccaggagctcatttgtaaagctgtgctgaatcccaccaatgctgacatcctgattgagaccaagttggttctttctcgttttgagtttgaaggcgtttccaccggagagaatgctctggaagctggggaagatgaggaagaggtgtggctgttctggagggacagcaacaaagagatccgtagcaagagtgttagggaattggcacaagatgctaaagagggacagaaggaagacagggatgtcctcagctactacaggtatcagctgaacctctttgcaaggatgtgtctggaccgccagtacctggccatcaatgaaatatccgggcagctggatgttgacctcatcctccgctgcatgtccgatgagaacctcccctatgacctcagagcatccttttgccgcctcatgcttcacatgcatgtggaccgagatccccaggagcaggtgacccctgtgaaatacgcccgtctgtggtcagaaattccctccgagatcgccattgacgactatgacagcagtggagcatcgaaggatgaaatcaaggagaggtttgctcagacgatggagtttgtggaggagtacctgagagatgtggtttgtcaaagattccccttttctgataaggagaaaaataagctcacatttgaggttgtgaacttagccaggaacctcatatactttggcttctacaacttttctgaccttctccgattaaccaagatcctcttggcaatcttagactgtgttcatgtgacaaccatcttccccattagcaagatgacgaaaggcgaagagaataaaggcagcaacgtgatgagatctatccatggagttggggagctcatgacccaggtggtgcttcggggaggaggctttttgcccatgactcctatggctgctgcccctgaaggaaatgtgaagcaggcagagccagagaaagaggatatcatggtcatggacaccaagttaaagatcattgaaatactccagtttattttgaatgtgagattggattataggatctcctgcctcctgtgtatatttaagcgggagtttgatgaaagcaattcccagtcatcagaaacatcctccggaaacagcagccaagaagggccaagtaatgtaccaggtgctcttgactttgaacacattgaagagcaagcagaaggcatctttgggggaagtgaggagaacacacctctggacttggatgatcatggtggcagaaccttcctcagggtcctgctccacttgacaatgcatgattacccacccctggtgtctggggccctgcagctcctcttccggcatttcagccagaggcaggaggtccttcaggccttcaaacaggttcaactgctggttactagccaagatgtggacaactacaaacagatcaagcaagacttggaccagctaagatccatcgtggagaagtctgagctctgggtatacaaaggccagggtcccgatgagcctatggacggagcctctggtgaaaacgaacataagaaaactgaggaggggaccagtaagccactgaagcacgaaagcaccagcagctacaactaccgagtggtgaaagagattctgattcgacttagcaagctctgtgttcaagagagcgcgtcggtgaggaagagcaggaagcagcagcagcgactgctgaggaacatgggtgcccatgctgtggtgctggagctgctgcagatcccctatgagaaggccgaagataccaagatgcaggagatcatgaggctggctcacgaatttctgcagaatttctgcgcaggcaaccagcagaaccaagctttgctacataaacacataaacctgtttctcaacccagggatcctggaagcagtgaccatgcagcacatcttcatgaacaacttccagctgtgcagtgagatcaacgagagagtggtccagcatttcgttcactgcatagagacccacggtcgaaatgtccagtatatcaagtttctccagactattgtcaaggccgaagggaaattcattaaaaagtgccaagacatggtcatggctgagcttgtcaattctggagaggacgtcctcgtgttctacaatgacagagcctctttccagactctgatccagatgatgcggtccgagcgtgaccggatggatgagaacagccctctcttcatgtaccacatccatctggtggagctcttggctgtgtgcacagagggcaagaatgtgtacacagagatcaagtgcaactccctgctcccgctcgatgacatcgttcgtgtggtcactcatgaagactgtatccccgaggttaagattgcttacatcaacttcctgaatcactgctatgtggacactgaggtggagatgaaggagatttacacaagtaatcacatgtggaagttgtttgagaatttcctcgtggacatctgcagggcctgtaacaacacaagtgacaggaagcatgcagactcggttctggagaagtacgtcactgaaatcgtgatgagcattgtcaccaccttcttcagctctcccttctcagaccagagtaccactctgcagactcgccagcctgtctttgtgcagctcctgcaaggcgtgttccgagtttaccactgcaactggttgatgccgagccagaaagcctcggtggagagctgtatccgcgtgctctctgacgtagccaagagccgggccatagccattcctgttgacctagacagccaagtcaacaacctcttcctgaagtcccacaacattgtgcagaaaacagccatgaactggcggttatcagcccgcaacgctgctcgtagagactctgtcctggcagcttccagagactaccgaaatattattgagaggttacaggacatcgtgtctgccctggaggaccgactcaggcccctggtccaggccgagctgtctgtgctcgtggatgttctacacagaccggaactgcttttccctgagaacacggatgccaggaggaaatgcgaaagtggaggtttcatctgcaagctmataaaacayaccaagcagctgctagaggagaatgaagagaaactgtgcattaaagtcttacagaccctcagggaaatgatgaccaaagatagaggctatggagaaaagcaaatttccattgatgaattggaaaatgccgagctgccacagccaccggaagctgagaactccacagaggagcttgaaccaagtccacccctgaggcaactggaagaccataaaaggggtgaggcactccgkcrrmykttggtcaaccgttactatggaaacatcagaccttcaggaagaagagagagccttaccagctttggcaatggtcsactatcaccaggaggacccagcaagcctgggggaggagggggaggtcctgggtccggctccacaagccggggtgagatgagcctggctgaggttcaatgtcatctcgacaaggaaggcgcctccaatctggtcatcgacctcataatgaatgcatccagcgaccgagtattccaygaaagcattctcctggccatcgcacttctggaaggaggcaacaccactatccagcactcatttttctgccggctgacgkaagataagaaatcagagaagttcttcaaggtcttttacgatcgaatgaaggtggcccagcaggaaatcaaggcgacagtgaccgtgaacaccagcgatttgggaaamaaaaaraaarawratgaagtggaccgggatgccccatcccgaaagaaagccaaagagcccacaacacagataacagaagaggtccgggatcagctcttggaagcatctgctgccaccagaaaagcctttaccaccttccggagggaggccgaccctgatgaccattaccaatctggggagggcacccaggctacaacggacaaagccaaggatgacctagagatgagtgcagtcatcaccatcatgcagcctatcctgcgcttcctgcagctcctgtgtgaaaaccacaaccgcgatctgcagaatttccttcgttgccaaaataataagaccaactacaacttggtgtgtgagacactgcagtttctggactgtatctgtgggagcacaactggaggccttggtcttctcggactgtacataaatgaaaagaatgtagctcttatcaaccaaaccctggagagtctgactgagtactgtcaagggccttgccatgaaaaccagaactgcatcgccacccacgagtccaatggcatcgatatcatcacagccctcatccttaacgatatcaaccctctggggaagaaacggatggacctggtgttagaactgaagaacaatgcttcaaagctactcctggccatcatggaaagcagacacgatagtgaaaatgcagagaggatcctgtacaacatgaggcccaaggagctggtggaagtgatcaagaaggcctacatgcaaggcgaagtggagtttgaggatggggagaacggtgaggatggagcagcctcccccaggaacgtgggccataacatctacatcctcgctcaccagttggctcggcataacaaagaacttcaaaccatgctgaaacctggaggccaggtggatggcgatgaagctctggagttctatgcgaagcacacagcacaaattgagattgtcagactggaccgaactatggaacagattgtcttccctgtgcccagcatctgtgaatttctgactaaggaatcgaaacttcgaatatattacaccacagagagggatgagcaaggcagcaagatcaatgacttcttcctgcgctccgaggacctctttaatgagatgaactggcagaagaaacttcgagcccagcctgtcttgtactggtgcgcccgaaacatgtctttctggagcagcatctccttcaacctggccgtcctgatgaacctgctggtggcgtttttctacccatttaaaggagtgagaggaggaacactagagccgcactggtccggcctcctgtggacagccatgctcatctctctggcaattgtcattgcgctgcccaagccccatggcatccgggccttaattgcttctacaatcctacgactgatattttcagttggattacagcccacactgtttctgctgggagctttcaatgtctgcaataaaatcatcttcctgatgagctttgtgggcaactgtgggaccttcaccagaggctaccgagccatggttctggacgttgagttcctctatcatttgctgtatctactgatctgtgccatgggcctcttcgtacatgagtttttctatagtttgctgctttttgatttagtgtacagagaggagactttgcttaatgtcattaaaagtgtcacccgcaatggacggcccatcatcttgacagcggccctggctctgattctggtttacctgttctcaattgtgggctacctgttcttcaaggatgactttatcttggaagtagacaggttgcccaatgagacagctggtccagaaactggtgagagtttggccaacgatttcctgtactctgatgtgtgccgggtagagacgggggagaactgcacctctccggcacccaaagaagagctgctccctgtggaagaaacggaacaggataaggagcacacgtgtgagacactgctcatgtgcatcgtcaccgttctgagtcacgggctgcggagtgggggcggagtaggagatgtgctcaggaagccatccaaagaggagcctctgtttgctgcaagggtgatctatgacctcctcttcttcttcatggtcatcatcattgtcctgaacctcatttttggggtcatcatcgacacctttgctgacctgaggagtgagaagcagaagaaggaagagatcttaaaaaccacgtgcttcatttgtggcttggaaagggacaagtttgacaataagaccgtcacctttgaagagcacattaaggaagaacacaacatgtggcactatctgtgcttcatcgtgctggtgaaagtgaaggactccaccgagtacaccgggcccgagagctacgtggcagagatgatcagggaaagaaaccttgattggttccccaggatgagagccatgtccctggtcagcagtgactctgaaggggaacagaacgagctsasgarsctgcaggagaagctggagtccaccatgaagctggtcaccaatctttctggccagctgtcagaactaaaggaccagatgacagaacaaaggaagcasaaacaaagaattggccttctaggacatcctcctcacatgaatgtcaacccacagcagccagcctaagcaaatgagacggagggactgtactcaaccctttttaaattattgtcagcgtgggtctggctcttggttctgatctgccctctaaggttacatgtgcgcttartacatttgtaaatactcggttttgtattgtatgtatatgattgcaattctcagaggtttggactttcgtattgtaattagctctgttggcatggtgacttgtcactcctgccaaaaatattaaaaatgccttttttggmaggactacagaaagtacctgatttgcacttgaaccagattatagatttaaaaagtatwtgacatgtattttgttatttaaaactagaatagccagtatttatgttttttataaaactgtgcaatacaaattatgcaatcaccataactctgtaactcctgagtgtcttaagggagtgcgcatctttgaagctgatctgttaatacttatgtaataaatggttaaatatcaaatgatgatgctgctgccaaaattatattaatagcaagtttctggcccctgggcaattttgtaccttgtaattatcctatggtgatgctgtttctcgttgctaatggcattagtgcctcgtatcctagtgataactccaggtctgtgaaccattcaaacaacattcatttttgagacaaagcaactttagtttcaagggtaattttaagcttcaaaattaatcatttaaagtatttctttaagagagccatgttagaggctcacacgttagcttgaaagragtcgatgaaataatttttttaaagggaactttttacacgacgtttggaatamcagcatattgctgaccagycagtgtcatctcccaggtgaattttratgtcacgtwatagtcaaatgagctagctkatggtttmtagattctyttcatctkaaccaacatgatgcagtaggtgagaagttattatgcatatatacacatatacatccatataaggcaaagtaggagctgtccccttaggatgcatagctgcccccttagggtgcagagctcaacactgacagtgctgttctgagagagccacgtttgggttttatttctttgtcacatgatttcttttctggatgtgtgcaagtataacaggaagtgttttmtacctgttgcttgttttgtacctgggtctcgttttactagaccatctctgcacaaaagtttaaaaaatgamccgtaagcagagttctgaagcaagtcaagtttgtaagtgcawacctsaaattatttaataaatgmcgcagaatmctaaaaaaaaaaaaaaaaaa

SEQ ID NO: 1878 - DNA, 277 bp, Rattus norvegicus
gagatgaacttcattcaacacaactcccacatttctttcaggaacaacattgccaaacgtcatgatgaatttgagaggcatgctgaagggacctttaccagtgatgtgagttcttacttggagggccaggcagcaaaggaattcattgcttggctggtgaaaggccgaggaaggcgagagtaagtctctggtttaatatctgatgattttcctagatgagaaattacaaagaaaaaaagactatcctatggaaagctatactaaaaacttaatattt

SEQ ID NO: 1879 - DNA, 645 bp, Rattus norvegicus
cccaaaggagctccacctgtctatacctcctctcagctcagtcccacaaggcagaataaaaaaatgaagaccgtttacatcgtggctggattgtttgtaatgctggtacaaggcagctggcagcatgcccctcaagacacggaggagaacgccagatcattcccagcttcccagacagaaccacttgaagaccctratcagataaacgaagacaaacgccattcacagggcacattcaccagtgactacagcaaatacctrgactcccgccgtgctcaagattttgtgcagtggttgatgaacaccaagaggaaccggaacaacattgccaaacgtcatgatgaatttgagaggcatgctgaagggacctttaccagtgatgtgagttcttacttggagggccagcagttcamasgaattyatttaagmtaawsrctgastsmaagcckwskwwgsykagcttcccggaagaartcgccatagctgaggaacttgggcgcagacwtgctgatggatccttctctgatgagatgaacacgattctcgataaccttgccmccararacttcatcaactggctgattcaaaccaagatcactgacaagwaakrgttttttagttgattttgaaatctagtaaaacttt

SEQ ID NO: 1880 - DNA, 343 bp, Rattus norvegicus
cagccctgcctccccatcctacccccgttgagtttcctttggtctctgttgctttcagggaagatgagaggcttctcccagctgactgggctccatgagttctgggtggacaacagcacctcagtgtctgtgcccatgctctcgggcactggcaacttccagcactggagtgacgcccagaacaacttctccgtgacacgcgtgcccctgggtgagagtgtcaccctgctgctgatccagccccagtgcgcctcagatctcgacagggtggaggtcctcgtcttccagcacgacttcctgacttggataaagaacccgcctcctcggtaggaagcatgtggga

SEQ ID NO: 1881 - DNA, 7129 bp, Rattus norvegicus
gagctctcctcagatgcggcttctaaacaagccctttaactgtcttcacctgtgtagaattctgaagctccctctatacagaactttggaagcccggggtatatatatttggggttacataggtctgatttgcagggacttgcaggaacgggctgagacctccttgctatacatgagtgtcttgaggttctaagagaatacccccaaatcatcttctagacctggaccattctaggacagtggttctcgaccttcctaactccatcaccccttacttaatacggttcctcgtgttgtggtgaccccaaccatacaattattttcattgctatttcataactgtaattttgctgttgctgttatgaatcataatgtaaatattctctttaaatggaggtttgccgaagggtctcgcccacaggttgagaactggtgctccagagagtaaggggatgcagctaagattgtcaaacaccaggaggccccagattctgggggagggtgcactgtaatggtacttcttgccctgaaactggccgatggccagaaaacacagatatactggaacagctgtgacttgaacccccaaagacaagagaggaaatggacccgaaggggtagaggtcagtggtggaaggcatgtcaagcgtacataaccccgggttcgaacctgaaaaaacaaaggtgccactaaccacatgtggcttcagagccctccagacgtgaccagggtcgatggagagagaaacgggcagaggagcttgtgagcagtgaagggtgcagaagtgttataaaccatcgctcttcggagaaccaggcttccagtcacagcacagctgtaccccccctcattctccgcgaattagccgtccgttcactggaactcctcagcctgaccctggtccctgctagtccctgcagcccacagttccccggacccggctccctttcccagaacgcagtagtttgagcacctagcctgcggttctctcctaggccccagcctttcctgccttcgactgaaacagcagcatcttctaagccctgggggcttccccagccctagccccgacctagaacccgcccgctgcctgccacactgccgcttcctctataaaggggcccggagcaccagcacccaggaccccgcacagcaggtgagcctctcctgccctgtctccttgggcttaccccggtaacaggcatccctcaggatcctgcctcttctcttgagccacagtcttttctgtacaacctgcctggatcccccagccttaatgggtctggtccttgtgccttgtggctttgatttttggtctgttctcatagcgtctaactcggccttgtcagtctctctctctctctctctctctctctctctctctctctctgtcattgtctcattctttggtggagctttcctcttccagtctggctttctctccttatccccactcacttcagggttcccctgcctgtctgtccccttttctgtctgtcgccctgtctctcagggtggctgtctcagctgggaggtaagatctgtcttccgctgtgtgccccgcctcccctacacacatacacacatcctctctctctctctctctctctctctctctctctctctctgcaggttctccccatgacaccacttggacgtctccacctcctgagggtgcttagcacccctcctgtcttcctcctggggctgctgctggccctgcctctaggggcccaggtgaggcagcaagagagatgggggtgctggggcggcctggccaactcagagtcctagaaccctctcaactcttctctcctagggactctctggtgttcgcttctcagcttccaggacagctcaccagccccctcagaagcacttgacccatggcctcctgaaacctgctgctcaccttgttggtaaacttctcctccagaggtccagccccgcttttcctcctacttgcccaggggcccaagcgatcttcccatctccccacaccaacttttcttacccctcaaggcaggcaccctactcccatcgccccaccagccatcccagttgtccagtatcttttccctgaggggggaagaagacctctgaccctgatctcaccccagtgccttgtgcctttccccagggtaccccagcaaacagaattcrctgctctggagagcaaacacggaccgygcctttctccgacatggcttctctttgaacaacaactctctcctgatccccaccagcggcctctactttgtctactcccaggtggttttctctggaraaagctgctcccccagggccattcctactcccatctacctggcccacgaggtccagctgttttcctcccagtaccccttccatgtgcctctcctcagcgcacaraaatctgtgtatccggggctacaaggaccgtgggtacgctcaatgtaccagggggctgtgttcctgctcagtaagggggaccagctgtccacccacacagacggcatctcccacttacacttcagccccagcaccgtgttttttggagcttttgctctgtagaatctagggaaactcaggaactggattccagcacctcyatcctgttcatcttgagggtcacatccccagtctccagccttcccaaccaaaatagcctggagctttcacgggagtmtgargcryttcaaggcaccacrtctctcccccagggccactccagatgctyagggggagactcaagcctgcctaraagttcctgcacagagcagggtatttgtgggtctaggcggggcagagacctggacatgaaggagggacagacatggsrggaggtgtctggggacgggggaggttgactatttatgaagagaagggttaagttatttatttatagggaataaaaagaggggagagatggaaagccgtcgggtgacaactaggtcccagacacaaaggcgtcagttaccacagaacaggactcatctgagagagggacggtgacggtgagagaagtagatgtaggtgaccaaggggttttagaagaaagcccgaggctctaaaagccaaccactgcctggccacacatccacagggagcccctgcaccatccgtgaawmccaataaacctcttttccctgaaattctgtctgcttgtgtctgtcttggattgggggagaatgttcctggtctctttaaggagtggagcaggggacagaggcctcagttggatcatgggagtcgacagagcaaggagacataaaggagcaggcagctcccagtaacatgatggattcgtgggagtgaggcaggctaagtgccggagagacccaaaggataaggctagggagatcaatccaaggttggggagagacggaggttctgggagaagtgactcccccagagggtgggagagtgtccaggactgggagggaaggggagaggaatccttggaagacatagagctatgggttgggagaaaccctgaaagcagggttgtgggaaccacatgtctgagatgtgctgcaatcaagacgatatggcagaagcttcgtggaaaactcacttgggagcagggaccgaaagcagcagtctaagccccatgatcagaatgaaaggagaaggcttgtggggtccgtgaattcccaggctgagttcattccctctggggctgccccattctcctccagttaccccaccggccctcccagagcccatacacactcccagctctcaagccactstgccttcagccacttcctctaagaactcagacaagggggctttccctcctcaacgttgagtctccccmcttatgcagccagctgtcagaagcactcccaatgctaagttctcccccatggaagtcctgtttagaaatcaaaggggaacggacataggcatggtgtctctgcagagaaacaatggaagacagaraggaaatgggtttcagttcccagggtyctatacatcacacacacacacacacacacacacacacacacacacacacacacacacacgttcctgattggccccrgattgccacagaatcctggtgaggacggagaggagattccttgatgcctgggtgtccccaactttccaaacctctgcccccgcattggagaagaaactgagagaggtgyagggccactaccgcttcctccacatgagatcatggttttctccaccaaggaagttttccgcgggttgaatgagagcttttccccgccctcttccccaagggctataaaggcagcssgtrcacagccagccggcagaactcagcgaggacaccaagggaccagccaggagggagaacagcaactccagaacaccctggtactaactcccagaaaagcaagcaaccagccaggcaggttccgtccctctcatacactggcccgaggcaacacatctccctccggaaaggacaccatgagcacrgaaagcatgatccgmgatgtggaactggcagaggaggckctccccaaaaagatggggggcctccagaactccaggcggtgtctgtgcctcagcctcttctcattcctgctcgtggcgggggccaccacgctcttctgtctactgaacttcggggtgatyggtcccaacaaggaggaggtragtgcctgggcagcgtttattctcactcacaagcaaagtagggwgggagggcaagaaaggcaggagggtaagggamagaggtcggctggtgggcacagtaatgtggaggagagttggggagggagacctyggacccrtgcagccagttgtctaaacatccttgggtggatgcacggagggkgaatgaacgaacaagcgtgygtacacgtgcagagatgtgcagagacgtggccaggggaacagggaagaagcaagagataaaaattcgagacggagatgggagacgagggagataaggagggagatggaggggaaacaacagatcaagcacagagggtaccacagaaagatgctgrgrttggacggataaatgaatgaggaggaaaagcactgactkgggggggggggctggcaaagakcggggaggcttctcctttgtggtgagtctgtctactaacctacttctttccctacacagaagttcccaaatgggctccctctcatcagttccatggcccagaccctcacactcagtaagtgttcccaagcctctctcttaatttaggatggggggcgggggacttaaagctttggtttgggaggaaagggaataggggtctaactacacagatgcttkctgggaaacctaagggtctcatctccgcctttgtccmcttccaggatcatcttctcaaaactcgagtgacaagcccgtagcccacgtcgtaggtaagtttcttcgmatgtgccttggggggggggtgtgacagggcaggattttggggtcgtgccaggmygagagaagacaagggctctsagagacagcaggtgagagagtcagagsggtgattcaaaggcaaggcattaggaggccaccccggacctcrtagccaatgggacrtggaaagacmagagggcrcaggaaccggaagtgaagtgtgggtagaagttgaggttcaggatgtggagtgtgaactaagagggtgacactgactcaattctccctccctcagcaaaccaccaagcrgaggagcagctggagtggctgagccagcgtgccaacgccctcctggccaatggcatggatctcaaagacaaccaactggtggtaccagcagatgggctgtaccttatctactcccaggttctcttcaagggacaaggctgccccgactaygtgctcctcacccacaccgtcagccgrtttgccatttcataccaggagaaagtcagcctcctctcygccatcaagagcccttgccctaaggacacccctgagggagctgagctcaagccctggtatgagcccatgtacctgggaggagtcttccagctggagaagggggacctgctcagcgctgaggtcaacctgcccaagtacttagacatcacggagtccgggcaggtctactttggagtcattgctctgtgargcgactggcgtgttcatccgttctctacccagcccctgtccccgactctgacccccattactctgacccctttatcgtctactcctcagagcccccaatctgtgtccttctaacttagaaagggaattgtggctcwgggtccaactccgggctcagaatttccaacaactacgatgctcagaaacacacgagaygctgaagtagtggcctggattgcgggctgctcatgagccgccaccggcaaggattccaatgggctttcggaactcactggatcccsgaatgtcgatgcctgagtggatcgggggagtggaggggggagtggatcaggctgyctctggctcacaaggctgctgaagatgtctcaggcctcccttccttccttccttccctccctcagagcttcccagactgttccctgaggcacagcgcccagccttccttacggaaccccctmtatttataattgcacctgygrctaykwrkttattatttattatytatttatttgcttatgaatgtatttatttggaaggccggggcgtcctggaggacccagcgttgggaagctgtcttcaggccaacatgttttctgtgaaaacggagctaaactaccagctatccccatctggtcccccaccccygcctcgttgcctccccccttttcttttgcttatgtttaaaacaagatatttatctaacccagttgtcwwaataatgctgatttggtgaccaggctgtcgctacatcactgaacctctgctccccacgggagccgtgactgtaatcgccctacgggtcattgagagaaataaagttcgcttggaaaagaaawrwrawwwmtgaagtctgcgtctgtcgtctctctgcagcctcctaaagtctktgggtccagatctcagtttttatatcccccrgggmcattaagacccctaagacccyccaagaccccygtggaacaaaaggcagtccacaaccctacctctccccggaaacaggagcctaagcctaattacctttgcccctggtcctgggaatttcccactctgggaattccaaatacctgctggaaagt

SEQ ID NO: 1882 - DNA, 1179 bp, Rattus norvegicus
ggcggggctggagctttgggtaccacctcctctgcaacgccggggccgggagtcttagmacmgrgggcccgcagggtccccgtggccgctgcgatgcagaaatacgagaaactggagaagattggggaaggcacctacggaactgtgttcaaggccaaaaaccgggaaacccatgagattgtggctctgaagcgagtcaggctggacgatgacgatgagggtgtgccaagttcagccctccgggagatctgtctactcaaagaactgaagcacaaaaacattgtcaggcttcatgatgtcctgcatagtgacaagaagctcacattggtgtttgagttctgtgatcaggacctgaagaaatattttgacagctgcaatggtgacctggaccctgagattgtgaagtcactcctcttccagctgctgaaaggcctgggattctgtcacagccgtaacgtgctgcacagggacctgaagccccagaatctgctcattaacaggaatggggaactgaaattggctgattttggcctggcccgagcctttggtatcccagtccgctgctactctgctgaggtggtcacgctgtggtaccgcccaccggatgtcctctttggggccaagctgtactccacgyccatygacatgtggtcagccggctgcatctttkcagagctggccratgsrgggcgamctmtsttccccggcaatgatgkggatgaccagctgaagaggatctttckactgstagggacaccsactgaggaacagtggcckgccatgwccaamytgccagactatwagccctacccaatgkacccagctacaacatccttggygratgtcgkgcccaaactcaatgccacggggagagacctgttgcagaacctgktgaagtgtaacccagtgcagcgcatctcggcagaggaggccttgcagcacccctatttctctgacttctgtcccccgkagactytytgaccctggcggccaggytggggcctgacctatttaagcctccctyccargarggtgggagagtggggtatkggatgytgagtaccagctgtgytgggsccagccaggggcgagttaccytggkccgsrgtttccctcccyccatggacyttatttaatttcataaattggktcctttccmmmaaaaaaaaaaaaaaaaaa

SEQ ID NO: 1883 - DNA, 3829 bp, Rattus norvegicus
cgggtgctctccccaccccgcgaggggggaggggagcgcttcggcccctttaaggtgcggcgctcggcgaagtgcgggcaggcggcccgcgagccggcgcggggccaggagccgggtagggaagtcctgcctccccctccgcccgcaccggcccgcgccctccgcccaccgcgccgcgagggccatgcggcgcctctgaaccatgtcgtcctcctacgccaagaacggggcggcggacgggccgcactcccccagctcgcaggtggcccgaggcaccacgacccggaggagcaggttgaaaagatccgatggcagcaccacttccaccagcttcatcctcagacaggggtcagcagattcctatacaagcaggccatcggactccgatgtctctttggaagaggaccgggaagcgattcggcaagagagagaacagcaagcagctatccagcttgagagagcgaagtccaaacctgtagcttttgcggtgaaaacgaatgtgagctactgtggtgccctggatgaggatgtgcccgttcccagcacagccatctcctttgacgccaaggactttcttcacattaaagagaaatataacaatgattggtggataggaaggctggtgaaggagggctgtgagatcggcttcatcccaagtccactgcgtttggagaacatacggattcaacaggaacagaaaagaggccgttttcatggcgggaaatcgagtggaaactcttcctccagtctgggagaaatggtgtcaggaacatttcgagcaactcccacaacaacagcaaaacagaagcagaaagtgacggagcacattcctccgtatgatgttgtgccatcaatgcgtcctgtggtgttagtagggccatcactgaaaggttatgaggtaacagacatgatgcagaaagccctctttgatttcctgaagcacaggtttgatgggaggatatcaataaccagagtgacagctgacatttctcttgctaagaggtctgtcctcaacaatcctagcaagagagcaataattgaacgttcaaacaccagatccagcctagcggaagtacagagtgaaattgaaagaattttcgagttggcaagatctttgcaattggttgttctcgatgcagacaccatcaatcacccagcacagctgataaagacatcgttagcgcccatcatcgtccacgtgaaggtctcgtccccaaaggttttacagcggctgattaagtccagaggaaagtcccagagtaaacacttgaatgttcaactggtggcagctgataaactggcccagtgtccccctgaaatgtttgatgttatattagatgagaatcaacttgaggatgcctgtgaacatctgggagagtacctggaggcatattggcgtgccacccacacaagcagtagcacccctatgaccccattgctggggaggaacgtgggctccacagctctctcaccgtatcccacagcaatctctggactacagagtcagcggatgaggcatagcaaccactctacagagaattctccaattgaaagacgaagcctaatgacctctgatgaaaattaccacaatgagagggcccgcaagagtaggaaccgcttgtcctccagctcccagcacagccgagatcactaccctctggtggaagaagattatcctgactcataccaggacacttacaaaccccataggaaccgaggctcacctgggggatgcagccatgactcccgacataggctttgaggctgcccaaacaaacaaacaaacaaacaaacatcatctgttgacaatttgccatagtactgctaagataaaccagtcatcttaatttggcaagcatggcacagtatctgctgtgcgggtggtctgctgtcgtttgatgtaaggggcaagaattaaatagaagtacattatgcccttgagtctaggagggtattagatacccggtcatataggtatttttaagtgctacatttacatgataacagtaccttttgttttcttcatagattttagacacatcaatttgtaatttagggtactgatcaaggcacatataaaataatttcccgtgtaggaaattccaaatgaccagttccagttggaaccaatttataaaccaattcctgttggaatttgggtgaattgactggaaagtctacctgagcatgttgaaatcaattgaaaaaatcagagaagaaaaaaatacccaataaggaaatcaaaatactaatagaaaccaaacccagctatggtatttgtttgctggaagctaaatttacacttcaagttggaatgtagaaacattttaataatgttgctggaatggcttttcaaacttaccaaatatattgatagtgccaaaaaaaaatctcagaaatcttaatgcagaaattatataatcgcctcagattttaatatttttatttttcctgatatagctgttgtattcaaagtgttttgccttctgttcagtcagtactsttagccagtttgaagttgacaaaatccaggggatatttgagaagtggtaaagagaagccctagcatggacagttccagagagtggagaatgaggtgttgttccttctgcagtcagtctgcacacagctgcacacatctggagacctggtgtcaggtagcagagatgtggcggggcctctctggctacaacggtaattggcttcagatgggaagtcgtccatcgtacagcacaccgacacgggcttaggagctgtgccagcatggctgagtgtctttccctcacttcagccagtctccatctttgaatataatgaatgttttggccctgcatcacacttcttttatgtttcatgggcataatcaaattaggtactgaaagttatgttttcacaaaataattaggaaaacttaaaacactgaattaaaatcttgcakaraaaraaaaaaaaaccctcatagaatcagaatatatttattcactaaaagcaagacagtttcaatacacggcattagagagagttgagagactgctcggttccattgatagtgaacagcctttagacttctatgagtgtatttatggaattgatgacctatgtcctatgttattaaagacagctttaatccaagaaattagtgaaattgaccctttgaaacaaatgtctttctgaaagggcttgtttctgaaatgacgcaatacatgtgttttctaaagacccaattggagctagacgtaaagtctctttctactaatgctttgaagtcaatttccgaaacaagtataattaatagtatgttaatttctccaaaaaaaagacatgggtcctcaaaactgtgtaccagttcattaattctcctgatcaagagtctaagtttcatattcttaatcagttatcctatctcggatcccatcaacccattgtcttgactgtatgtgcaacccattatgaacctgcttatctgataatgaggctgcctgaaattttgtggtaatctcaaacatttgatacatttaaacacgggctcagtcaaattgacaagctaacatctgacactggcttgtgaagcttttttgtcatccagcgaggcttacagaattttctgttaagacatttaacagagctgtattcattgggctctttaataagcatataatcttccattaccaaatactttgttagaagacagaagagcatttttccagcgaacaaactatatttattacatgtatagcacatatttgcatgagaaagaaaaacattagccaaacattttcctgtatgctttactggtttcttgtttgtgcgcattaaagcatttaattgc

SEQ ID NO: 1884 - DNA, 1744 bp, Rattus norvegicus
  misc_feature (1715)..(1715): n is a, c, g, or t
cacgagggcgagcccagagagcccagcacacgcggccgggcgggcgggactgctgccgggggcagccgggacgcgcctctccatcccgaagcttcctgaataccaagacctgatgtgtccaagaggccgtttctagtagaaacctgaagaacatctctaagaaagaataatccaatgrrytgwraasarsamkgttyctmakgctagagtccctgctatgtggatatttgttagcaatgactgatgtggaaactacgtatgcagattttattgcctcaggaagaacaggtagaagaaatgcaatacatgatatcttggtttcctctgcaagtggcaacagcaatgaattagccttgaaattagcaggtcttgatatcaacaagacagaaggtgaagatgatggacagagaagctccacagaacaaagtggcgaagcccagggagaagcagccaagtctgaaagctaacactccattctgacggtcatcaacacctgacgatgtggcgaatctcctggcattgctcggatgaatttgcggccatgggtgaaacggaggagaagaaaatggccgtgatgaatggcaagaagccgttggttgccatgtcacgaatgggggcagagctgtgtctgcacacagcctttcccccacctctctcattagcaatggttgaaatcacctggcctgtgcttggatatcatttttgtatgggtcctttcacttgaccgtttaatgaaatgcttgtagagagtagcactgacctagctgatgattcctgtagcatctggcccctcatgatgtcagaggatttaattgtgtctaattgaaaagggttggttgaaccccagagtttccatatctctggctggagtattggctcaccaaaagaaccatccagagagcacagttagcattatgtctctgtgtgtgagtgctgtgttatttacaccgttttgtatcgtacagtatacctgctcagcactgccctttgattgcttatgtaaaacaaaatgaagtacattgactgtgaatttttwtmccamwmawwwwwwwaaarrgctgcctttttaatttcccatagtgttgtggtgtgcacggggcagaacctgcttttgtaaaacacgaatttcctcttgatgacttctgagggttatatccaacagactcactgagccccctttgctttattatacaggcatgtggaaatatccattaatgtsamkakkgcctgagttcagttttagtatctacacagaccagtgttctgtctgtcaatattgattttatttccaagtaagttctttcagctaacaacttcatttttcatgattaagaatttttaagaattgacaaggtagacmaagaaagtcagataatgcaaagaactggaaacattgtgttctgtggatcactttggtcacattgataggtaccactgtttaacttgggaggacagcttgtgaaggaagtgttctcctcaaagcctgtgggcacccgtgtataaaggaaagtccttgggatgtgttctcctatgtcccctctcagccctttcataatgttattatgcactttttaatgtttgtaaaattttactaataatttgtgtgaattgctttgagatataataattatcacccaaccacacttttactgacgctgttgatggactatgctgtgttttgacatcacgattcttgtatggggaatgtctgtggnctatgtaaccccctctggtcagtattatg

SEQ ID NO: 1885 - DNA, 4160 bp, Rattus norvegicus
ctgacctggaatgtcaaatcagtataaagtgtcccatagcacaaaaactactcacagagttcctataaatccccaaacagcaaaagttaaatgacagattttagtgacattaacttttataaataaaataaatggcaaacacaaaattcagattaatggcacctctgtgtattatgttatgaagaactgacaagaaaggttccatcaactaaatgcagtagaatttgttacctcgtgtgtctttactacacgctacttattatcatgcttaataaattatttgcatgacatattattgatatgttgcagctataaagtttaaaatcaaatcttaatttcaaaaaaatatttcagttcattttacagagactgatttagccataactggacatctttaaaaacctatgtcagttggatatgtgaggtgtagcaaatagagtttcttgtgattgaagttattcagacatactttaagataaaactgacttaattgactaaactgagttctacacctgaaacatactaattagttggatgaagttattgagcgaattcctttaactgttcttttcagccaaattactaatagtatagggttcatacttaatagggacacacctttctatcccaaaattagagtcaatcaattggaagccagatcacatccaccatcctcaaatgaatggcttgcctttgttttccttgaaatgatttaatttactcattaaaagtcatttttccttggataggaaagggaaarwaraaargacrtgtgtgtgtgtgtgtgtgtgtgtgtgtgtgtgtgtgtgtgtgtgtatctattttcattattttcaggagatgatgtttgctgtgtgcaaagatagtattgaaggcggtctgggcaggtaataagttgtagacatgatcttagacatgtgcaagcttttagtcttcatagactctgggttgaaggtagaaagccccttcacttttgytaaatattcctcaacctttattactaagcttaaaaatgccactgcaaatacctagagtgtcactcacaggaaacctctaaaattaaaagtaaagacatgataaatttattcatgccaactcataaaataggaaggaaaggcagttctcagagtctggaaaggaaagacagatgccagaaagactatgcattgctagtggataaagaagcagcccgtgcttgaggtcacacaagtgacttgtccccacagagaaccctatcacaggtgcctcccaccgacagagacctagtgctaacccaccttccccaagtctgtttaacactagcttatgttgttaaatcacaggatgactatagcctagatgtatggtttatatcagatgggacacaggaaaacagcaacaccaaatactaaaggtaaattttgttcccttcacatcagtacgttagagatgtgtcatgtggatgtgcttggggagagggtcaattatgtcactgaggagaagacagtagtgaccagtagggacccctgtgcagcaaaataatgtgaatctgctgctatagactgatatcttcaaatatgcaccaagtttctcttttctgtcattttgggggtcaaggaataaaaaatataggtcttgaaggataaagcagaagattattgacacacattagtcacatattaatatatataatcactrttgacacatattaattttacttgcctggaagcgactaaaaaaaaaggcatctcttggtgggtcacgtgactttgcccgttctccaagcagatctctcttatccggacagtgtgtggaggagcctggggaatctgtggaagttttcgcgctgatgcagaaagaaagtcggtgaatggataaataaggatggccttgctcctggtctccttgctggcattcttgggcacgggatctggatgtcatcactggctgtgtcattgctctaatagggtctttctctgccaagacagcaaggtgacagagattccgaccgacctcccccggaacgccattgaactgwggtttgtgctcaccaagcttcgagtcatcccgaaaggatcatttgctggatttggagacctggagaaaatagagatctctcagaatgatgtcttggaagtaatagaggcagatgtgttctccaacctacccaagttgcatgaaattaggattgaaaaggccaacaatcttctgtacatcaacccggaggccttccagaatctccccagtctcagatatctgttaatatccaacacaggcattaagcacttgccagctgttcacaagatccagtctctccaaaaggttctactagacattcaagataacataaacatccacatcgttgccaggaactccttcatgggactgagttttgaaagtgtgattttatggctgagtaagaatgggattgaagaaatacacaactgtgcattcaacggaactcagctagatgaactgaatctaagcgataacaataatttggaagaattgcctaatgacgttttccagggagcctctgggccagtyaywktagatatctcaaggacaaaggtccattccttaccaaaccatggcttagaaaatctgaagaagctgagggccaggtcaacataccgctkgaaaaagctccctaatctggacaagtttgtcaccctcatggaggccagcctcacctaccccagccactgctgtgcttttgcaaacttgaagcgkymwakstctgarcttcatccaatttgcaacaagtctattttaaggcaagatattgatgatatgactcaaattggggatcagagagtctctctgatagatgatgaacccagttatggaaaaggatctgacatgatgtacaatgaatttgattatgacttatgtaatgaagttgttgatgtgacctgctcaccaaagccagatgcatttaatccatgtgaagatatcatggggtacaacatcctcagggtcttgatatggtttattagcatcctggccattactgggaacaccacagtgctggtggtcctgaccacaagccaatacaaactaactgtgccccggtttcttatgtgtaacctcgccttcgctgatctctgcataggcatctacttgctacttatagcatcagttgacatccataccaagagccagtaccacaactatgccattgactggcaaacaggagcaggctgtgatgctgctggctttttcactgtctttgccagtgaactgtcagtctacacattgacagccatcaccctagaaagatggcataccatcacacatgctatgcaactggaatgcaaggtgcagctccggcatgctgccagcgtcatggtattgggctggacttttgccttcgcagctgctctcttccccatctttggcatcagtagctacatgaaagtgagcatctgcctgcccatggatatcgacagccctttgtcacagctgtatgttatggccctccttgtcctcaatgtcctggcctttgtggtcatctgtggctgctatacccacatctacctcacagtgaggaatcctaccattgtgtcctcatcaagcgacaccaagattgccaagcgcatggccacactcatcttcacagactttctctgcatggcccccatttcattctttgccatttctgcctccctcaaggtgccgctcatcactgtgtccaaggccaagattctcctagttctgttctaccccatcaattcttgtgccaatcctttcctctacgccattttcaccaagaacttccgcagggacttcttcatcctgctgagcaagtttggctgttatgaaatgcaagcccagatttacaggacagaaacctcatccgctacccacaacttccatgcccgaaagagccactgctcctcagctcccagagtcaccaatagttacgtgcttgtccctcttaatcattcatcccagaactaaaaatcaatgtgaaaatggatcctcaccttgaaagacaattatgactccttctgaagagcaggccatggactaartggcartsytactgcacatctcatctaatttaatctctctgggtststgcatggcagactgatcagggaccattaatswccmctktggctcmtctmagmactkaawtaatggtaacagcaaataaaacaaagcaaaaccgcaca

SEQ ID NO: 1886 - DNA, 3829 bp, Rattus norvegicus
gtccccaccactgccaagctgaaaatcgatgagtttgaatcgaacgtcaatgaggtgaaagacccctacccttcagctgacttcccaggggacgacgaggaagatgagcctgagatcccagcaagcccccgaccacgccctctggctgagctgcagctgaaagagaaagcggtgcccatcccagaggccagctccttcttcatcttcagccccaccaataagatccgcgtcctatgtcaccgcattgtcaacgccacctggttcaccaactttatcctactcttcatcctgctcagtagtgctgctctggccgctgaggaccccatccgggccgactccatgaggaatcagatccttgagtattttgattatgtgttcactgctgttttcactgtggagatcgtccttaagatgaccacctatggagccttcctgcacaaaggctccttctgccgcaactacttcaacatcctggacctgctggtagtggctgtgtctctcatctccatgggcctcgagtccagcgccatctccgtggtgaagatcttgagggtcctgagggtgttgcgaccactccgggccataaacagagccaaagggttgaagcacgtggtgcagtgcgtgtttgttgctatccgcaccatcgggaacatcgtgctggtcaccacgctcctgcagttcatgtttgcatgcatcggagtccagcttttcaagggaaaattctacagctgcaatgatttatccaagatgactgaagaggagtgcaggggctactactacatatacaaggatggagaccccacgcagatagagttgcgaccccgtcagtggatacacaatgacttccactttgacaatgtcctgtctgctatgatgtcactcttcacggtctccacctttgagggttggcctcagctactgtacaaggccatagactccaatgaggaggacacaggccccgtctacaacaaccgagtggagatggccatcttcttcatcatctacatcattctcatcgccttcttcatgatgaacatctttgtgggcttcgtcatcgtcaccttccaggagcagggggagactgagtataagaactgtgagctggacaagaaccagcgccaatgtgtgcagtatgccctgaaggcccgcccgctgaggtgttacatccccaaaaacccataccagtatcaggtgtggtatgtcgtcacttcctcctactttgaatacctgatgtttgctctcatcatgctcaacactatctgcctaggcatgcagcattacaaccagtcggaacagatgaaccacatatcggacatcctcaatgtggctttcaccatcatcttcaccctggagatgatcctcaagctcatagctttcaagcccaggggctattttggagacccctggaacgtgtttgactttctaatcgtcattggcagcatcattgacgttatcctgagtgagatcgatactttgctggcctccagcgggggactatattgcctgggtggaggctgcgggaacgttgacccagatgagagcgcccgcatctccagtgccttcttccgcctgttccgagtcatgcgactgatcaagctgctgagccgggcggagggtgtgcgcaccctgctctggacgttcatcaagtccttccaggccctgccgtatgtggctttgctgatcgtcatgctcttcttcatctacgctgtcatcggcatgcagatgttcgggaagatcgccatggtggacgggacgcaaataaaccggaacaacaacttccagactttcccacaagctgtgctgctgctcttcaggtgtgccacaggggaagcctggcaggagatcctgctggcctgcagctacgggaaacgctgcgacccggagtctgactacgcaccgggggaggagtacgcgtgtggcaccaactttgcctactactacttcatcagcttctacatgctctgcgccttcctgatcatcaacctctttgtggctgtcatcatggacaactttgactacctcacaagggactggtccattctgggscctcaccacctggatgagttcaaggccatctgggctgagtacgacccagaggctaagggcaggatcaagcacctggacgtggtgaccctgctgaggaggatccagccccctctgggctttgggaagttctgcccacacagggtagcatgtaagaggctggtgggcatgaacatgcccctgaatagtgatggcacagtcaccttcaatgccacactcttcgccctggtacgcacagccctcaagatcaagacagaaggcaattttgaacaagccaatgaggagctgagagccatcatcaaaaagatctggaagagaaccagcatgaagctcctggaccaagtcatccctccaataggagatgacgaggtgacagtggggaagttctatgccacattcctcatccaggagcacttccggaagttcatgaagcgccaggaggaatattatgggtatcgacccaaaaaggacacagttcagatacaggctggattgcggaccatagaggaagaggcagctcctgagatccaccgagccatctctggagacctgacggcggaggaggagctggagagggccatggtagaggctgccatggaggaggggatattccggagaactggaggcctgtttggtcaagtggacaacttcctggaaaggaccaactctctgccccctgtcatggctaaccaaagacccctccaatttgccgaaatggagatggaagagctggagtcaccagtctttttggaggacttccctcagaacccaggcacccaccctcttgctcgtgccaataccaacaacgccaatgccaatgttgcctatggcaacagcagccatagaaacagcccagtgttttccagcatccgctatgaaagggagctcctggaagaggcaggcaggcctgttaccagagaaggacccttcagtcagccctgcagcgtctctggagttaacagcagatcccatgtggacaaactggaaagacagatgtcccaaagaagaatgcccaaaggccaggtgcctccttccccatgccagctctcccaggaaaagcatcctgtgcacgaagaggggaagggccccaggtcatggtctacggaaacatctgacagtgagagctttgaggagcgtgttcccaggaattcggctcacaagtgcacagccccagctaccaccatgctgatccaggaggctctggttcgaggaggactagactccttagcagcagatgctaacttcgtcatggcaacaggccaggccctggcagatgcctgccagatggaaccagaggaagtcgaggtggcagcaacagagctactgaagcgagaatccccaaagggcgggccatgcccagggagccttgagcccaaagtcctcccctgggcagcctgaaccagcagtgggggtcccaaaaagacccttattgctccaggtgtgaggcctatacagaatgamasaagcttagaactgccatkaccaaaagtcagaaagcgagggagtggagaaaggttagcgcagcctagsagcctcccctccctcctcagtagccagctgcatggactgagtagccgtggtcaggaaccacctcaaccaggsagggggccatggatgggcaggatcgacccttctccttaccagcaagaagcaggacttggcagggcctctgtggtcactcacaaaggcctgatyggtgccagggtctktctgtcataaagtcackccatccaaccagcktgacattaaagtckccaggcctgactttgrmammwrrmaaaaaaaa

SEQ ID NO: 1887 - DNA, 1997 bp, Rattus norvegicus
cagctgtgccgatgttccttgcaggatggctgccctcgctgtaaacaagcccggagcaggagtagacagtgggcggcagggcagccgggggacggctgtggtgaaggttctggagtgtggygtttgwgaagatgtcttctctctgcaaggrgataaagttcctcgccttctcctttgtggccacacagtctgtcatgactgtctcwcwcgcttgcctctgcatggaagagcaatacgttgcccatttgatcgacaagtgacagacctaggagattcaggygtctggggwttgaaaaaaaattttgctttactggagcttytagaacgtytgcaaaatggacatattggtcagtatggagctgcagaagaagcccttgkgatatctggagagagtatcattcgctgtgatgaagatgaagctcacgttgcatctgtgtactgcactgtgtgtgcgactcacttgtgctcagagtgttctcaagtcactcattctacaaagacwctggccaagcataggcgagtgcctctagctgataaacctcatgagaagaccatgtgctgtcagcaccaggtacatgccattgagtttgtttgcttggaagaagcttgtcaaactagtcctctcatgtgctgtgtctgcaaagaatatggaaaacaccagggtcacaagcactcagtactggagccagaagctaaccagatccgagcgtcaattttagacatggctcactgcatacgraccttcactgaggagatctcagattattccagaaaattagttgggattgttcagcacattgaaggaggagaacaaatagtggaagatggaattggaatggctcacacggaacacgtcccaggtactgcagagaatgcacgatcatgtgtcagagcttatttttctgatttgcatgaaactctttgtcgtcaagaagaaatggctctcagtgttgttgatgcccatgttcgagaaaaactgatttggcttaggcagcaacaagaggatatgactattctcttgtcccaggtttcaacagcctgtctccattgtgaaaagactttgcagcaggatgattgcagagttgtcttggcaaaacaagaaatcacaagattattagaaacactgcagaaacagcagcagcagtttacagaagttgcagatcatattcagttggatgccagtattccagtcacttttacaaaggacaacagagtttatattggacccaaaatggaaatacgagtagtcacattaggattagatggtgctggaaaaactactattttgttcaagttaaaacaagatgaatttatgcagcctattccaacaattggttttaatgtggaaactgtggaatacaaaaatctaaaattcaccatttgggatgtgggtgaaaaacacaaattaagaccattgtggaaacattattacctcaatacacaagctgttgtatttgttgttgacagcagtcacagagacagaattagtgaagcacacagtgaacttgcgaagttgttaacagaaaaagaacttcgagatgccttactcttgatttttgctaacaaacaggatgtcgctggggcactttcggttgaagaaatcaccgaacttctcagtctccataaattatgctgcggaaggagctggtatattcagggctgtgatgctcgaagtggtatggggctctacgaagggttggactggctgtcccggcaacttgtggctgccggagtgttggatgttgcttgattctattgcagcagttgtttcgagcttatggttaaaaagttactttgcatgtaaaaaaaaaaaaaaaaaatgcattctaagaaattctacatctcaagtatgataatttagtatgtgtacgtatgaatcctggactgagaaatgtaccattgcttttaaaaattattctgtggcaaatttaagtgatcctgttacattggttaaatagttttgctttgtttttttttggatataaacttttaaaagg

SEQ ID NO: 1888 - DNA, 3947 bp, Rattus norvegicus
cctcagccctgtggctggaccccctccctcacccggggactccctgacccggggaaccaagctcaggtctccagagcctcccagaagaaaaataggcagccctccctgaaatatcttggctcctcagtttatcctttccaacctggctcccccttcccagttcccctccctactccytgtgctcymwmsccaactcaccctactgaactgggtgcagagcaaagcccttttcgcccttttccccatctggacttctctggccagttcctcttagtccgatcccaaagacactggaacacatttctaaagggtcttcttgatccctccaattcattgagcaaagggctgaaaaagaagcagagagtaaggtagagccagtgactcgcccccaagccccatcatggaagaaggctttcgagaccgagcagcgttcatccgtggggccaaagacattgccaaggaagttaagaagcacgcggccaagaaggtggtgaagggtctcgacagagtccaggatgartattcccgaaggtcctactcccgctttgaggaggaggaggatgatgatgacttccctgcccctgctgacggctattaccgcggagaaggggcccaggatgaggaggaaggtggcgcttccagtgatgccactgagggccacgatgaggatgatgagatctacgagggagaatatcagggcatcccccgggcagagtctgggggcaaaggcgaacggatggcagatggggcacccctggctggagtgagagggggcttaagtgatggggagggtccccctgggggtcgcggggaggcgcagcggcgtaaagatcgggaagaattggctcagcagtatgagaccatcctccgggagtgcggccatggtcgcttccagtggacactctacttcgtgctgggtctggcgctgatggccgatggtgtagaggtctttgtggtgggctttgtgctgcccagtgctgagaaagatatgtgcctgtcggactccaacaaaggcatgctaggcctcattgtgtacctgggcatgatggtgggggccttcctctggggaggcctggctgatcggctgggtcggagacagtgtctgctcatctcgctctcagtcaacagcgtcttcgctttcttctcatccttcgtccagggttatggcaccttccttttctgccgcctcctttctggggttgggattggtggttccatccccattgtcttctcctatttttcggagtttctggcccaggagaaacgtggggagcatttgagctggctctgtatgttctggatgattggtggcgtgtatgcagctgcaatggcctgggccatcatcccccactatgggtggagtttccagatgggctctgcttaccagttccacagctggagggtctttgtcctcgtctktgcctttccctctgtgtttgccatcggggctctgactacgcagccggagagtccccgcttcttcttagagaatgggaagcacgatgaggcctggatggtgctgaagcaggttcatgacaccaacatgcgagccaagggccatcctgagcgagtcttctcagtaacccacattaaaacgattcatcaggaggatgaattgattgagatccagtcagacacaggaacctggtaccagcgctggggagtgcgggctttgagcctggggggtcaggtttgggggaacttcctctcctgcttcagtccagagtaccggcgcatcactctgatgatgatgggggtatggttcaccatgtccttcagctactacggtttgactgtctggtttcccgacatgatccgccatctccaggctgtggactatgcagcccgaaccaaagtgttcccaggggagcgcgtggagcacgtgacatttaacttcacactggagaatcagatccaccgagggggacagtacttcaatgacaagttcatcgggctgcgtctgaagtcagtgtcctttgaggattccctgtttgaggaatgttactttgaagatgtcacatccagcaacacattcttccgcaactgcacattcatcaacaccgtgttctacaacacggacctgtttgagtacaagttcgtgaacagccgcctggtgaacagcacattcctgcacaataaggaaggttgcccactagatgtgacagggacgggcgaaggtgcctacatggtgtactttgtcagcttcttggggacactggctgtgctccctggaaatattgtgtctgctctgctcatggacaagattggcaggmtmagmwtgcttgctggttccagtgtgttgtcctgtgtttcctgcttcttcctgtcttttgggaacagtgagtcagccatgatcgctctgctctgcctttttgggggagtcagtattgcatcctggaacgcgctggacgtgctgactgttgaactctacccttccgacaagaggacgacggccttcggcttcctgaatgccctgtgtaagctggcagctgtactgggcatcagcatcttcacgtcctttgtgggaatcaccaaggccgctcccatcctcttcgcctcagctgcgcttgcccttggtagctctctggctctgaagctgcctgagacccggggacaggtgctgcagtgagggatgggggagtgtctcaggggctttagggatggcaggcacactgtgaccaataatttcttttatccctaccctgccctgctgtcctggtcctactccgtgtttggtgtcttagctgtgtgcctgtgtgcatgtgtgtgaccctgacgggcaggggctacggggagggtccctttgtcccatgtttgggaggagggactccccacctgctgccaccctcaactttgcacaaggagaaggctgagctgcatccttctctccctcagtgttagcaggggtggggacgactgtttctctgctccaggtgttccagaatttctgcctttcccatcattccctccgcmtaggccctggtgaaccacaggtatggagttatagtgggggctgaggcttggaccaaaagaacttcttgagtgggagcctcccaaggatgctggggagtagcaataaaccttagcctccgttttcwcctcaawwmarrmwamaarwrtgaagcctggattttatggaattagttttctgattcttatttatatgtaagttctgaggcagcttagctggactgtgtgtggatgtatacatacactcatatgtgtgtgtgtgtgcgcgcgtgcgtgtgcgtgtgtgtatgtgtgccatggggtaggggtaccactatactgttcaattataagccaagagtagtagtttcagtgagcacacacacaacactgtttttctatcgtaactcccagaatcttgtacctgtgttggggctgcaggcagaagtccttggtcaggctggggtgagccctgcaatcttgggggacytgagggcacctgacaaggactttctccttcctctagagaggtymtacccactagccacagccctcccatctgacctgtccacacaggcagtgtatcagaggaaaraaarrraaaawaaccaggcacacatggtcaaaccagcaggtctgaaagcacaagaagctggggcaggggcaggaagcaggggtccatcccctaacccttctcaaaaaggctgggtcgtgagggacccctaatgcagggacctgaagcctcagtttccccatcttgcccttccacagaacagcctctgtaggtagagctgccccccgtcctaccctactctygtggctgctttctttggtactcttcccactcccaccgtagctgtgacgtgttgtagytkytwkctgttkstwwavtsttcccactcccaccgtagctgtgacgtgttgtagtttttagctgtttgtaaaatgttaaaaaaaaaaagttaaaaggaagttaaactaaaaaaaaaaaaaaaaaa

SEQ ID NO: 1889 - DNA, 5354 bp, Rattus norvegicus
gaattctaatattccaagattgtcagcagtggacagggcttcgaaatccaacgggttctcccacgccactgtacaaagagtgagggcgtagtgaggaaaagaaatgctcacaaagccggtgagtggctgaactggctgacctgaagacgggaaacagggtgcccagcagcccaagtgcagatggcccgactccctctttgtgcctcctcccctgcctgtccttcagtgggatggcagggagggaagaaatctctagagataggctgaaccagaggtctctctgcattgcggggcttctctgaagagcctggctctcccgatgacacctctgtaagtatgaagccgtggtaggcaggaagaaggctgtcctgctatgctttggcgtggcccacacggggaggcacctatggggctgccctatcagtacttggatatcagtggatatgaaggggatcactgttgacacagtaaagtccagggcagtcaggagtgggctggatagtgaaatcgtaaggagcctggggcatgttcccatactgatactacctccacctgacccggagtgctcagtttaaactctgtcatagtcttctgcccttgatgtccatgtcgagtgttgctgatggctgattcgagggacggtgaggcataagagttaattgtgcagactggagccagacagcttaggttcacatccttgtccctctacttgctaggggactgtgagtgagttatgtaatccttatgtgcctcgcttttcctgtcttaaaaaggacaatactgataacggactttgtgaagctccgagtgacatggtcagtggtagataaagggttaattctcataattatatattttgtctattccatcagacaagatgcccgcgagggcaagcttatcagattgggcgttccctgagaacagaatgtatgtatgtatgtatgtatgtatgtatgtatgtatgtatgtatgtatttatttatttatttatttatttatttatttacaagaggctctcactgtgtagccctgactgtcctggaactcactatgtagatcaggttggtctcaaactcacagagctcccgtcctgtctctgcttgtgctgggattaagtatatgcaccaccatgcccagccacaactctgtctttattggctttgagagccctgacctggaccccgaccccgaatctgttctgtgaggagtgttcagggtcagcagaagtctagaactgtcccagtcgggcagctagctagcgagactggctgaacaagtcagagagagaatggagtggaagggagtggaagattttcctcatctgcgcaccagctagaatgtcttcccaggtcccaggaaacagggactgacaaagccgtccaggctctggcccaggcaagagcagggaaataggactgaattcttctgtttccgggaggcacactgtgggagcatccagcccacaggaggcaaaaagccagatggaggaaccaatcagtgccagtaactctgcctgtggatttcagactccacccattcttctggacggtggtgatggtttgagatagagtcttactgaatggcccaggctggcctctcccaagtactgggcatattggcatggacaactgtgcctggagaaaatgatcttcgagggctacagagatttgaatccagaacctcaggcattgccaggtaaatactctaccataagctatatctccagttctcaggacccctgtcatcacctcatgttttcttctaaccattctctgtggttgagcccaagaattttgcccctccccccaacttcctttttacctcccacccttcgtttcttcagtaatgaaaattacccatttaaatgttaaatggagacctgtgagaaatggctcagcttccagagaattccacttcagttcccagaagttctcaggtggcttacagctgcctagagccccagctccaagaggatctggcctccctgcctttgtgggttactgcactcacgtacgcgtccacgtaacagacacccacttaaacacacaattaaaaaatagctgggcttggtggcacgtcttcaatgctagcactcaggaaccagaggtaagtggatcttcaactgttcagggatagcctggtctacacagtgacttctaggccagcaaaggttacataatgagatcccccatctcaaaataaataaataccaataaatcttttttttttataaaaggatgctaagtagcagatctgcgacaacttacactcagagccccgctctgacttctgtttatgctattctccttgaccagcttctcctgctgagaggcacgctaaaccgtaagagtcccagtaaggtgggggagacacaggtcgcaccatcaggagagctcctgtaatctgggatgggttcttagcaatgcaggtctaggaaggacaaaaggcttggtgtctatttctccccgccccccccccagctggggaccgaacccaggaccttgtgctaaatccccaacccttggtgtctatttctttccaggcacttcccacagatgcttttgctagacaagtcctgaaggctcagagagcttcagggtccctaatgaggaccaagggacaaagctggacaataatctagtctggccgtgctgataccagttgtattttatccttgagcacaggagacttggcctcaggtcatggtgtcgaccagtatttctcatgccccgcaggtagaaatagctgctggtgcctctgcgtccccctgtggcccatataagtatctcccagggcacctgtccatgtcttagaaaacttatttcccttatacacgtgtcttctctctccttgaggtaaaagtgcttagtgagtgtaccttatttggagagccgtgcttgggatctggcttcctgggaatgagtctaggcagtgatggggggaggggcaccggaggaaggtttgggggcagaggaggtgctcggtcgtgggtcagggcatcttgtctcatctagaaacctgtatagaccgcctgccttcaccagcattcacttctattcatcttgggtttgctgtctggcctgcaagttgggtggtggacttcagaactgtccttatcggtccatcttgttcccacaggagctccaagaagtgacataagtggtgacttttagccttttagctagatacaaacttcaagttcctgcattaagtagaaggaagagaatgggggcagggactggcttcagaatcaaaaacaaaaaaacaaaaaccaccaccaccacctcccgctggaaacccccgctggcttcccccaggagcttgaagaacctgttctgttcacttttctctgtgtcagatgggacaggagagacccaactttacccttgagatgtgacagaaggaagagatgtgaacccttgtttcttgccctaacatttcaactcgcctgcagtcttagaggttgccagtaggtgccgtcagttcgcaactttttggtctgtcctccaggtcccggtcwtggtgcctttctccctccaaccgcgccaacagtcggcgttacagaaagtgggaggtggcctaataccccggaggctgaaagaccccgactytgggwcaaagaaccggaagaggtctaggaagtctttaggttggttgctcctcagatgtttagcccaacccctccytatcccatccacccccatttatcggaccccagactgtgcctggacagtraagcgaactccttggttgggraggatkagsaggcgtaggaagaaacgaaaaggaaggtggtaggggtgggtctytcctccaaagygattccmgmkcaattcctgtttccaacagaattgctgcgaggggaagggwatttgtttatcaatagagacatcmcccaggggcaaagtggcgtcaggwaaattaaaagaaggcttccctttctggaaatcgttgrctgccatcwattgggaamctgttrcagtaacaatacaaaaaaaaaaaaaammmacmmtgwrtacaaggagtggcgccccctggagttgttcaactcacatcttatacaaagtcaatggcagtcaactgtcgggagttctggaagcagagtgcagcaagggccaaatggaccctggggcgggggagggaaggggtggggtggtatcaagcggtagaggttcaaggggcaagtgagaagactgcctatttagcaccttaaggccagagttctcctggaccccttgcagtgtgcttgatctccttgtcccacttcagcgcggtctctagagttgagaatggacgtaccgggtgttgggtgggtgggggtggcggtaggactctggccgggggatagggactgaacgagaggatcttgagtccgctctgaggtcaggttctcagtggcagcacgaggatcgcctagttgtctaggaaggaattcttcgaggtccagggaggggaccaagcaacatccccttcacctcccctcgccctgcttcccctccagctctctgcgcgggccaccgcttccaactgcgtcgctttcttctgcggagcaaaggactttcagatgttgtagcggtggcggcgactcaggccagcgccccctccccctaacggcctcttctcccgctccattgctccagttccccctcgccctcccctgctctcccacctcggggacggcgctgggggtgtggccagggggccggtataaagtcccgggagccggtcccgggcagccgctcagccycstgcccccgccgcctgctgggccggccgaggatgcagcgcagcgcctcggtgtccaggctcgctctgctccagcgtgcttgctaacttcccttggctccgtcccagcctgccggggccgcaccgtgtcctctcgctctccgggtctggttctctaagctctctgggagctgcctccgggttccttgcagcccgctcgcgagcccgcgctccccttctgcgccccaccctcgttctcaccatgctgcccttcggcctcgtggccgccctgctgctggccgcagggcctcggccgagcctgggcgacgaagccatccactgccctccttgctccgaggagaagctggcgcgctgccgcccccccgtgggttgtgaggagctggtgcgggagcctggctgcggttgttgtgccacttgcgccctgggcttggggatgccttgcggggtgtacaccccacgctgtggctcaggcatgcgctgctacccgccccggggggtggagaagcccctgcgcacattgatgcacgggcaaggtgtatgcacggagctgtcggaaatcgaagccatccaagaaagcctgcagacctctgacaaggatgagagtgagc

SEQ ID NO: 1890 - DNA, 1651 bp, Rattus norvegicus
ctcccgggtctggagcgatccggtgcccagaggggccccgagctggacaagcccgtgatgaagaaaagtcggggtctctctgactatctttgggcctggaccctcattctgagcactctctcgggaagaagctatggacagccctcccaagatgaacttaaggacaacaccactgtcttcacgaggattttggaccgactgctggatggttatgacaatcgtctgagaccaggcttgggagagcgtgtaactgaagtgaagacggacatctttgtcaccagtttcggacccgtgtcagaccacgatatggaatatacaatagatgtgtttttccgccaaagctggaaggatgaaagattaaaattcaaaggacccatgacagtgctccggctgaacaacctgatggccagtaaaatctggactccagatacatttttccacaatggaaaaaagtctgtggcccacaacatgaccatgcccaataaactcctgcgtatcacagaggatggcacactgctgtacaccatgaggttgactgtgagagccgaatgccccatgcacttagaagactttcccatggatgcccatgcctgcccactaaaatttgggagctatgcttatacaagagcagaagttgtctatgagtggacaagggagccagcccgctcagtggttgtggcagaagatgggtcacgtttaaaccagtatgaccttcttgggcaaacagttgactctggaattgttcagtccagtactggagaatatgtggttatgacgactcactttcacttgaagagaaaaatcggctactttgttattcaaacatatctgccatgcataatgacagtcattctctcccaagtctccttctggcttaacagagagtcagtaccagcaagaactgtctttggagtgacgaccgttctgaccatgacaaccttgagtatcagtgccagaaattccctcccaaaggtggcttatgcaacggccatggactggtttattgcagtgtgctatgccttcgtgttctcggctctgattgagtttgccacagtaaactatttcaccaagagagggtatgcgtgggatggcaaaagcgtggttccagaaaagccaaagaaagtgaaggatcctctcattaagaaaaacaacacatatgctcctacagcaaccagctatacccctaacttagccaggggtgaccccggcttggccactattgctaaaagtgcgaccatagaaccgaaagaagtcaagcctgagacaaaaccgccagaacccaagaaaacctttaacagcgtcagcaaaatcgaccgactgtcaagaatagcctttccgctgctatttggaatctttaacttagtctattgggccacgtatttaaacagagagcctcagctaaaagcccccacaccccatcaataggttcttttagtcgtattctgttgttcagtcctctgcactgagaatcgctttctgttctcaacgcagtgattcctgtctgccttactgcctctgtcttaaaagaattcgaaggtttccttatttccatatttcatatcgaacaagagacccctgtctgacagttcagagcagggcagagtattcagctcggggacaggattctgagaggaagccagagagcaaaatc

SEQ ID NO: 1891 - DNA, 2131 bp, Rattus norvegicus
ctcccggactgcacggcgccgagggccaagttcgcgccggcagcatggggcggtgacccctcaccggcccaccgcgcccgccgcagggacagcgggcggcggcgaacgaggatgcgccctcgccgacggctcgctagccggcgtaggcaccttgcagaaccagaagcagcttgctggctttgaacttgtggcaaatatttcagaaagcttcaagatcaagttggaggaaaggacggtttttcttctaaattcatctgcttcaactattattcttactgggaatggacaatggaatgctctctagatttatcatgaccaaaaccctccttgtcttctgcatttccatgaccttatccagtcactttggcttttcacaaatgccaactagttctgtacaagatgagaccaatgacaacatcacaatattcaccaggatcttggacgggctcttggatggctatgacaacagactgcggcctgggctgggagagcgaatcacgcaggtgcgaacagacatctatgttaccagctttggcccagtgtccgacacggaaatggaatataccatagatgtgtttttccgacaaagctggaaagatgaaaggctgcggtttaaggggcctatgcaacgtctccctctcaacaaccttcttgccagcaaaatctggaccccagacacattcttccacaatgggaagaagtccattgcgcacaacatgacgacacccaacaagctgctgaggctggaggatgatggcacacttctctacaccatgcgcctgatgatctctgctgagtgtccaatgcagcttgaggacttcccgatggatgcccatgcttgtcccctgaaatttggcagttatgcttaccctaattcggaagttgtctatgtttggaccaatggttccaccaagtctgtggtggtggcagaagatggctccagactcaaccagtaccacctcatggggcagacagtaggcactgagaacatcagcaccagcacaggtgaatatacaatcatgactgctcattttcacctgaagaggaagatcgggtactttgtcatccagacgtaccttccctgcatcatgactgtcatcttatcccaggtgtctttttggcttaatcgagaatctgtcccagctaggacagtttttggagtgaccacagtgctgaccatgacaaccctcagcatcagtgcccggaattcgctgcccaaagtggcctatgccacagccatggactggttcattgctgtctgctatgcatttgtcttctctgccctgattgaatttgccacagtcaactactttacaaagagaggatgggcctgggatggcaagaaggccttggaagcagctaaaatcaagaaaaaagaacgtgaactcatactaaataagtcaacaaatgcttttacaactgggaagttgacccatcctccaaacatcccaaaggagcagcttccaggcgggactgggaatgctgtgggtacagcctcaatcagagcatctgaggagaagacttctgagagtaaaaagacctacaacagcatcagcaagatcgacaaaatgtcccggattgtgttccccattttgtttggcactttcaatctagtttactgggcaacatatttgaatagggagcccgtgatamamggggctacctctccaaagtaagacaggaaaccatacttgcacagaaatgaacctgaggagaggtcaarstctacaagagactatttgggcgctgtctttcaggaaatttgcatgtttaataatatgtaacaaaataatattgccttgatgtttctaatgtgtaaacttcaatgtttcaaggatgtccccttaataaaaccaagcaaatggcctctacamcaacgggaggcaatgactgactctcagatgctcagcgtcctaacatcaatagtttacaaacaagataagtatatttttaactgttctgagtatatgacgtttttatacttcgaatgccatttcgtaccatttttcccagccaacagaacattttagggaatccctgtgatgaccacttgacaggtgaaaaagcaaagatcctcgggtacacaaagtccatgaagagcaaactgtgggcatttaagtccagtacgaat

SEQ ID NO: 1892 - DNA, 1838 bp, Rattus norvegicus
attcttctgcaaccagaggcgagaggcgagaggaaaaaaaagcgatgagttcgccaaatacatggagcactggaagcacagtctactctcctgtattttcacagaaaatgacgctgtggattctgctcctgctatcgctctacccaggcttcactagccaaaagtcagatgatgactatgaagattatgcttctaataaaacatgggtgttgactccaaaagttcccgagggtgatgtcactgtcatcttaaacaaccttctggaagggtacgacaacaaacttcggcccgacataggagtgaaaccaacattaattcatacagatatgtacgtgaacagcattggtccagtgaatgctatcaatatggaatacacaattgatattttttttgcccaaacctggtatgacagacgtttgaaatttaacagtaccattaaagttctccgattgaatagcaatatggtggggaaaatctggattccagacactttcttcaggaactccaaaaaagcggatgctcactggatcacgactcccaacaggatgctgagaatttggaatgacggtcgagttctctacaccttaaggctaacaattgatgccgagtgccagttgcaattacacaacttcccaatggatgaacactcctgccccctggagttctccagttatggttatcctcgtgaagaaattgtttatcaatggaagcgcagttctgttgaagtgggagacacaaggtcatggaggctgtatcagttttcctttgttggattgaggaataccactgaagtagtgaagacaacttctggtgactatgtggttatgtccgtgtactttgatctgagcagaagaatggggtactttaccatccagacctacattccctgcacactcattgtggttctgtcctgggtgtccttctggatcaataaggatgctgtccctgcaagaacatctttaggaatcacgactgtcctgacgatgaccactctcagcaccatagcccggaagtctctgcccaaggtctcctatgtcacagcaatggatctcttcgtctctgtttgcttcatctttgtgttttcagctttggtggagtatggtaccctgcactattttgtgagcaaccggaaaccaagcaaggataaagacaaaaagaagaaaaaccctgcccctaccattgatatccgtcccagatcagcaacgatccaaatgaacaatgccacccaccttcaagagagggatgaagaatatggctatgagtgtttggatggcaaggactgtgccagtttcttttgctgttttgaagactgccgaacaggagcctggagacacgggaggatacacattcgcattgccaaaatggactcctatgctcggatcttcttccctaccgccttctgcttgttcaatcttgtttactgggtctcctatctttatctgtgaggaggtttgggttttatcgataggggtcttattcgctgaatctcacgaagaaaaaatgtcctttctaagtccaacgatctaataccctatgtgggtcactgaatgtgtttctccgtctcacctagtaatacataggtcctacgatccgtgcccaactctcctttggttattgtaatttgaattttagcgtgcactgtctttcaaacctgcaaggcaagttaagttagaacaagagctgttagactgagcaagatacctttgagcaaaagcactgcaaactgaaatctgtgagtgtttaaaggggcatcattagcctttgattcacgtataacttagtacaaaaggtatacagctgtgtgctacgttcgcttggggtacgttgtgtaaattgaa

SEQ ID NO: 1893 - DNA, 3453 bp, Rattus norvegicus
ctgcagcttgcagacaactcctggttggagaggtgcttctgcacctcactctgaggttggcaccccctgcccagtgaagtctgagttcctgagacatccagctagagaattcctgcgtccacctaaggtaagtgccattccacacaagaggaaaccgagggagcacggcttckgmacgaggcggatctgaaaatgactccwmggagatccagaatgaaaaggcggaacctccgaaaaccgaagatgaggttccttctcctgaacaggttcaccctgctgctcctgctcctagtgagccctactccagttcttcaggctcctaccaatctcactgactccggccttgatcaggagccattcctgtacttggttggacgcaagaagcttctggatgctcagtacaagtgctatgaccggattcagcagttgcccccttatgagggagaaggtccatattgcaaccgaacttgggatggatggatgtgctgggacgacactccagctggtgtaatgtcctatcagcactgccctgactactttccggactttgacccaacagaaaaggtttcaaaatactgcgatgaraatggagagtggtttagacaccctgacagcaaccgaacctggtccaactacactctgtgcaatgccttcactcctgacaaactgcataatgcatacgttyyttattacctagcacttgtgggccactccatgtcaattgctgctctgattgcttccatggggatcttcttgtttttcaagaaccttagctgccagagagtgactctgcacaagaacatgttcctcacttatatcctgaactctatcattatcatcatccacctggttgaggttgtgcccaatggagacctggtgcgacgggatcctatgcatatttttcatcataacacatatatgtggacaatgcagtgggaactgtcaccacccttacccctgagtgcacacgagggaaagatggaccctcatgacagtgaagtgataagttgcaagattctgcactttttccatcagtacatgatggcttgcaactacttctggatgctgtgtgaggggatctatcttcacactctgatcgtcatggctgtgttcaccgaggatcaacgtctgcgctggtactatttacttggctgggggttcccaatagtgccaactattatccatgccattactcgtgccgtctaytacaacgacaactgttggctgagtacggagacccacttgctttacatcatccatggacccgtcatggcggctctggtggtcaacttcttcttyctgctcaacattgtccgtgtgcttgtgaccaagatgaggcaaacccatgaagccgaggcctacatgtacctgaaggctgtaaaggccaccatggtccttgtgcccctgctggggatccagtttgttgtgtttccctggaggccctccaacaaagtgcttgggaagatctatgattatctcatgcactctctgattcatttccagggattctttgtcgcgactatctactgcttctgtaaccatgaggtgcaagtgaccctgaagcgtcagtgggcgcagttcaagatccagtggagccatcgctggggtaggcgccggcccaccaaccgagtggttagcgctcctcgtgctgtagcctttgcagaaccaggtggcckccccatttacatctgccatcaggaaccaaggaatcctccagtcagcaacaacgaaggcgaagagggtactgaaatgatccccatgaatgtcatccagcaagactcatccgcttgaatgcttgaatgtgaagcaacccccccaacattgtgatccactgagccttcatttcctgggagaacgatagaccatgcgtttcaagtgatccccatcctcccaggagctaagcatatatttgtgaagatgtattaagtgaatttgtccatagtgaatttgaagaacgttattcttggtactattgctttgggagtcaggctaggctctcagtgcaacttgtgaactccattattcatctaggactgagatgacagtgttcataggaatgtagacaaggtatccaaaactgccactaaattgacctagttcagataagggtgctccatgttaatgttgagccatttgtacctttgagaaactaaaatcactctcaatgtttttaattttaacactggactttgaattagactatttctgtatttggctacggatctggtttttaatgtttttatttcagtcaattcctatattgcacattttttcatccatacaatgtcaactgcacaaataacatgacctctggaagatgctgtgtcttttataacatgatccacgtcaccaggcagacccaaatactgtaaagaattgatctgaatgttgagtgtgctttggtcactgacatttataaattgggaggtcatcaagaacctatcactaaatttttcacaaaactgacccccctcaaatgtaattttccatcaaagagaacactctttaaagatagttttccactttcctaaactacaggatttataaagcaaatcattccaaggtttataaagcagattacctcttgcccttgggtgctatttagcagtgagggatacatttgtttacgactggtaattaaaagactccattcaagtccattaactgccttccacccagcttcaaagcttgacaagatcccgtgttttccaggaagactcagtgtggctaattacaaatcagtttctagttgacctcttgtttgcttctattagcaaaacaaggagggaaaaaagcaaaccacaatgtaaggacttggagtttaaccacatattagttcatcttaaattaaagacaagcttctcaccaaaactcagtaccatatttccacgcctctctttactccccagaatgagatcttccaagatccacaaataaaccaataccattaccaatttctgaatctgcaactgcaatcaattatcattattaatttgtatgctgaatgagacgcatccttgagacccctaaaaatctcatctcctctttgtcatcttgtgtcactgcctttcagaggtgatttagttgcgtaaaaacaaaagtaacttgatttgttctggttacgtacttggtgcacccagagaaaattgtatttcgctagcagctgtggcccttggatactgagagtctcctttaccaaaatgggagaattgaaaggaaggatttttttttccaatcacagtgttacgtggtgatgttcccatgttttgtttacaaacattgaaatcagtgtatttcaggcagctctggtacaaatgtgatagtgtattgctgaagtgtttgagacgttattgtgcttctgtagtaggggctgatgaaatcaaactgacttatcatagcattgcatgtaatacctaaattgtgtgaaacacttcttctgtgtgtagtcgtgcc

SEQ ID NO: 1894 - DNA, 3434 bp, Rattus norvegicus
ggcacgaggcagaggcaggctctgcaaggagagccagtggcccaagcccctggacggactgcagcttgcagacaactcctggttggagaggtgcttctgctcactctgaggttggcaccccctgcccagtgaagtctgagttcctgagacatccagctagagaattcctgcgtccacctaaggtaagtgccattccacacaagaggaaaccgagggagcacggcttctgaacagcggatctgaaaatgactccacggagatccagaatgaaaaggcggaacctccgaaaaccgaagatgaggttccttctcctgaacaggttcaccctgctgctcctgctcctagtgagccctactccagttcttcaggctcctaccaatctcactgactccggccttgatcaggagccattcctgtacttggttggacgcaagaagcttctggatgctcagtacaagtgctatgaccggattcagcagttgcccccttatgagggagaaggtccatattgcaaccgaacttgggatggatggatgtgctgggacgacactccagctggtgtaatgtcctatcagcactgccctgactactttccggactttgacccaacagaaaaggtttcaaaatactgcgatgaraatggagagtggtttagacaccctgacagcaaccgaacctggtccaactacactctgtgcaatgccttcactcctgacaaactgcataatgcatacgttyyttattacctagcacttgtgggccactccatgtcaattgctgctctgattgcttccatggggatcttcttgtttttcaagaaccttagctgccagagagtgactctgcacaagaacatgttcctcacttatatcctgaactctatcattatcatcatccacctggttgaggttgtgcccaatggagacctggtgcgacgggatcctataagttgcaagattctgcactttttccatcagtacatgatggcttgcaactacttctggatgctgtgtgaggggatctatcttcacactctgatcgtcatggctgtgttcaccgaggatcaacgtctgcgctggtactatttacttggctgggggttcccaatagtgccaactattatccatgccattactcgtgccgtctactacaacgacaactgttggctgagtacggagacccacttgctttacatcatccatggacccgtcatggcggctctggtggtcaacttcttctttctgctcaacattgtccgtgtgcttgtgaccaagatgaggcaaacccatgaagccgaggcctacatgtacctgaaggctgtaaaggccaccatggtccttgtgcccctgctggggatccagtttgttgtgtttccctggaggccctccaacaaagtgcttgggaagatctatgattatctcatgcactctctgattcatttccagggattctttgtcgcgactatctactgcttctgtaaccatgaggtgcaagtgaccctgaagcgtcagtgggcgcagttcaagatccagtggagccatcgctggggtaggcgccggcccaccaaccgagtggttagcgctcctcgtgctgtagcctttgcagaaccaggtggcckccccatttacatctgccatcaggaaccaaggaatcctccagtcagcaacaacgaaggcgaagagggtactgaaatgatccccatgaatgtcatccagcaagactcatccgcttgaatgcttgaatgtgaagcaacccccccaacattgtgatccactgagccttcatttcctgggagaacgatagaccatgcgtttcaagtgatccccatcctcccaggagctaagcatatatttgtgaagatgtattaagtgaatttgtccatagtgaatttgaagaacgttattcttggtactattgctttgggagtcaggctaggctctcagtgcaacttgtgaactccattattcatctaggactgagatgacagtgttcataggaatgtagacaaggtatccaaaactgccactaaattgacctagttcagataagggtgctccatgttaatsttgagccatttgtacctttgagaaactaaaatcactctcaatgtttttaattttaacactggactttgaattagactatttctgtatttggctacggatctggtttttaatgtttttatttcagtcaattcctatattgcacattttttcatccatacaatgtcaactgcacaaataacatgacctctggaagatgctgtgtcttttataacatgatccacgtcaccaggcagacccaaatactgtaaagaattgatctgaatgttgagtgtgctttggtcactgacatttataaattgggaggtcatcaagaacctatcactaaatttttcacaaaactgacccccctcaaatgtaattttccatcaaagagaacactctttaaagatagttttccactttcctaaactacaggatttataaagcaaatcattccaaggtttataaagcagattacctcttgcccttgggtgctatttagcagtgagggatasatttgtttacgactggtaattaaaagactccattcaagtccattaactgccttccacccagcttcaaagcttgacaagatcccgtgttttccaggaagactcagtgtggctaattacaaatcagtttctagttgacctcttgtttgcttctattagcaaaacaaggagggaaaaaagcaaaccacaatgtaaggacttggagtttaaccacatattagttcatcttaaattaaagacaagcttctcaccaaaactcagtaccatatttccacgcctctctttactccccagaatgagatcttccaagatccacaaataaaccaataccattaccaatttctgaatctgcaactgcaatcaattatcattattaatttgtatgctgaatgagacgcatccttgagacccytaaaaatctcatctcctctttgtcatcttgtgtcactgcctttcagaggtgatttagttgcgtaaaaacaaaagtaacttgatttgttctggttacgtacttggtgcacccagagaaaattgtatttcgctagcagctgtggcccttggatactgagagtctcctttaccaaaatgggagaattgaaaggaaggattttttttccaatcacagtgttacgtggtgatgttcccatgttttgtttacaaacattgaaatcagtgtatttcaggcagctctggtacaaatgtgatagtgtattgctgaagtgtttgagacgttattgtgcttctgtagtaggggctgatgaaatcaaactgacttatcatagcattgcatgtaatacctaaattgtgtgaaacacttcttctgtgtacttgtataaattaatacaagcatgttgaaaaggcaaaaaaaaaaaaaaaa

SEQ ID NO: 1895 - DNA, 303 bp, Rattus norvegicus
ctggtaaggccaccctactcctactcggcgctcatcgccatggccattcaaagcgcgccgcgtcgcaggttgacgctcagccagatctaccagtatgtggcaggcaacttccccttctacaagcgcacgaaggcgggctggcagaattccattcgccacaacctgtcactcaatgattgcttcaagaaggtgcccagagatgagaacgacccaggaaaaggcaattattggatgctggacccaaactgtgagaagatgttcgacaatgggaacttcagaaggaagaggagaaggagaggggag

SEQ ID NO: 1896 - DNA, 1128 bp, Rattus norvegicus
atgcagctgcagttccggagctggatgctggccgcgctcacgctgctcgtggtcttcctcatcttcgcagacatctcagagatcgaagaagaaatcgggaattctggaggcagaggtacaatcagatcagctgtgaacagcttacatagcaaatctaatagagctgaagttgtaataaatggctcttcactaccagccgttgctgacagaagtaatgaaagccttaagcacagcatccagccagcctcatccaagtggagacacaaccagacgctctctctgaggatcaggaagcaaattttaaagttcctggatgcagagaaggatatttctgtccttaaggggaccctgaagcctggagacattattcattatatctttgatcgagacagcacaatgaacgtgtcccagaacctctatgaactcctccccagaacctcacctctgaagaataagcatttccagacttgtgccatcgtgggcaactcaggagtcttgctcaacagcggctgtgggcaggagattgacacacacagctttgtcataaggtgcaacctggctccagttcaggagtatgcccgggatgtgggcctcaagactgacctagtgaccatgaacccctcagtcatccagcgggcctttgaggacctagtgaatgccacgtggcgggagaagctactgcagcgactgcatggcctcaatgggagcatactgtggatacctgccttcatggcccggggtggcaaggagcgtgtggagtgggtcaatgctctcatcctgaagcaccatgtcaacgtacgcacagcttacccttccctgcgcctgctgcacgcagtccgaggatattggctgaccaacaaagtccacatcaaaagaccaaccactggcctcctgatgtacaccctggccacacgcttctgcaatcagatctacctttatggcttctggcccttcccattggatcagaatcagaaccccgtcaagtaccactattatgacagcctcaagtatggctacacctcccaggccagcccccacaccatgcccttggaattcaaggccctcaagagcctacatgaacagggggcattgaaactgactgtcggccagtgtgacggggctacgtaa

SEQ ID NO: 1897 - DNA, 2007 bp, Rattus norvegicus
ggcccccgaggcgtggcattttttttttttaaagcaagcacattggagagaaagaaaaaagaaacaaacaaacaaacaaaagcaaaacaaaacccaggcaccagccagctaggacatttttttttccacactgcctgaaaacaaacaaacagccatcagaaacagtcatcagcaacagcatcaaaactgttagcttagcggcggcggccaccgtcaccctgtggccacgacatctgcctaaagggatgcttctctcagcggagcagttctacgccgaccgccttcttccctcgtgctgagcgggatttttgggttctctggggttcgggctgggagcttcatgactacacggagcaggacagcggccacatcatgcgagcacaaattgaagtgataccatgcaaaatttgtggcgataaatcctccgggatccactacggagtcatcacgtgtgaaggctgcaagggattcttcaggaggagccagcagaacaatgcctcttactcctgcccaaggcagagaaactgtttaattgacagaaccaacaggaaccgttgccaacactgccgcctgcagaagtgtcttgccctaggaatgtcaagagatgctgtgaagtttgggaggatgtccaagaagcagcgggacagcctgtatgctgaggtgcagaagcatcagcagaggctgcaggagcagcggcagcagcagagtggggaggcagaggcccttgccagggtgtacagcagcagcattagcaatggcctcagcaacctgaacaccgagaccggcggcacatacgccaacgggcacgtcattgacctgcccaagtccgagggttactacaacatagattccggtcaaccgtctcccgatcagtcaggactggacatgactggaatcaaacagataaagcaagaacctatctatgacctcacatccgtacacaacttgtttacctatagctctttcaacaacgggcagttagctcccgggataacaatgtctgagatcgatcgaattgcacagaacatcattaagtcccatttggagacgtgccagtacacaatggaagagctccatcagctggcatggcagacccacacctatgaggaaataaaggcatatcaaagcaagtccagggaggctctgtggcagcagtgtgccatccagatcacccacgccatccaatatgtggtggagttcgcaaagcggataacaggcttcatggagctgtgtcagaacgatcagatcttacttctgaagtcaggttgcttggaagtggttttagtgagaatgtgccgtgccttcaacccattaaacaacactgttctgtttgaaggaaaatatggaggaatgcaaatgttcaaagccttaggttctgatgacctagtgaatgaagcatttgactttgcgaagaatctgtgttccttgcagctgaccgaggaagagattgctctgttctcctctgctgttctgatatccccagaccgagcctggctgttagaaccaagaaaagtccagaagcttcaggaaaaaatttattttgcacttcaacatgtgattcagaagaatcacctggatgatgagaccctggcaaagttaatagccaagataccaactatcacggcagtctgcaacttgcatggggagaagctacaggtatttaagcagtctcatccagacatagtgaatacactgtttcctccattgtacaaggagctctttaatcctgactgtgctgcggtctgcaaatgaaggggacgagaactctcagagtcatggaatgcatcgccgttaagacaaaagcaatgtgttcatggggacttaaggaaaatgtcactactgcaacattaggaatgtcctgcacytaatagamatatttttcaccgytacagtttgaagaatgtaaatatgcammwrarwrrrrmwmwwctgtttgttcgtttgttgtttgtwtgtttttgaaatgatcmtaaatatacaaatataggccaaaaaaaaaaaaaaaaa

SEQ ID NO: 1898 - DNA, 7029 bp, Rattus norvegicus
ttctgggatttgaatctttccaaggaggaaacacccagcaaactcagttgattaaacaccaaactgacagattcccaactcttcggttcaactccgaggtcttttttgtggcgtcctgggagctctgttatgggcaagaactgcctctggccagcaccatgaagcctgaatcagcttccgctccgctctgggcctcactccacctgagtactcagttgcttgcggttccccttcccagggtctgctgctggtagacagtcaaacctcagcactggtccttggtttgggctacctttcacctggctcacttccctcttacggcaccctgagctccagcccggtccttggtttccctggctaggacatatttgctgggaggaagacattgctgaaggtttattcccatcctgggctacttctccttgaatcaaggcctccggatccacatggatagctgagatcttttcttggagaaagatacttcctccttgcctcatccctggtttgcctcacccgaccgacattctctgtctgtttcttctgcctctttattggatttcttgcctgtgtgcctatctagggccgtgttgttctttttcctcctgcccctttcctcctagcattcccgtgtgtgttcttcttgtcttttcttgtaccactctgttttctttcctttccctcaccaacgcctagcccctaactcccgccccagggctgttccctggcctgcctgttcctctctgctccgacccagcagccaacatgagctttaccctccactcagttttcttcaccctgaaggtgagcagctttctgggctccctggtggggctctgcctgggtctggagttcatgggcctccctaaccagtgggcccgctatctacgctgggatgctagcacgcgcagtgacctgagcttccagttcaagaccaatgtttccactgggctgctcctgtatttggatgatggtggtgtctgtgacttcctctgcctctccctggtggatggccgtgttcagctccgctttagcatggactgcgccgagaccactgtgttgtccaacaagcaggtgaacgacagcagttggcacttcctcatggtgagccgtgaccgtgtgcgcactgggctggtgattgatggtgagggccagtctggtgagctacgggcccagcggccctacatggatgtggtcagtgatttgttcctcggtggcgggcccgctgacattcgaccttctgccctgacccttgatggagtacagaacatgcctggctttaagggattaatgctggatctcaagtatggcaactcggaacctcggcttctcgggagccagagtgtccagttagaagcagagggaccctgtggcgagcgtccctgtgaaaatggtgggatctgcttcctcttggatggtcatcccacctgtgactgttctaccactggctatggcggcacactctgctcagaagatgtcagtcaaggtccaggcctctcccatcttatgatgagtgaacaaggtagaagtaaagctcgagaggagaacgtggccaccttccgaggctcagagtatctgtcctatgacctgtcccagaaccccatccagagcagcagcagtgaaatcaccctttcctttaagacctggcaacgcaatgggctcatcctccacacgggcaagtcggccgactatgttaacctggctctgaaggatggtgcggtctccttggtcattaacctggggtccggggcctttgaggccattgtggagccagtgaatgggaaattcaacgacaacgcctggcatgatgtcaaagtgacacgcaatcttcggcaggtgacaatctctgttgatggcatcctaacaacaacaggctacactcaagaggactacaccatgctgggctcagatgactcctcctatgttgggcccagcccaagcactgcggacttgccaggctcacctgtgagcaacaacttcatgggctgccttaaagaggttgtttataagaataatgacatccgtctggagctgtctcgcttggcccggattggggccaccaagatgaaaatctatggtgaagttgtgttcaagtgtgagaacgtggccactctggaccccatcaactttgagaccccagaggcttacatcagcttgcccaagtggaacaccaaacgtatgggttccatctcctttgactttcgcaccactgagcccaacggtctgatcctcttaactcacgggaaaccccaagaaaggaaagacgtccggagccagaagaacacaaaagttgacttctttgctgtggaacttcttgatggcaacctgtatttgctgcttgacatgggctctggcaccatcaaagtgaaggccactcagaagaaagccaatgatggggaatggtaccacgtggacattcagcgggatggcagatcaggtaccatatctgtgaacagcaggcgcacaccgttcaccgccagtgggcaaagtgaaatcttggacctggagggggacatgtatctgggcggactgccagagaaccgggctggcctcattctccccacggagctctggactgccatgctcaactacggttatgtgggctgcatccgcgacctgttcatcgatgggcgcagcaaaaacatccggcagctggcggagatgcagaatgcagcaggcgtcaagtcctcctgttcacgcatgagcgccaagcagtgtgacagctacccctgcaagaacaatgcggtgtgcaaggacggctggaaccgcttcatctgcgactgcactggcaccggctactggggtagaacctgtgaaagagaggcatccatcctgagctatgacggcagcatgtatatgaaggtcatcatgcccatggtgatgcacacagaggcagaggatgtttccttccggttcatgtcccagcgagcctatgggctactggtagcgactacctccagggattctgcagatacactgcgtctagagttggatggtgggcgtgtcaagctcatggttaacttagactgtatcaggataaactgtaactccagcaaaggacctgagaccctgtacgcagggcagaagctcaatgacaatgagtggcataccgtccgggtagtgcgaagaggaaaaagccttaaactaacagtggacgatgatgtggctgagggtacgatggtgggcgaccacacccgcctggagttccacaatattgagactggtatcatgacggagaagcgttacatctccgtggtcccctccagtttcatcggccatctacagagcctcatgttcaatggcttgctgtacatcgatttgtgcaaaaatggtgacatcgactactgcgaactgaaggctcgttttggactgagaaacatcatcgctgaccctgtcacttttaagaccaagagcagctacctgacccttgccaccctccaggcttacacttccatgcatctctttttccagttcaagaccacttcagctgatggcttcattctcttcaacagtggtgatggcaataattttattgcagttgaattggtcaaggggtacatacactatgtgtttgatcttggcaatggtcccaatgtgatcaaaggcaacagtgaccgtcctctgaatgacaaccagtggcacaacgttgtcatcactcgggacaacagtaatacccacagcctgaaagtggacaccaaggtagtcactcaggtcatcaatggtgccaagaatctggatttgaaaggtgacctctatatggctggcttagcccagggcatgtatagcaaccttccaaagctcgtggcctctcgggatggatttcagggttgcctggcctctgtggacttgaatgggcgcctgcctgatctcatcaacgatgctctccacaggagtggacagattgatcgaggctgtgaaggacccagtacaacctgtcaggaggattcatgtgccaaccagggggtttgcatgcagcagtgggaaggttttacatgtgactgctccatgacatcatattctggaaaccagtgcaatgaccctggtgccacatatatctttgggaaaagcggtggtctcatcctctacacctggccagcaaatgacagacccagcacacgctctgaccgcctcgccgtgggattcagcaccactgtgaaggatggtgtcttagtacgcatcgacagtgcccctggacttggcgactttctccagcttcacatagaacaagggaaaattggagttgtcttcaatattggcacagttgacatctccatcaaagaagagagaacccctgtcaacgatggcaaataccatgtggtgcgcttcaccagaaatggggccaatgcaacccttcaggtggacaactggccagtgaatgagcattatcctacaggcaacactgataatgaacgccgccaaatggtaaaacagaaaatccccttcaaatataatcggcctgtagaggagtggctgcaggaaaaaggccggcagctaaccatcttcaacacccaggcgcaaatagccatcggaggaaaggacaaaggacgtctcttccaaggccaactctctgggctctattatgatggtttgaaagtactgaacatggcggctgagaacaaccctaatattaaaatcaatggaagtgtccggctagtgggagaagtcccatcagtctcgggaacaacacatacaacctccatgccacctgaaatgtctaccactgtcatggaaaccaccaccacgatggctacgaccaccacccgcaaaaaccgctctacagccagcattcagccaacatcagatgaccttgtttcatctgctgaatgctcaagtgatgatgaagactttgtcgagtgtgaaccaagtacaggtaggtcagccagaagctctaatgcagctaggatcactccgtgccgcccttacatggacatggsgactcacttacmcatttacccttctcatcttcatctcctgtgtagtacactcatagacacacccctcccctttccgcaccccttctttcccatgctccccccttctttagcgttgttaaaatttatgtgctgtcatccacccccctaaattaagaaaaatctcaaaatttgtcaaaaagacaatacaaatctaaatatttatctgaaaactaacaatgaagaaattcattccaaatcctatagatgcatagattttttttaaggcaaattataatttttttcactttcagtcctagaargawgaawwawwwwaaawwwaaaaaccaatgcccatcctaagtccctccaaagtaaaacttgttaaagtgcagatttttttcttttcatgttatgtggtgtgaatgtttgtgttgttgcctccctgtatcatcctctgttgtaaattactatatctgaaaaactagacattttgctcaaaagtttttaagaaataacaacaataacaacaacaacagcaactacaacaacaaaaaaaagcaactttcaagaatgtggcaattctatttgtccaagagcattcttacacaactttcttttgtaaattttttcttccatgccaaaaaacatgcgggcaatttgttgatgaggtgaattagttattcctcttcttgtagaagaccctttagctacccctcctattgctactcgtgtaccctccattacactcccccctaccttccgccccctcctcaccattattgagaccaccaaagattccctgtccatgacctctgaggcggggttaccttgcctgtcggaccaaggcagcgatggttgtgatgatgatggcttggtgatatctgggtatggctcaggggaaacctttgactctaacctgccccctactgatgatgaagatttttacaccaccttctccttggtaacagataagagtctttccacttcaatcttcgaaggtggctacaaagcgcatgcgcccaagtgggaatccaaggactttagacctaacaaagtctcggaaactagtagaactacaaccacctctttgtcccctgagctgatccgcttcacagcgtcctcctcgtctgggatggtgcccaaattgccagctggcaaaatgaataaccgtgatctcaaaccccagcctgatatagtcttgcttccgttgcccactgcctatgagctagacagcaccaaactgaagagcccactaattacttgccccatgttccgtaatgtgcccacagcaaaccccacggagccaggaatcagacgggttccgggggcctcagaggtgatccgggagtccaacagtacaacagggatggtcgtcggcattgtggctgctgccgccctctgcatcttgatcctcctgtacgccatgtacaagtacaggaacagggacgaggggtcctatcaagtggacgagacgaggaactacatcagcaactcggcccagagcaacggcacgctcatgaaggagaaacaagccagctccaagagcggccataagaaacagaaaaacaaggacaaggagtattatgtgtaaacatcacaccaccagtcgtatgcgaattgaaaacagaattatttctatacacacacckgamkastttgacaatgagatttaacttgttggatatgttcggtgagttggggtataccacgactatggtgggaaaaaccatttttaaaaggacacatacgatggtgtatctctctgtaatggtgagccatggtgcarggtcatagcctttgcctgaagmcagaaaattctytctgccctgctgtatcataaagcacacacttagtgccctgragcaagtccatgactccacttgactttggaagyttccttctctccgggwccttttgaaaggggyagaagactatgtgacttacttgktccttsgawccaagtgagtctgtaatgatgywtgtgactctsgamtgtaacaatgttggcttatttttgtytgtttgtttaattatgtaaaaaaacaaaamcaaaaaawtgagaaaagaaaamtgctttwraaaaatacaaacaaaacaatmcaaaamaaaaaaaaaaaaa

SEQ ID NO: 1899 - DNA, 2941 bp, Rattus norvegicus
tcgggaccatggactggggctgggggagccgctgctgtcgcccgggacggcgggatctgctgtgcgtgctggcactgctcgccggctgtctgctcccagtgtgccggacgcgtgtctacaccaaccactgggcagtgaagatcgccggcggattcgcggaggcagaccgcatagctagcaagtacggattcatcaacgtaggacagatcggtgcgctgaaggactactatcatttctaccacagtaggaccattaaaagatctgttctctcaagcagaggaacccacagtttcatttcaatggaaccaaaggtggagtggatccaacagcaagtggtgaaaaaacgaaccaagagagattatgacctcagtcgtgcccagtcgacttacttcaatgatcctaagtggccaagtatgtggtacatgcactgcagtgacaacacacatccttgccagtcggacatgaatattgaaggagcctggaagagaggctacacggggaagaacatcgtggtgactatcctggatgatggcatcgagagaacccaccccgatctgatgcaaaactacgatgctctggcaagttgcgatgtgaatgggaatgacttggatccgatgcctcgttatgatgcaagcaatgaaaacaagcatgggacccgctgtgccggagaagtggcagccactgcgaacaactctcactgcaccgttggaatcgctttcaacgccaaaatcggaggtgtgagaatgctggatggtgatgtcaccgacatggtggaggcaaagtctgtcagctataacccacagcatgtacacatctacagtgccagctggggcccagatgatgatggcaagaccgtggatgggccagctcccctcacccggcaagcctttgagaatggtgtgagaatgggtcggagaggccttggttctgtgtttgtgtgggcatctggcaatggtggacggagtaaggaccactgctcttgtgatggctataccaacagcatctataccatctccatcagcagtacggccgaaagtggaaagaaaccttggtacttggaagagtgttcgtctacactggccacaacctacagcagtggagaatcctatgataagaaaataatcactactgatctaaggcagcggtgcacagacaatcacactggaacatcagcctcagcccccatggctgctggcatcattgccctggccctggaagccaatccgtttctgacctggagagacgtacagcatgttattgtcaggacttcccgtgcgggacatttgaacgctaatgactggaaaaccaatgctgctggttttaaggtgagccatctctatggatttggactgatggatgctgaagccatggtgatggaggcagagaagtggacaactgttcctcagcagcacgtgtgtgtggagagcacggaccgacaaatcaagaccattcgcccaaacagtgcagtgcgctccatctacaaagcctcaggctgctcggataatcccaaccatcatgtcaattacctggagcatgtagtcgtgcgtattaccatcacacatccacggaggggagacctggccatctatctgacctcaccctcaggaacaagatcccagcttttggccaacaggctatttgatcattccatggaaggatttaagaactgggagttcatgaccattcattgctggggagaacgggctgctggggactgggtccttgaagtttatgatactccatctcaactgaggaacttcaagactccaggtaaattgaaagaatggtccttagtcctctatggcacatccgtacagccatactccccaaccaacgagtttcccaaagtggaacggttccgctacagccgggtggaggaccccacagatgactatggtgctgaagattatgcaggtccttgtgaccctgagtgcagtgaagttggatgtgatgggccgggaccggatcactgcactgactgtttacactatcactacaagctgaagaataacaccagaatctgtgtctccagctgccctcctggccacttccatgctgacaagaagaggtgccggaagtgcgcccccaactgcgagtcctgctttggtagccatgctgatcagtgcctgtcctgtaaatatggctacttcctgaatgaagaaactagcagctgtgttgctcagtgccctgaggggtcataccaggatatcaagaaaaatatctgtgggaaatgcagcgagaactgtaagacgtgcactggatttcacaactgcacagagtgcaagggcgggttaagcctccagggatcccgctgttctgtcacctgcgaggatggacagttcttcagtggtcacgattgccagccctgccaccgcttctgtgccacctgtgctggggccggagccgatggatgtattaactgcaccgagggttatgtcatggaggagggaagatgtgtacagagctgtagtgtgagctactacttggaccactctttagagggtggatacaagtcctgcaagagatgtgataacagctgcttgacatgcaatgggccaggattcaagaactgctccagctgccccagtggctatctattagacttgggaatgtgtcagatgggagccatctgcaaggatgcaacggaagagkcmygrgsagaaggaggcttctgtatgcttgtgaaaaagaacwatctatgtcagsrgaaagttctacaacaactgtgctgcaaaacatgtacattccaaggctgagcakccaccttacatccctgttcctgtagacttatagattattccatattattaaagaaaaaaagccaaaaactgcaaaccacctctctctttcttgctatcttttttttttctctctctctatctcaagtttgtgcagggagatggtgaactgttttgtcagaactgaaaaaaaaaaaaaaaaa

SEQ ID NO: 1900 - DNA, 2082 bp, Rattus norvegicus
ccgcctctgccgctgtctccactgcagcacggggcccggtgtgcgggtgggagaaggtgagggagccgccagtggtccccgggaggctcgagatagatcatggaagggaagtggttactgtgtttgctactggtccttggaactgcagctattcaggctcatgatggacatgatgatgacatgattgatattgaagatgatcttgatgatgttatcgaagaggtagaagattcaaaatctaaatcagataccagcactcctccatctccaaaggtcacctacaaagctccagttccaacaggggaggtttattttgctgactcctttgacagagggtctctgtcagggtggattttatctaaagccaaaaaagacgacactgatgatgaaattgccaaatatgacggaaagtgggaggtagatgaaatgaaggaaacaaagcttccaggtgataaaggacttgtattgatgtctcgggccaagcatcatgccatctctgctaaactgaacaagcccttcctgtttgataccaagcctctcattgttcagtatgaggttaactttcagaatggaatagaatgcggtggtgcctacgtgaagctgctatccaagacctcagaactcaacctggatcaattccacgacaagactccgtatactattatgtttggtccagataaatgtggagaggactacaaactgcatttcatctttcgccacaaaaaccccaagacaggcgtatatgaagaaaaacatgctaagaggccagatgcagatctgaagacctatttcactgacaagaaaacacatctttacacattaatcttgaatccagacaatagttttgaaatattagttgaccagtctgttgtgaacagtggaaacctgctaaatgacatgacccctccggtaaacccttcacgtgaaattgaggacccagaagaccggaagcctgaagattgggatgaaaggcccaaaatagcagatccagatgctgtcaagccagatgactgggatgaagatgccccttctaagattccagatgaagaggccacaaagcctgaaggctggttagatgatgaacccgagtatattccagaccctgatgcagagaaaccagaagattgggatgaggatatggacggagaatgggaggctcctcagattgccaaccctaagtgtgagtccgcccctgggtgtggtgtctggcagcgacctatgattgacaaccccaattataagggcaaatggaagcctcctatgattgacaatcctaactaccagggaatctggaaaccaaggaaaataccaaatccagatttctttgaagacctggaaccttttaggatgactcctttcagcgctattggtttggagctctggtccatgacatccgacatcttttttgacaactttatcattagtggtgaccgaagagtagttgatgactgggccaatgatgggtggggcctgaagaaagctgctgatggggctgcagagccaggtgtagtggggcagatgctggaggcagctgaagagcgtccatggctttgggtggtctacattctgactgtagcgttgccagtgttccttgtgatcctcttctgctgytctggaaagaaacagtccaatgctatggagtacaagaagacagatgctccccagccagatgtgaaggacgaagaaggkaaggaagaagagamgawcmmggkagatgaasagsaagaagaggasamkcttgmwkwgmmacakaasagtkatgctsawsaagmtgstsgcactggcmsycaagatgaggaagatagcamgcctaaagcakaggaggatgaaattttgaacakatcmccamgaaacagaamgccackaagagagtgaaacartcttaagaacttgatctgtgatttcctctccctccccttcccctgcaaatatggtcctaggagagggcctggtgtaccttaggtgggagctcagaaaacctcaagatgtcaccatcaacaggttccagtgaatactagcctgtaattttaaacatctagcagtaaactattgcagttgtaatgtaaaaaaaaaaaaaaaaaa

SEQ ID NO: 1901 - DNA, 544 bp, Rattus norvegicus
cggcacgagsymckwrgctttgagcaagaagatggctgccaaaacaggatctcagctggagcgcagcatmrgcacsaksatcaatgttttccatcagtactckaggaagtatggacatcctgacaccctgaacaaggcggaattcaaasaaatggtgaataaggacttgccaaattttctgaagagggaraaaagaaatgaaaatckcckarragacatcatggaggacctggacacaaaccaggacaatcawctgtcctttgakgagygtatgatgctgatgggaaagttgatctttgcctgtcatgagaagctgcatgaraacaacccacgtgggcatgaccacagscacggcaaaggctgtgggaagtaattaaraggtcvccatgtaacatctgcccaaccaagtctaaagggaatagcttactaaatgaccttggttctggggctgggaaataatttamaaatgaataaataaagtctttatccattmhrwaaaaaaaaaaaaaaaaaaaaaaaaaacctttgcggccgcaagcttatt

SEQ ID NO: 1902 - DNA, 2092 bp, Rattus norvegicus
cggcggctccctcagctcctcatctgggccatctgtccgtgtgtcgctgcctcagaccagcaggatggctgccaacaaaggcaagagccagggctccctggtccttcacaaggtcatcatggtcggcagtgggggagtcggcaagtcagccctgacgctccagttcatgtatgacgagtttgtagaagactatgagcccaccaaagccgacagttacagaaagaaggtggttctcgacggagaagasgttcagatagacatcctggacacagccggccaggaggactatgcggccatccgtgacaactacttccgaagcggagaaggctttctgctggtgttctccatcacggagcacgagtctttcaccgccacagccgagttcagggaacagatcctccgagtcaaggccgaggaggacaaaatccctctgctggtcgtgggcaacaagtctgacctggaggagcggaggcaggtgcccgtggaggaggcccgaggcaaagcggaagagtggggtgtgcagtatgtggagacatccgcaaagacccgagccaacgtggacaaggtgttctttgatctgatgagagaaatccgggcaaagaagatgtcggaaaacaaggacaagaacggcaggaaaagcggcaagagcaagaagagtttcaaagagcggtgctgcttgctgtgagcgggccgcggacagagcgagcggagaaggccacattgcagcgcgccgagcccaggtggcctccccctggctccccgtctccagcagctgtaattcactatcacttcttgaagatggacagatacctgtgcaaaccagtggctggcaggagaaagacgcacttcgtctgtgcgtctgtgcgatgcatctgctaacgttgccaggagctttgagagtctgccccctcccaccctccctgaaccgtgactgtcaccagactctagggtcaggaatctgagttgtgttgacaagaaagaggattgccacggcggcttgtccccccctgttctaggacatggtcatcttttgttggaaaatcaaaatgcttcacattagcagggcgtgctggtgcacccctgtagtcccagaactctagaaggtaaggcagggagggtagcctgagcccaaggccccaaggcctgggctacctagcaagaccctgtctctaaaaggaaaaagaactaacatcttattttcttagatttaaaaagagggtctctggcaagacccctcgttagttcttatcagtttagaagtagacagggggcggaaaacctaagctcaggtaatactgaaaaagccaaaacaatttktttttttkttttttttctgttttaaaagataaacttctgtgacttggaagcagaattagaaagatgaacttcacttggtccagataggctgaaccaagcctcctggcgtttgtagagaagtgggacgctgttcccttcatacttaaatgccagccaggtgctggctgtgggcttccctccctaacacccttacttagtagtgaggaaactttgtgtgggggagatgtagcctgtgccccagaacaagctttcttttttctgactggatcatctcaccttttctggttccctcccactccagccataggcctgttctttttcttcctttctgaaaaatgtgaccagttcaaattatgtccmaggacacgggccagcgccagctacctctgcagactctmcaagcggaagaggggaaggctcakaagggagggccatctcctgtagctcccggcagttggttctggtgacactgacatgaaccaggttccagaggctcacacccactctctgttaagcctcctctcggggaaggggactctgggactgggggctgccactgagcacacacactcctcccattttccagaagtgaacatttcacttttggtgccgaatgtgaatctgggtgggaagagcgggagcccttctaatggatttttttttacagagttatggaatccaaggtctgatccctgraaacttgtgtcacttccaaagaatcatgggctttttcgaattaaaaaaaattacactttwmaaaaaaaaaaaaaaaaaa

SEQ ID NO: 1903 - DNA, 10355 bp, Rattus norvegicus
  misc_feature (2235)..(2235): n is a, c, g, or t
atattactggctacagaataaccaccacccccacaaacgggcagcagggaaccgctttggaagaagtggttcatgccgatcagagttcctgcacttttgaaaaccgtaatcctggcctggagtacaatgtcagtgtttacactgtcaaagatgacaaggaaagtgcccctatctctgataccgtcatcccaggtaatagaaaaataagctgctctcctcagagaggcagtttgagtagcagtggggattagcatcttaatcccagatagctgagtgtgtcccatacagttgggatttaatgccaccctcccagtgcgctctccaaaaatcccacaaagccaaaaagcaactgtttggatgaaggctttttcctgttacctctgcttcactctctgtgcttccccgggatgctgtttgttgccatgggtacgtgatgagtgcagccatggcattaactctgtactgtttgctcacatggaaagattactaaacagtgtcgcgtgtctgtacccagtgctgacaggctaaaagtaatgtggtaaatgcatcccactgggcatttgtgcccggcttttacaatccatatccacctccaacggttatctagaaaacagtctttgtctccatatgtgagcagtgaaacacacttggttgacaatccaaatctttatcttgccgcttctaatcctttttaaaattggaagtggggtgaaaatgacagaaaggaaggaagtaaaggccaggctccagggcttgctttcttctgaattgaaagacagagtaacaaaggcccggctaggcaggttcattgtttgtcccaagtcttctgcagaatgaaagcactggtcagactctcttacctctgcagtattttgttatgcatttatgaatactaattaaattacatgaattaaatgttggcagtgaatgggctcagtgctcaatgctggctggccttggctgactgtgcgtttgagtggcacattcacaacatatattaataccagggtcatgatgccgtcgtgagttttgaacgtggaaaataagtcaattaaccagccaattttttttaaacctttgtaagattttatttctttttaactgaacgttttgtgttcttcctcccccatcatggccagtgtcttttacagataagttcaggttctgagaatgattttgacattggccatgtatttgtggctctttctttaagcacttgagaagttaaaactaccatttggggacattttctaaatggaagaaagcccctaaaagaatctggtaacccgcattattctcccagggaagcaaatttacttatgatgtttgggaagtcttttcaaataatttgggacacattgcatataccatcattgcttgaccattctgtcgatttcactaccggtcacctgatgtacactgctttattttttcctctttttttgctctacttttcctttgcctcccctttgcttcataactcaatagaggtgccccagctcactgacctaagctttgttgatataactgactcaagcatcggcctgaggtggaccccgctaaactcttccaccattatcgggtaccgaatcacagtagttgcggcaggagaagggatccccatttttgaagattttgtggactcctcagtaggatactacacagttacagggctggaacccggcattgactatgacatcagcgttatcactctcattaatggcggagagagtgcccctactacactgacacagcaaacgggtgaatcttgaagtcttctgtgtttgagacatggatggtgttgcatgctgctcaaccgctgtggttaaatttggatgttgccaaggagaagccagcgattggccatggggatggagacagggcacattcaaagataagggatacattagcctaactgcatgaagacattataaatagtctcgtgcactttcattcaaagtacaaacagatgtgaagatgaagggactctagatctttgagctgttctgttctaaagtatggctatggaaccgaatgacgaaaagctgttcataccaagacacacctccaaaatgcaccgctgtgtcgttcctcttaccttttgataagttcccacgatcctttgtagctaataaaacacccatcaaaaattagggtggagcagacggggagttctcagagtaggaagacggtgaaccatagggccttctagacagttgctgtgcaggataaacnaaactgcctctttaagccgacagtctagagacgagcatgcaacatcttaaaggttctctgccctgcatgggaagaaacattgctgagaaccactgtgcatgaaccccctcacttgtgatacgagttcactgaatgacattacggcaatgcagtagtgtgtagatactctggggaaactgaggaccccttgtcttttctgtctgcgtgcatgtgtttcttcggaagtaccgctctgtgtctttgctgtgtggcaacttaagcctcttcagcctgggataaaaatcttccgtggtatcaatgtactaaaacaataacggccacgatacaaagccaacctatttgaaagtagattacaattctttaaaaaatgcatgatcatggcagaaaggttaaaggggcctaacagtgtctctatagtgttttgttcattattttgttttttaacagtagtgtatcatgatctagattagattagactgtttgcatgactgtaactgtttcttttctgcatgagatactggtttttaccttttcagctactgtttttagctttgactttaaaattgcattaactcaattttccttatttgaaatcagccgtccctcctcccacggatctgcgattcaccaatatcggtccggacactatgcgggtcacttgggccccgcctccgtccattgagctaaccaacctcttggtgcgctactcacctgtgaagaacgaggaggatgtggcagagctgtccatttcaccctcagacaacgccgtggtcctaacaagtacgacgctcgaacgtagctggttcagtagacacttatctggagcacaatgagtggattctaaattctcagggaggaaagcctaggagaaaggagagttgtaacagaggaacacactgtaaaccgtgaaagatgaaacgtttctgctagagtggcaaacctttgatcgctacaaatcttagtggaatgcacaactgtgaactggcaaggtgtcaaacactttctgctcaagctacatcagagaataagtgactgccaaatgaattctgtaaccaaggaaagagtgagaatcatggggatcagcctgtctgggttattgtccttttttgggtgatataccaccagcaggtgatctatttagcattagaaaacttagaatcaattttgtgtggagaaaggcagaagaagtttagttcataatcagaaaacacgtgtttgcacaatttctctgaagcctgagagtttagaaaacaactgacatttattagacaatttatagaagtcctctcttctgggttcctactggaaaagaatattttgaattaaagagaacagaggttgcaacattgtagaaagatgtgtaagtacacgggttctacatgagaagacctagttacattttaggtccattcacaaatatggtgagaaaacccactctccctttcagatgtgtctcagaaagtgagatacaaaggggcagcatgactggtctcctatctcattttgtgactaaggaccagaggacccagatatttaactagattgtgaccacaaggccatttctgctgactcagtaggaaccactttgtcccaaatcacacgttggcaccagtttagtcaaaccctgtcacgtgttaattgtgtatcttaagggcacgtgtactctgttcccagagggtatgatggtaagacagtcttttgcccatcacaggctccgggagctcatatatctatggctatgttaatgctaccttttgggaaggcatgaccaaggatgagtgtctgaagttcactgccaatgctcttggtgttggctatggaacagtggaggagtgatcctttggcagccattgaagagtcaggggtagcgcggcaggtgcttttgggagaccagatccccaagttcaccattgccacttctccacctccctgaagcctaggattctagggtgtcgtaaaggatacccatcctgacgcacgagctaagaaaccatttgttaaagaggaaaaaaagagtcatgctatgctatgaccccaaaggaacttcctctgaaagacgttatccttaccctattttaaagattaagcagtttggggcagtgtagcgaacctaggggaactggatatgttcattgtcttgaaatcattgatggcatggaggacacacgtcaagctttgtccaactgtgcatcttaacattctctagcacggaagccgccgactgcctcatacggtggttgtgatgggtagacggtaatgtagactcccagaaaactttcatcagtggccctcacagatgccctttcgagtggatgaaagggatattgatgccctgtgtttacacttgactgagttccatttatacctgtgggactggggggctgacagaggcacaggacaaagtggcccttccttgcagattatttccagatgcagatgctcatttagctacaggtaggctatgggaccaaatgcgtggacattttatcagaggaaggagtccagggagcgctgtgctttctcatgctctcaaggttaaagcaaatcccacttgcctcttcagatctcctgcctgggactgagtacttagtcagtgtctccagcgtgtacgaacagcatgagagcatccctctcagaggaagacagaaaacaggtgagccatgttgacaacccccggctaccagctttaagcaacggaatgataggtcgagtctgaaaaaatgcgtctcaccttttgtggggttggtacattactttttattaatcaatcaatcaatttcagttatcatagaggagtgttttcacatgctctgttgacctacctcttccgttcctctccttgccctcctgccacccttcctggtccccttcctctctgtagtaatgtacaaccccccttttccgctctcatgtcaccttgtcacctctattctctgacccttttcaacctctcccacttaaggcgatcttcttttctccccacattcccttttcaggatctattctctgcacatctgtgtagatgctccgtacacacatgaaaaattaaaatctaggatccacatatgcggaaactcattatttgtctttctgaggctggatggctttgttttatataataatgttactttgtttaacatgacaatggagttccctctgtttcctggtgaatgtcactgggttcttatcctagttagagttgttgtgctggctttcataaaacaccaggatcaataggaaattggggagggaaggcttattcgccttacacttccacactttagtccgtcactgaaggaagtcaggacaggaactcaagcaggggaggaacctggaggcaggagctgatgcagaggccatggagggtgctgtttactagcttgctccccatggcttgctcagtctgctttattatagaatccaggaccatgagcccagaaaaggcacatccacaatgggttgggccctcccctgtcaatcactcataaagcgaaagccctacaagcttgcctatagcctgatcttaatagaggcattttcttaattaaaagttccttcctcttagatagcttttgcttgtgtcaatgctaaagcccaaggaaatatcagtatttcggtataatgtagaaactgactttgaaaaagaaaaagaagacatggcgtgtgtaaaccgattgaggtcagctatcggtaccgcatagcagggtctgtcgtgtccccccacattcctagtcctggatgtctaaactggtggttgttgtcttttgctcccctccttgggtgggaaaaacaggtctggactccccaactggttttgattcttctgatgtcaccgccaactcattcaccgtccactgggtggctcctcgggcccccatcaccggctacatcatccgccatcacgccgagcattctgccggaagacccaggcaagaccgagtgccgccctcaaggaattctatcaccctcaccaaccttaatccgggcaaggagtacattgtcaccatcattgctgttaatggcagagaggagagccccccactgattggccagcaatccacgggtaatgttgttttttaactctgcaaagaaattccctggtgtggaattcctatggttccgtgtaggctatgagagagcttcatgccttctgagtctgcatccctggaaaagtagacggtggcaggagacactcaaaaagcagtgatggaaccaggcactgcagtgcacgcctgcctttgatcccagcactcgggaggctgaggcaggtggatctctacagagtgagttccagaccagccagagttatacaatgagaccctgtgtctcaatgaaaaggggaagagggcagtgatagcctgtgtgtgtgtggcaaaaaatttctccctctaagaatacatttgaaaagaatttttttttcttcggagaaattgtcacttgatttggctatgctctggtgatcttgctggtcagtttttatttctgatgttttgagagagtctcctagcccacactgacccaggactgatgtagcccgggcttaatctaagatccttcgccttgacttctgggtgctggccttagaggcatgagctactattggatctttatggtttttaagaagattgcattcaaaacataatgtggtaccaaatttagtgtaaacctatgatttttttttcttttaaggttgggcttggtagcacagatgcgtatgtaatcacagatacttgggaggctgggacaggaaggccctccttgtctgctgagagttcaaagttagcctgtgcagttcagtgaggccttttcttgagataaataaaagttttttaaaaggctgcgatggtgctcgacactggtagagtgctttgtgtggtgcgagtcaggctagactatgtctttaagcacagatagatatattttcagggacagtgattaggagacctgttatcaaaaccatctgtggcttagctctgaataggggtgcgcgtgaccactttccaaatagcacatagttaagcatgcatgggtgggatctcagtccaggccagcctggtcgacaaagcgagttccaggacagacggggctgttaacacaaactctgtctcaaagaagaaaaagaaaaaagaaaaaaaaaagtgcgtgggtgggggtgcctctgtaggtttttgtgtgttttaacttatgtgatttaaattgttttccaaagaaaatggtgaggaaaaagaattcacaattccttgacctctccatagatttccattctgctaattccgtgttgcattttagatgtttgtatgaaggaaatgtaaccgttatgtaggaaaagacaaagagtggatctgagctttctttggaaggttatagccatgtcattttcctgtgatttttctagtttccgatgtcccgagagatctggaggtcatcgcttccacccccaccagcctgctcatcagttgggaaccccccgccgtctctgtgcgctattacagaatcacctatsgrsasrcagsaggaaatagccctgtccaggaattcactgtgcccggaagcaagtccaccgccaccatcaacaacattaaaccaggagcagactacaccatcaccctgtatgctgtcactggccgtggggacagtccagccagcagcaagccagtttccatcaattatcaaacagaaattgacaagccatcccagatgcaggtgacggatgtccaggacaacagcatcagtgtcaggtggctgccttcaacttctcctgtgacaggttacagagtgaccaccgctcccaaaaatggcctaggaccaacaaaatctcaaactgtcagtccagmtcaaacagaaatgaccattgaaggtttgcaacccaccgtggagtatgtggttagtgtctatgctcagaaccggaacggagaaagccagcccctggttcagactgcagtgaccaccattcctgcgccaaccaatctgaagttcactcaggtgtcacccaccaccttgactgcccagtggacagcrcccagtgttaagctcactggctaccgagtgcgggtgaccccgaaggagaagacaggaccaatgaaagaaatcaacctttctccagacagcacctccgtgattgtgtcagggctcatggtggccaccaagtatgaagtcagcgtctatgctctcaaggacacattgacaagcagaccagctcagggagtcgtcacgactctggagaatgtcagccctccaagaagggcccgtgtgaccgacgctacagaaactaccatcactattagctggagaacgaagacagagacgatcactggcttccaagtcgatgccattccagccaatggccagaccccggttcagaggaccatcagcccggatgtcagaagctatactattacaggtttacagccaggcactgactacaagatccacctgtacacgctcaacgacaatgcccggagctctcctgtggtcattgatgcctccacggccattgatgccccatccaacctgcggttcctgaccaccacacccaactccttgctggtatcatggcaggcaccccgtgccaggattactggctacattatcaagtatgagaagcctggatcccctcccagagaagtggtccctcggccccgccctggtgtcacggaggccaccatcactggtttcccatcaggtctggagccaggaaccgagtacaccatctatgtcatcgcactgaagaacaatcagaagagtgagcccctgattgggaggaaaaagacaggtaaagactcctaaccgaccgttggtttgcagggtgaagttctctacgttttgacacatcgctcctggatttttttttttctagcagaatggcttatatattgtactattaggcacaaatcacctaacatgctctaaaaatgtcttatttatttttctacagccttaagcttcttttaccttgcagaaattcaaattagattgtttgaattggggttgaggtgggggggggctttttaatggtgagagtaaaacctctccgatttgtswygakktgtttwttwtttgatttctgaacttcagatatttcagttagttgcaaaggcttaactggagcagagatggctgtctgtggggctcagcggttcaaagctttgtctgtatgagaattcaaactaacattttttcccccatctaaactataaagaaatctgtgaaaagaagaaaaaatccagatttctttctagagtgttctgtgatctgagaaccgctggctgtctgggagcattgatcgggttgatatacagttgttgcctggattgatggtgattggttgcttcttctttgagcttarmgcrmtywgmkwktkwgscyctawsskmkswmwwrgmyagatgagcttccccaactggttacccttycacaccccaatcttcatggaccagagatcttggatgttccctccacagttcaaaagacccccttcgtcaccaaccctgggtatgacaccgaaaatggtattcagcttcctggcacatccyaccaacaacccagtgttgggcaacaaatgatctttgaggaacatggctttaggcgaaccacgccacccactgcggccacccccgtcaggcttaggccaagaccatacctgccgaatgtagatgaggaggtccaaatcggtcatgttcccaggggagacgtagactaccacctctatcctcatgttccggggctcaatccaaatgcctctacaggacaagaagytctctctcagacaaccatctcttggacgccattccaggagagttctgagtacatcatttcatgccaacctgttggcactgacgaagagcccttacagktmyawrttmcrgmmcttmttaysagtgyswctctagatractgtgacatctagaagcgaccatagcttcgtgtcagatgcctaccctcccaggacagatagatggtacaactctggctggaggttgtttggctgttttctcatggtgactcagacagcatccctgagcttgcttgactcagtagagaaaatgaaattacttttgttattgttccacattggagacagatagatagaacagtgatcttcggaaaaaaaaaaaaaaaaa

SEQ ID NO: 1904 - DNA, 914 bp, Rattus norvegicus
aykcgksmccggctgccggacctcacggcgtgtaggaaaagcgacgatggagacaatgctgtcatcatcacggtggagaaggaccacttcatggatgccttcttccatcaggtggaggagattcgaagcagcatagccaggattgctcagcacgtggaggatgtgaagaagaaccacagcatcatcctctctgccccaaacccagaaggaaaaataaaagaagagctggaggacctgaacaaagagatcaagaaaactgctaacaggwtccggggcaagctgaaggctattgagcagagttgtgatcaggacgagaatgggaaccgaacttcagtggatctgcggatacgaaggacccagcactcagtgctgtcacggaagtttgtggacgtcatgacagaatacaatgaagcacagatcctgtttcgggagcgaagcaaaggccgaatccagcgccagctagagatcactgggaggaccaccactgacgaggagctggaggagatgctggagagcgggaagccgtccatcttcatctcggacattatatcagattcacagattactaggcaagctctcaatgagatcgagtcacgccacaaagacatcatgaagctggagaccagcatccgagagctgcacgagatgttcatggatatggccatgtttgtcgagactcagggtgaaatggtcaacaacattgagagaaacgtggtgaactccgtagattacgtggagcacgccaaggaagagactaagaaagccatcaaataccagagcaaggccagacggaarrwgwkswyhrtsykcwkckgygryrgtsrctkwsmttgctgatccttggmwytawtcatwggcwwsassrttgkcawakgattgcgtagatggcgctgggtgcttgcctctccctcagg

SEQ ID NO: 1905 - DNA, 1533 bp, Rattus norvegicus
atagagcgtcaggttggmkycsggagctccggctcctccggcggggctcggtatgaggctggcaaggctgctgcggggcggcacgagcgtcaggccgctctgtgccgtcccctgcgccagccgtagtctggcctcggactcggcctcgggctccgggccsgcgtcggagagcggcgttccgggccaggtggacttctatgcgcgcttctcgccgtcgccactctccatgaagcagttcctggacttcgggtcagtaaatgcttgtgaaaagacctcgtwcatgtttcttcgacaagagttgcctgttasattggcaaatataatgaaagaaataagtctccttcccgataatctwctcaggaccccatccgtacagctggtacaaagttggtatatccaaagccttcargagctgcttgactttaaggacaagagtgctgaggatgctaaaactatttatgaattcacagacacagtgataaggatcagaaaccggcacaatgatgtcatccccaccatggcccarggtgtgactgaatacaaggagagcttcggggtggatcctgtcaccagccaaaatgttcagtactttttggatcggttctacatgagtcgcatctcaattagaatgctactcaaccagcactctttattgtttggtggaaaaggaagtccatctcatcgaaaacacattggaagcataaatccaaactgtgatgtagtcgaggttattaaagatggctatgagaatgcgagacggctttgtgatttgtattacgttaactctcctgaactagaacttgaagaactaaatgcgaaatcaccaggacagccaatacaagtggtttatgttccgtcccatctctatcacatggtgtttgaactgttcaagaacgcaatgagggccaccatggagcaccatgcagacaaaggcgtttatcccccgattcaagttcacgtcacactgggggaggaggatttgactgtgaagatgagtgaccggggaggtggtgttccgctgaggaagatcgacagactcttcaactacatgtactcaactgcaccccggcctcgtgttgagacgtcccgtgcggtgcccctggmtggatttggttacggattgcccatatcacgcctctatgcacagtacttccagggagacctaaagctgtattccttrgagggctacgggacggatgctgtcatctatattaaggctctgtcaacggagtccatcgaaagactccctgtgtataataaagctgcctggaagcattacagaaccaaccacgaggctgacgactsgtgtgtgcccascagagarccgaaagacatkacgacgttccgaagstsgkaaskgcacatgggacgcctggcaaagccaaatgtggtttttgccmwacktggaagagaratgtatttggaaccacattgtaccaaawatgtcawgtgtgatttttcacaatcagtgtttgstaaagctcctaaaggatcaattawagcaactttattywrawawrwwwwrwwaaaaaa

SEQ ID NO: 1906 - DNA, 3359 bp, Rattus norvegicus
  misc_feature (495)..(495): n is a, c, g, or t
  misc_feature (3239)..(3239): n is a, c, g, or t
ggccggaggcctgcagagtggtcgcccgaggctccgctgttgctgcagctccgcggactcacggagatcgcgccggctctctgggaaactggagctggccaggactgtcgcttcgaagggaacgggccctcttcgtccttcgctggagccgcactggagccaccaaatgcgcctgggtgtgcagcaggcagaaagcaaggactaggcacctctagcccgtgggtgatccgaaggcctgcgcagggtgttcgagaccagtcttgactgagttctgggcatctccagcctctgggccctggagtagagtcagccctcctgcagtttctggagcaaccacaaatccamkwkgggatttytgttttcytcttgagcaaaccagagcytaaagattgktgctctgatgctggatttaaktcgtatatattttgagcgagttgggcctgtcctcattgttttktratctccgttttcgcgacagttctgcacacytgtatnccaattcttgtcgmtttggtctgcsgcgccsgcgtgggctcyttgacttgcaaataaaggggagcacaccgaagctcagagcttgggrcgatgtmccaaagcctggmtatggccgccaaccacgggccmccgccgggcgchtacgaagcggrtggacctggcgcmttcatgcacagtgcgsgcgccgmgtcytcgccmgtmwacgtgcccacwccgcgggtgccgtcvtstgtgctgggcmtgtcmtacbtgcagggcggaggcagtggtgctgcttctggagccacytcgggtggcagctccggggccrgcccgtcgggtgctgggcctgggacccagcaggrtagcccgggctggagccagkctggagctgagggagcsgcttacaccccaccgcctgtgtccccgcgcttctccttcccggrgactactgkktccytgkcgrcmgccgccgccgctgccgcakcccgggaagctgcagcctacagcagtarcggyggggcagccggcgctggcctggctggccgagagcagtacgggcgtccgggcttcgcakgctcctactccagcccctacccagcctacatggmcgatgtgggcgcatcctgggccgcagccgctgccgcctccgccggscccttcgacagcccagtcctgcacagcctacctggccgggccaaccctgckasacaccccaatctcgatatgtttgatgacttctcakaasgcagagagtgtgtcaactgcggggccatgtccaccccactctgkaggcgagatgggacaggacactacctatgcaacgcctgtggcctctaccacaagatgaatggtatcaaccggmccctcatcaagcctcagcgccggstgtctgcctcccgccgggtaggcctctcctgtgccaactgccagactaccaccaccacactgtggcgccgtaacgctgagggcgagcctgtttgcaatgcctgcggcctctacatgaagctccatggggttcccaggcctcttgcaatgcggaaggaggggattcaaaccagaaaacggaagcccaagaatctgaataaatctaagacaccagcaggtcctcctggcgagagcctccctccctccagtggtgcctccagcaactccagcaacgccaccagcagcagcagcagcagtgaagagatgcgccccrtcaagacagagcccgggctgtcatctcactatgggcacagcagctccatgtcccagacattcagtactgtgtccggccatgggtcctccatccatccagtgctgtcggctctgaagctctccccacaaggctatccatctcctgtcactcagacatcacaggccagctccaagcaggactcttggaacagcctggtcctggctgacagtcatggggacataatcaccgcgtaatcagcacccccttccctcttcaaattcctgctcggacttgggacctggggccagcaaagtaaaaggctggggcaccctggccagcccctctgtgtgggaacaactcctgaagaacaactggtagaacttgaagttgttgacaatcacttasggataagggtgctgggtttcttcaaatacctttccaggtggagcactggaagaagcctgcattctcacagaaaagcccaccttggctgcaagcacagcacagtgaggctcttcagtgagcaggagacttcttcctccttctctacctgcctgtccaggacagacacataatcttcaccccagctccccaccccagtggctgtggtgatgggtttttytttgtgatcctagagtggctgtagggaccgaggcttcaagacactgtctacagccggcgcagggtgtctacttgtggactagacatagcagccctgcccttgtccaacactccccttgaggcatggaacatctcatgtgtcccatacctgatctgactccaaagcgctgggtgcagtgcagatgttactgagtgcttcctggggggtttaggtgaggagaaggcacatcacccatcacacagatcgcagcccgtcagaggtgccttcccttcctctcccaggaacagcaacccccttgctctccagcctgaacatctcctaccctctgtaaaactagagcccagttgtacagcaggctaataccactaggtgctgttcccagcatccatttccacctcttcacacacaggggttccaaggaggaacaaaacctgctactaaagcagggttggtgaytgtgctcatctgcaccttgggaccctmtggaggttgtgtctacagcacaatcctgcccscaggactccagcttacttgctctgagcctgccaagccaagctctctcaagtcagacagttaactggctctgggactttctccagcacagatcctttgtctagaaaatacggactgtttgcaaamcraattcwgagcagaaacrmcaaagggaartttttgaargkacaaggrtratggmtggarsawgatgtccccagkcytgatgggacagccatgcttgcagttgtgctagaavtggcaacccstmtccmtcvwccaktabtggggctcccaaagattsttchktgtmttcatcacccacagagctgtagccarctgtggcattaccttgttttgcsscamrwkkccagcccsgcccstaaaccttactggcygtagcagrsamkagbtykgmacsargmttctgytstrakcmwybamgcyrwktctccytcaaggccgcyttcntatgcctccccctcctccacaacccgttaacattgtcttaaggtgaaatggctgtaaaatcrgtatttaamtamtaaatttatctgtattamwmwwdmmmwmaaaaaaaaaaaaaaaaaa

SEQ ID NO: 1907 - DNA, 1338 bp, Rattus norvegicus
attcgcggccgctgggggggcgctggctttggcccgctgcggaggatggtgaatctggagcccatgcacacagagatcaagatgagtggggatgtcgctgattccacagatgcccgcagcacttttggtcaagtggagtcaggaaatgatcgaaatggcctagatttcaacagacagattaagacagaggatctgggtgacactttgcacgagagcctctcccacaggccatgccacctgaccgaagggcctaccatgatgcctggaaaccaaatgtctggggacatggcttctctccatccacttcagcagcttgtgctggtccctggccacttacagtctgtatcccagtttctgctttcccagacccctcctgggcagcaaggtctgcagccgaatcttctctcctttccacagcaacagagcactctactcctcccacagacaggacctggcctcacctcccaggcagttggacgccctgggctgtcaggatcctctttagagccccacctggaagcttctcaacatctgccagggcccaagcatctgcctggccccggagggaatgacgaacccactgacctggaggagctggagaagttcgccaagaccttcaagcagaggcgcataaagctaggcttcacacagggggatgtgggattggcgatgggaaagctgtatggtaacgacttcagccagactaccatctcgagatttgaggccctcaacctgagtttcaagaacatgtgtaaactcaagccactgctggagaagtggytgaatgatgcagagtcctccccgkcagacccttcagcragcactcccagytcgtaccccactctcagcgaagtatttgrsargargargargaawcggaccagyatcgagaccaacatccscctgactttggagaagcgatttcaagataaccctaaacccagctcggaagagatttccatgattgcggagcagttgtccatggagaaggaagtggtaagagtctggttctgcaatcgacgccaaaaggagaagagaatcaactgccctgtggccacacctgtcaagccgcccatctacaactcccggctggtctctccctcagggtctctgggctccctctcagtccctcctgtccacagcaccatgcctggaacagtaacgtcatcctgttcccctgggaacaacagcaggccctcgtctcccggctcaggactccatgccagcagccccacggcatctcaaaataactccaaagcagcaatgaacccctcctccgccgcctttaactcctcagggtcatggtaccgttggaaccatcccgcctacctccactga

SEQ ID NO: 1908 - DNA, 2179 bp, Rattus norvegicus
cgctgtagtcattcctgtgtcctcttctctctgggcttctcaccctgctaatcagatctcagggagagtgtcttgaccctcctctgcctttgcagcttcacaggcaggcaggcaggcaggcaggacaggtttggggactctgtttacagctgtttatcccagagtctggtcggcctccacctgatgtggcaattgctggcagtgccacaggcttttcagccaggcttagggtgggttctgggacctgattaggtgagcaggaggagggggcagttagcatggtttcaatgttcagcttgtctttcaaatggcctggattttgtttgtttgtttgtttgttcctttgtccctttgtcctcccctgtcactcaggtctgcagccgaatcttctctcctttccacagcaacagagcactctactcctcccacagacaggacctggcctcacctcccaggcagttggacgccctgggctgtcaggatcctctttagagccccacctggaagcttctcaacatctgccagggcccaagcatctgcctggccccggagggaatgacgaacccactgacctggaggagctggagaagttcgccaagaccttcaagcagaggcgcataaagctaggcttcacacagggggatgtgggattggcgatgggaaagctgtatggtaacgacttcagccagactaccatctcgagatttgaggccctcaacctgagtttcaagaacatgtgtaaactcaagccactgctggagaagtggctgaatgatgcagagtcctccccggcagacccttcagcaagcactcccagctcgtaccccactctcagcgaagtatttggcaggaagaggaagaaacggaccagcatcgagaccaacatccgcctgactttggagaagcgatttcaagataaccctaaacccagctcggaagagatttccatgattgcggagcagttgtccatggagaaggaagtggtaagagtctggttctgcaatcgacgccaaaaggagaagagaatcaactgccctgtggccacacctgtcaagccgcccatctacaactcccggctggtctctccctcagggtctctgggctccctctcagtccctcctgtccacagcaccatgcctggaacagtaacgtcatcctgttcccctgggaacaacagcaggccctcgtctcccggctcaggactccatgccagcagccccacggcatctcaaaataactccaaagcagcaatgaacccctcctccgccgcctttaactcctcagggtcatggtaccgttggaaccatcccgcctacctccactgagaccaaaaacttcctcccgttccacctggccctggttcccaccaggaggaagagcggccacaccttccacgtatggacagacactttgagactcggagcgggagaaatggccgctgctgaagagcaaacccacaatcttgccttctcctggatccagagcttccagagaaccaagatgtgaccaaaggcgcacactcttgccttgggctcttgatcacccgctgggagtttaccgtgctcacccgtgaccgcttcatgctcacatgatggctcacctattggaaaggcattctgccattgttagttttcagctcaccggtgggattctgggacagccttttgctcgttgtgccaaactgcaagaagggtagttatggttttgactctgacctcagccacaatcctgaactgatccaaattctatgagaagactgaaatctcgtgtctctaccaaagccttattttgttaaattagcacagttttcttacagcatatccatttttgcccaactttcttttagaaattacttcccttttctacaacaaaacctgtctatccttaggtcctacaaagtcccttcctctctataaatggctaagctcccctctggccatgttgctccattcacgtgtactcttttgttgcccacatgttcccaagttcaagaacacttgttttttttctgttctctgtgggttttcttgtcctgtcccctctccttgctcctggccacagagaagtacacacactgtggccactttcttgtacatagtcctttcctactctgcactatgaccgttcatctttaatgtgtaatttcccagcgaaatgtttaactcaggtgtgcattttg

SEQ ID NO: 1909 - DNA, 2308 bp, Rattus norvegicus
ttttttttttttttttaatattttcaaaggggaggagattttccacaagaaaaggttgttttcatgtttgggatccaggaaagcatccaacggagtggaagcagtatgaaggaagagccgctgggcagcggcatgaacgcggtgcggacgtggatgcagggcgccggggtgctggacgccaacacagcggcgcaragcggggtgggtctggcccgggctcactttgagaagcagccgccttctaacctgcggaaatccaacttcttccacttcgtcctggccctctacgacagacagggccagcccgtggagattgagaggacggsctttgtggggttcgtggagaaggaaaaagaagccaacagcgaaaagaccaataatgggatccactaccggctccagctcctctacagcaatgggataaggaccgaacaggatttctacgtgcgcctcatcgactccatgacaaaacaagccatagtgtatgaaggccaagacaagaacccggaaatgtgccgagtactgctcacacacgagatcatgtgcagccgctgttgtgacaagaaaagctgtggcaaccgaaatgagactccctcagatccagtgataattgacagattcttcctgaagtttttccttaagtgtaaccaaaattgcctaaagaatgcggggaacccacgtgacatgcggagattccaggtcgtggtgtctaccacagtcaacgtggatggccatgtcctggcagtctctgataacatgtttgtccacaataactccaaacacgggcggagggctaggaggcttgacccctcggaagcagctactccctgtatcaaagccatcagcccgagtgaaggatggacgacgggaggcgcgactgtgatcatcataggggacaatttctttgatgggttacaggtcatattcggtaccatgctggtctggagtgagttgataactcctcatgccatccgtgttcagacacctcctcggcacatccctggtgttgtggaagtcacattgtcctacaagtccaagcagttctgcaaagggacaccaggcagattcatctatacagcactcaatgaacccaccatcgactatggtttccagaggttacagaaggtcattccccggcatcctggtgacccagagcgtttgccaaaggaagtgatccttaaaagggctgcagatctggttgaagccctgtatgggatgccccacaacaaccaggagattatcctgaagagagctgccgacattgctgaggctctgtacagtgtccctcgaaaccacaaccagctcccggccctcgctaacacttcggtccacgcagggatgatgggcgtgaactccttcagtggacaactggctgtgaatgtctctgaggcatcacaagccaccaatcaaggtttcacccgcaactcaagcagtgtgtcaccacatggatatgtgcctrgcascascccacagcagacsaactataactctgtcaccacaagcatgaacggctacggctctgccgccatgtccaatttgggcggctccccaaccttcctcaatggctcagctgccaactcaccctacgccattgtgccatccagccccaccatggcctcatctacaagcctcccctccaactgcagcagctcctcgggcatmttctccttctcaccagccaacatggtctctgctgtgaaacagaagagtgctttcgcaccagttgtcagaccccagacctccccgcctyccacctgcaccagcamcaacgggaacagcctgcaagcgatttctggcatgattgtccctcccatgtgaaagaattgccttgaagaattttattaatgaagaggytggatcctgmtacgaaagtaatctgacatgagtcccagagtggaacttttaactcaggcctttttaagaggaaatcacacaataactgcagatttttaaacaaagtcaccgaccttgcaaatactgagattggaaaggggacctgccagagcggggtgttggatagagtcggactccccgagtgtctgggggatatatttattctgtattgataaaaaaaaraamaarmmcaccttttctttttttctttctcttttctttctttaagcttaactctgcaaccatttgtcttttgtaaaccattaagctacacacaagggccactctaaataagactccatgttttaatttatgatgtttttaaagctatgtaaggggagaatgaagtggtgatatttacaaaaaaaaagaaaaaaaaagaaaaaagaaaaaaagctaaaaaaaaaaaaaaaaa

SEQ ID NO: 1910 - DNA, 1670 bp, Rattus norvegicus
agacaaccggaagccagtaaacagaagagcaggtggagaggagagacttctgtcacaccgtccaagacatcagtagcagcgagaggaaaaccagctaagctgagtcgcaatcctagtagctgggagtatcaagtgagtcgcagccccaaggcacgcccggcatgatttttttatttttagtcgaaacaggatggtctcgaactactgacctcaggtgatccacacgcctcggcctcccaaagcactgggattacaggcgtgagcgaccgggcggggcctccatatccattcttgggaacacttgttgcttagctgtgatgcaggaaatggatgaagatgaagtcagagaaatcgagaaccacatcttggttgttccagagtcacgaagtgaccgagattctggggagagtgaagaagaataggaagaagttggtgaagggactccacagagcagggcccccaccggagaagaactatcttcctgactctccagcactgtcacccatcgagcttaaacaagaactgcccaaatacctgccagccctgcagggatgcaggagtgtagaggagtttcaatgtctgaacaggattgaagaaggcacctatggggtggtctacagagcaaaggacaagaaaacagatgaaattgtggctctgaagcggctaaagatggagaaggagaaggaaggcttcccactcacgtcgatcagggaaatcaacaccatcctcaaggcccagcaccccaacatcgtcaccgtcagggaaattgttgtgggaagtaacatggacaagatctacattgtgatgaactacgtggaacatgacctcaagagcctaatggaaactatgaagcagcccttcctgccaggggaggtgaagaccctgatgattcagctgctgagtggggtgaaacacctccatgacaattggatcctacaccgtgacctgaaaacctctaacctcctgctgacgcatgctggcatcctcaaggtgggagactttggactggctcgggagtatggttcacccctaaaggcctacactccagttgttgtaaccctgtggtatcgtgccccagaactactgcttggtgctaaggaatactccacagcctgtgacatgtggtcggtaggctgcatatttggagaactgctgacacagaaacccctgttccctgggaagtcagatattgatcagataaacaagattttcaaggacatcggtactcctagtgagaaaatctggcctggctatagtgagctcccagccgtcaagaagatgaccttcagcgagctcccctataacaacctccgcaaaagatttggggctttgttatcagatcaagggtttgatctcatgaacaagttcctgacatactaccctggcaggaggatcaacgcagaagatggcctcaaacacgaatatttccgagagactcccctccccatcgacccatccatgttccccacgtggcctgccaagagtgagcagcagtgtgtgaagcgaggcacgagtccaaagcctcctgagggggggctggggtacagccagctgggtgatgatgacctgaaggagacggggttccacctcaccaccaccaacgacggagccgtcagctgtaggccatggtgtagcctcttgttctgagagggcggcttgatgaggaggcc

SEQ ID NO: 1911 - DNA, 1531 bp, Rattus norvegicus
ggccagccagcttcatcacttttgtaaactgcatgtactttctgagcatatttattcagttgaaaagacaccctgagcgcaaatatgagcttaaggagcccacggaggagcaacagagattggcagccaatgaaaatggcgaaataaatcatcaggattcaatgtctttgtctctgatttctacatcagccttggaaaatgagcacacttttcattctcagctcttgggggccagccttactttgctcttatatgttgcactgtggatgtttggggctttggctgtttctttgtattaccctttggacttggtttttagcttcgtttttggagccacaagtttaagcttcagtgcattcttcatggtccaccattgtgttaatagggaggatgttagacttgcgtggatcatgacttgctgcccaggacggagctcgtattcagtgcaagtcaacgtccagccccccaactctaatgggacgaatggagaggcacccaaatgccccaatagcagtgcggagtcttcatgcacaaacaaaagtgcttcaagcttcaaaaattcctcccagggctgcaaattaacaaacttgcaggcggctgcagctcagtgccatgccatttatttacctttgaactccacccctcagcttgataatagtctgacagaacatttaatggacaatgatattaaaatgcacgtgccgcctttagaagttcagtttcgaacaaatgtgcactcaagccgccaccataaaaacagaagtaaaggacaccgggcaagccgactcacagtcctgagagaatatgcctacgatgtcccaacgagcgtggaaggaagcgtgcagaacggcttacctaaaagccggctgggcaataacgaaggacactcgaggagccgaagagcttatttagcctacagagagagacagtacaacccaccccagcaagacagyagcgwtgcttgtagcacacttcccaaaagtagcagaaattttgaaaagccagtttcaaccactagtaaaaaagatgcgttaaggaagccagctgtggttgaacttgaaaatcagcaaaaatcttatggcctcaacttggccattcagaatggaccaattaaaagcaatgggcaggagggacccttgccggtaccgatagcactggcaatgttaggactggattatggaaacacgaaactactgtgtaacattgctgggcttcctaggcagaattcatataaactgtgatactcacattccttgaagctatgagcatttaaaaactatttacagccagcatagggattcaaaaggatttagaataaactttgaagttttggattttacttatttttatccccaaattgttgctattttttaggatctgaaacaaaatctttctaaaacattgttttagttgtcaaagcaccaacaggacattttgggatgtgaaatgtaatttcttggaatctgtaaattgtacttaatatttcaggcttgtatttaatataataaataggtgtttgttaaaaaaaaaa

SEQ ID NO: 1912 - DNA, 3004 bp, Rattus norvegicus
  misc_feature (2923)..(2923): n is a, c, g, or t
gttgcccaaagaaataaatgcattgggaactcagtgtgcaggtccatgccaccaagagaacattacttctggtgatcgtcttctcccaagctccacagtttagctttgtttcagtgccggcggatcgtctccaagactcgactatgcggtccctgctgctcctggcctcgctggcctggcttcttctggcccaggcgaaggacgacgccaagctggaggacaaccttttggtcctcaccgtggccacaaaagagacagagggcttccgccgattcaagcgctcagcccagttcttcaactacaagatccagtcactgggcctgggggaggactggagcgcggccgggggaccatcggcagcaggtggaggacagaaggttcggctgctgaagaaggcactgaaaaagtatgcagacaaggaagacytggttattctcttcgttgacagctatgacgtggtgtttgcctcgggaccccgggaactcttaaagaagttccagcaggccaagagccgggtggtcttctcagcagaggagcttatctamcctgaccggaggctggaggccaagtatcccacagtccccgatggcaaacgattcttgggctctggaggcttcattggttatgctcccagcctcagcaaactggtggccgagtgggagggccaggacaatgacagcgaccagctcttttataccaagatcttcttggacccggagaagagggagcaaatcaatatcagcctggaccatcgctgccgaatcttccagaacctggatggagccttggatgaagttgtactcaagtttgaaatgggccacgtgagagcccggaatctggcctatgacaccctcccagtggtcatccacggcaacgggcccaccaagctgcaggtgaactacctgggcaactacattcctcgattctggaccttcgaaacgggctgcaccgtgtgcgacgagggcctgcgaagcctcaagggcattggggatgaagctctccctaccgtcctggtcggtgtgttcattgagcagcccacaccattcctatccttgttctttcggcggctgctgcacctacgataccctcagaaacagatgcggctcttcattcacaaccaagaacagcaccacaagcttcaggtagagcagttcctggcagagcacggcggtgagtaccagtctgtgaagctagtgggtcccgaggtacgcatggccaacgcagacgccaggaacatgggcgccgacctgtgccgccaggatcaaacatgmacytactacttcagtgtggatgctgacgtggccctgaccgagccgaacagcctacggctcctgattgagcaaaacaagaatgtcattgctccactcatgacccgtcacgggaggctctggtccaacttctggggggcactgagtgcggatgggtactacgcccgctcggaggactacgtggacatcgtgcagggccgtcgtgttggcgtctggaatgtgccttacatctcaaacatctacctgatcaagggcagtgccctgcgggccgagctgcggcacgtagacctgttccactacagcaagctggatcctgacatgagtttctgcgccaatgtccgacagcaggaggtgttcatgttcctgaccaaccggcatacctttggccacctgctgtcgctggataattaccagaccacccacctacataatgatctctgggaggtgttcagcaaccctcaggattggaaagagaagtacatccacgagaattacaccaaggccctggcagggaagctggtggagacgccttgtccggatgtctactggttccccatcttcacggaggtggcctgtgatgagctggtggaggaaatggaacactacggccaatggtctctgggtgacaataaggacaaccgtatccagggtggctatgaaaacgtgcccactattgacatccacatgaaccagatcaccttcgagcgggagtggcacaagttcctggtggagtacatcgcccccctgacagagaagctgtaccccggctactacaccaaggcccagtttgatctagccttcgtcgtccgctataagcctgatgagcagccttccttgatgcctcaccatgacgcctctactttcaccatcaacatagccctgaacagggttggggaagattatgagggtggaggttgccgatttctacgctacaactgctccgtgagagccccaaggaagggctgggccctcatgcaccccgggcggctcacacactaccacgaggggcttcccactaccaagggtacccgctacattgccgtgtccttcgtcgatccctaactgcttgcccagtgcctgcttccattcgacctatctcttcattgacaaccactgcctagcagcctctggggccaaggaacccaatccgrcckmkgattcctgaattcctgktgctcttgaagctgccasttgraaggattgggtgcaggccagaaatggggcaccccctccaagactgggsctgcccgtggtgctcccaccagtctccggagatggtagcaatgtttatcttcctggagttcctaacctcccttyttcwctgactttccctggggccagacytctgctggagagttcctgragagtcagaagctttgcctagaggacttctagaagagctagcccccgggatcctgtttcaagattcartgccmccaagatctgggtcaaccaacttaccccaacttcacccctgcctggactgttgatacgctctyttccaggtttwtatcaccggagcaartarttgtctmtattgrgactataactcgaaatcctcccggaggggcaggaavgacatctgtgacaatgcttggctcgctgctgaccytgcttgagggaggggcacatrtycacactdyamtagkkcaccntgccccgatkcctgtggggacagggacagagatgagagttytaktaaatwktgttcmahccmmaaaaaaaaaaaaaaaaaa

SEQ ID NO: 1913 - DNA, 3403 bp, Rattus norvegicus
taacagaaagtttctccggtctagcatctggatgaaaggaactgctggggtcatgaatgcctcgtgcyttctctctgctctcacctttgttctcctcattggaragagcatagcttggtactacaatgcctccagtgagctcatgacatatgatgaagcaagtgcgtattgtcaacgggactacacacatctggtggcgattcagaacaaggaagagatcaattacctaaactccactctgaggtattcaccaagttattactggattggaatcagaaaagtcaataatgtatggatctgggtggggacccagaagcctctgacggaggaagctaagaactgggcgccaggtgaaccaaacaacaaacaaagaaacgaggactgtgtagagatctacatccaaagacccaaagactccggcatgtggaatgacgagagatgtgacaaaaagaaactggctctgtgttacacagcttcctgtaccaacacatcctgcagtggtcacggtgaatgcgttgagaccatcaatagttatacctgcaaatgtcaccccggcttcctgggacccaagtgtgaccaagttgtgacctgccaagaacaggaataccctgaccatggaagcctgaactgcacccacccattcggcctcttcagctataattcatcctgctccttcagctgtgaaaggggctatgtgcccagcagcatggagaccacagtgyggtgtacrtcctctggagagtggagtgcacctgctcctgcctgccatgtggttgaatgtaaagctttgacccaacctgcccacggagtcaggaaatgttcctcaaatcctgggagctacccatggaatacaacgtgcacgtttgaytgtgaggaagggtacaggagagttggagctcagaatctacagtgtacctcatccggtgtctgggacaacgagaagccatcgtgcaaagctgtgacctgtgatgccatccctcggcctcagaatggctctgtgagctgcagcaactcaacggctggagcgcttgcctttaagtcttyctgtaattttacctgtgagcacagtttcacattgcagggcccagcccaggttgaatgcagtgcacaagggcagtggacaccacaaatcccagtgtgcaaagcttcccagtgtgaagccttatctgcaccacagcgaggccacatgaaatgtcttcccagtgcctctgcacccttccaaagtgggtccagttgtaagttctcctgtgacgaaggatttgaattgaagggatcaagaaggcttcagtgtggtccaagaggggagtgggacagcgaaaagcccacatgtgcaggggtacagtgttcaagccttgaccttccaggaaagatgaacatgagttgcagtgggccagcagtttttggcacggtatgtgaatttacatgtcctgagggttggacactcaacggatcttcaatcctgacatgtggtgccacaggacgctggtctgcgatgctgcctacttgtgaagccccagccaaccctccccgtcccttggtagtggcactytctgtggcagcaacctcacttctgacattgtcctcattgatctacgtgttgaagagattcttttggaagaaagcaaagaaattcgttcctgctagtagctgccaaagtcttcaatcgtttgaaaactatcaagggccttcttacatcatytaagwtgcragcaatcaggaacacaaatgcatcatgggaaatagaacgatatactgaagacagcaggaaatgaactgtctgcagaatcctggtctctcttgcctgcttaaaaactgggatcctgactccatggatcgaagctgagcgacaaggccagccctctaccagaatgactacgtttgctccttcctagttagtggcaatatccaccatgtgctgctacaggaggtggaggctctctcttcaaaagagagtgaatagaccaggggcctgggacagcagaattcctcctgactcttcgtcactctggaatttgggacagaaacagcatttggttgcattgttcttctctcattccccacacagtgtgtcaagagctagttccagtattgttgtcacagggataaataatatttatcagcagtttttgaacagacaaatttctatttctatcttggaaaaaaaaaggcaaatttgccacattctcaggttatggctaggggtgtcattatggttcaaatcctgctgagtattacatggtaagccttactggctttatccctgtggatttggtggcctctgaagtattcttgaacattgtgttctgtgtcctggcattgagtccagcataatgtccgttattcttagttcagtgcaaaaagacttaaaaagtcagaatcctgtggcccatcacaaggcaaaggttatcctaaatctctttttgattagaaaatcccaggattatatctgcaataaacctattttcaagatgagacattaataatcagtgtgaaattctgagtatttaatggtagctggttttcagacatggtactatcaaaaggatagaaagtaaagagagtgtatatctggggttcccagcccacccccagtgttttttttctggaagaaaaaacatccttgaagccaaatgttctgatttaataaaagcataagtcataaaagtacatcttaaagtatttttaagagcctgtcaaagcgtgaatgtgctttgattcctaaaagagtggttcttatacatggcaaatatattcttgtatattgtattcgattctaaatccgtggtgagtattcaccctctaatagatggacaaaagcagtggacttttaaagaccaaaggtgtctacgagttattctgttctggttcacaagttctagagaaggggaaagcttgtgtgcacaatgattatgcagagattaaaattcctaaacaatttcacctgtagctggcagtgacaaacgcttggtcaataagtgccagaactgttcctgcacaaagtgtcccaacttctgaattaactcgttaaagaaatttcttgaaaggtccttgctgattggggttggtgggaaaagccaacagtgaacaggaagtgataagcattagaatgaaaggggagagaggaataagtgacagcaagagagagagagagagagagagagagagagagagagggagagagagagattgagactgtgaggaaccacacaatgtaaatggttgtatattttgtattagaaattactgtgtgaaatatatatgtagtctgtatctgagttctaatagaatattttaaattatgatttaaaatattttatggtgtaagagtatgtatttatttaaatatattaaacttattgtattcacatgttagtatgttttggcaataaatgtgtttctactt

SEQ ID NO: 1914 - DNA, 1389 bp, Rattus norvegicus
atggttcactccagcatgggggctccagaaataagaatgtctaagcccctggaggccgagaagcaaagtctggactccccgtcagagcacacagacactgaaagaaatggacccgacattaaccatcagaacccccagaacaaagcgtccccattctctgtgtccccaactggccccagcaccaagatcaaggctgaagaccccagtggtgattcagccccagcagcacccccgcccccccagccggctcagcctcatctgccccaggcccaactcatgttgacgggcagccagctagctggggacatacagcaactcctccagctccaacagctggtgcttgtccccggccaccacctccagccacctgctcagttcctgctgccacaagcgcagcagagtcagccagggctgctaccaacgccaaatctattccagctacctcagcaaacccagggagctctcctgacctcccagccccgggctgggcttcctacacagccctcgaaatgcttggagccaccatcccacccggaggagcccagtgatctggaggagctggaacagttcgctcgcaccttcaagcaacgccgcatcaagctgggcttcacacagggtgatgtgggcctggccatgggcaagctctatggcaacgacttcagccaaacgaccatttcccgcttcgaggcccttaacctgagcttcaagaacatgtgtaaactcaagcccctcctggagaagtggctcaacgacgcagagactatgtctgtggattcaagcctacccagcccaaaccagctgagcagccccagcctgggtttcgacgggctgccggggcggagacgcaagaagaggaccagcatcgagacgaatgtccgcttcgccttagagaagagtttcctagcgaaccagaagcctacctcagaggagatcctgctgattgcagagcagctgcacatggaaaaggaagtgatccgcgtctggttctgcaaccggcgccagaaggagaaacgcatcaacccttgcagtgcggcccccatgctgcccagcccgggaaagccgaccagttacagcccgcacctggtcacaccccaagggggcgcaggaaccttaccattgtcccaagcttctagcagtctgagcacaacagttactaccttatcctcagctgtggggacactccaccccagccggacagcaggagggggtggcggtgggggcggagccgcgccccccctcaattccatcccctctgtcactcccccacccccggccaccaccaacagcacaaacccgagccctcaaggcagccactcggctatcggcttgacgggcctgaaccccagcgcaggccctggcctctggtggaaccctgccccttaccagcca

SEQ ID NO: 1915 - DNA, 2263 bp, Rattus norvegicus
agggagattctgaatccccctgagaaagaaacacaaggtgaggggcccagcctgttcatggccagcaccaagaccgaagcaattgccccggcatccaccatggaagacaaggaagaggatgtggggtttcaggataacctctttcttgagaaggcgctgcagctcgccaagcggcatgccaacgccctcttcgactacgcggttacgggagatgtgaagatgctgctggcggtacagcgccatctcaccgcggtgcaggatgagaacggggacagtgtcctacacttagccatcatccaccttcatgctcagctcgtgagggatctgctagaagtgacatctggttcgatctctgatgacatcatcaacatgagaaacgatctgtatcagacacctttgcacttggccgtgatcaccaagcaggaagatgtggtggaggacttgctgagggttggggctgacctgagtcttctggaccgmtggggcaactctgtyctgcwcctarctgccwaagaaggacatgataaaatcctcggggtcctactcaagaacagcaaggcagcactccttatcaaccaccccaacggggaaggkstgaatgccattcacatarctgygatgagcaacagcctgtcatgtctgcagstgcttgtggctgctggggcagaagtcaacgctcaggagcagaagtctgggcgcacggcactgcacctggccgtggagtacgacaacatctcgttggccggctgcctgctcctggagggtgacgccctcgtggacagcaccacctacgatgggacgacacctctacacatagcggctggaagagggtccaccaggctggcagctcttctcaaagcagcaggagcagaccccctggtggagaactttgagcctctctatgacctggacgactcttgggagaaggctggagaagatgagggagtagtgccaggcaccacacccctggacatggctgccaactggcaggtatttgacatactaaatgggaaaccatatgagccagtgttcacatctgatgacatactcccacaaggggacattaagcagctgacagaagacacgaggctgcaactctgcaagctcttggaaattcctgatcccgacaagaactgggccactctggcgcagaagttaggtctggggatattgaacaatgccttccggctgagtcccgccccttctaaaactcttatggacaactatgaggtctctggggggaccatcaaagagctggtggaggccctgcgacagatgggctacacagaggccattgaagtgatccaggcagccttccgcaccccggaaaccacagcctccagccccgtgaccactgctcaggcccacttgctgcctctctcgtcctcctccacaagacagcacatagatgagctccgasayrakgacagcgtgtgtgacagtggtgtggagacatccttccgcaaactcagcttctcggagtccctcactggagatggcccactgctatctctgaacaaaatgcctcacaattatgggcaggawggacctatagaaggcaaaatttagcctgctggcggttccccacactgtaaaccaaagccctgaaaggccatcatatcgttccgaaggagaaggcaaaaaacgcatcccaaggtgctggaaggtcaccggcctgcagggtcaatcttgatgtcattcgaggccttccgaatttggcttcctttcttggctctgaaatgaawtttagttgtcatatacagatggtgtctagcaatcacggctgcactcggtrtggcttggggtatgktggcttgagcttttccagytgctwttggattacacttgctbtgwgttgtcamtgctgtccmtvtgctgggtccccgctkycatwaaggtatcgcagtcmccacmtggtgttctttctagccatytacagtacagtcatgcactcaaattaagrttaaggaaaamgatatttttaagtgagtaacttcatgcvcaataaaaaaaagacatggctttttytaawrwrrwhwawmwrwratttaaaaaaaaaaaavmmawraacttaacaatatttaaaacctgctacaatcagtgctgaaaatagtattttcccccttttctgcattttactattgtaaatatgttttctaaatcaaatactttaaaagamgaaatgttggatttataaatgctattttttattttacttytataataaaagyacaagcacactgttrammwmaaaaaaaaaaaa

SEQ ID NO: 1916 - DNA, 1442 bp, Rattus norvegicus
  misc_feature (1208)..(1208): n is a, c, g, or t
  misc_feature (1414)..(1414): n is a, c, g, or t
ctttagagccaggtacggacgcggcgggarytcsgcacsagccaccymrgccswcgctgccarcscygtggcrrrgcwrmygcaggagccctggctgtggctggggggcagtgggccatgccaggggcagtggaaggccccaggtggaagcaggcagaagacattagggatatttatgacttcagggatgttctgggcacgggtgccttctcagaagtgatcctggcagaggacaagaggactcagaaactggtggccatcaaatgcattgccaagaaggccctggagggcaaagaaggcagcatggagaatgagatcgccgtcttacacaagatcaagcaccccaacattgtagccctggatgacatctatgagagtgggggccacctctacctcatcatgcagctggtttcaggtggagagctgtttgaccgaattgtggagaaaggakkctacacagaacgggatsssagccgcctcatcttccaggtgctggatgctgtcaagtacctgcacgacctgggsattgtgcaccgggatctcaagccagagaacctgctatactacagtctggatgaagactccaaaatcatgatctctgactttggcctctccaagatggaggacccaggcagtgtgctctccacagcctgtgggactccaggatatgtggcccctgaggtcctggcccagaagccctacagcaaggccgtggactgctggtccataggagtcattgcctatatactgctctgtggctacccgccgttctatgatgaaaatgatgccaaactttttgaacagattttgaaggctgagtatgagtttgactctccttattgggacgacatctctgactctgccaaagatttcatacgtcatttgatgragaaagacccagagaagaggttcacctgtgagcaggccttgcagcaccchtggattgcagkagacacagctytggataagaatatycaccagtcagtgagtgagcagatcaagaagaactttgccaagagcaagtggaagcaagctttcaayvskassgctgtggttcggcacatgaggaagctgcagstgggcaccagccaggagggacagggacagacagytasccacggagrgytgstgacacccacagytggggggccagcagmtggmtgctgctgtcgagaytgmtgtgtggagscaggctcagaactgccccntgcaccacccccaagctbtasggccatggaytgmacatcaaggagtcagggtttygyccgtgaggggttggaggcagcctgcttcctcctcaccccagaactggggagtttctgaccccatacttcttccctcccctctcactcttcactgcattttccatacaaatgtttctattttattgttccttcttgtaataaagggmagntwrwvcmramhwvwwaaaaaaaaaaaaa

SEQ ID NO: 1917 - DNA, 443 bp, Rattus norvegicus
atggcactctgggtgactgcagtcctggctctcgcttgccttggtggtcttgccaccccagggccagtgcggagatccacatctccccctgtggccctcagggagcttatcgaggagctgagcaacatcacacaagaccagaagacttccctgtgcaacagcagcatggtatggagcgtggacctgacagctggcgggttctgtgcagccctggaatccctgaccaacatctccagttgcaatgccatccacaggacccagaggatattgaatggcctctgtaaccaaaaggcctcggatgtggcttccagccccccagataccaaaatcgaagtagcccagtttatatcaaaactgctcaattactccaagcaacttttccgctatggccactgaggggagaccggccctggacatctcagctgtggacctcagttgtggat

SEQ ID NO: 1918 - DNA, 1910 bp, Rattus norvegicus
gtccaagggtccatgtggtaagcagactgaaccgtcctagataccaaagagggacaccttgtgggtgggtagcatgggcttcgaagacctgctggacaaggtgggcggctttgggcccttccaacttcggaatctggttctgatggccctgccccgaatgctgctccccatgcactttctcctgcccgtcttcatggccgctgtgcctgcccaccattgtgccctgcccggtgcccctgccaacctcagtcaccaggacttatggctggaagcccatctaccccgggagactgacggcagctttagctcctgcctccgatttgcctatccccagactgtccccaatgtcactttggggacagaggtgtccaactctggggagcctgagggtgagcccctcacggtgccctgctctcagggctgggagtacgaccgctcagaattctcctccaccattgcaactgagtgggatcttgtgtgtcagcagagaggactgaacaaaattacgtccacctgcttcttcattggtgtgctggtgggagccgtggtgtatggatacttgtctgacaggtttggcaggcgccggcttctgctggtggcctacgtgagctccctggtgctgggtctgatgtctgcagcctccatcaactacatcatgttcgtagtcacccgtacactcaccggctcagccctggctggcttcaccatcattgtgctcccactggagttggagtggctggatgtggagcaccgcactgtggccggggtcatcagcaccgtcttctggtcgggaggcgtgctgctgctggcactggtgggctacctgatccggagctggcgctggcttctgctggctgccaccctgccgtgtgtcccaggcatcatcagcatctggtgggttcctgagtctgcacggtggcttctaacccagggtcgtgtggaggaggcaaaaaaatacttgctgagctgtgccaagctcaatgggcggcccgtgggtgagggcagcctgagccaggaggccctgaacaacgtggtcaccatggaaagggcgttgcaaagaccctcatacttagacctgttccgaacatctcagctccgacatatctcactgtgctgcatgatggtgtggtttggagtgaacttttcctactacggcctgactctggacgtgtctgggctggggctgaacgtgtaccagacacagctgctgtttggggctgtggagctcccctccaaaattatggtctacttccttgtgcgccgtctgggacgccgtctcacggaggctgggatgctgctgggcgctgctctgacctttggcaccagcctgctggtatccttggagactaagtcatggatcactgctctggtggtggtggggaaagctttttctgaagctgcttttactacggcctacctgttcacgtccgagttgtaccctactgtgctcagacagacaggattgggacttactgcactcatgggcaggctaggggcctctctggcccgactggcggccttgctggatggagtgtggctgttgctgcccaaagttgcttacggggggattgccctggyssctgcctgcactgcactcctgctgcctgagacgaaraaggcacagctgccagagaccatccaggatgtggaraggaaragtacccaggaggaaratgtgtaggtccgggactgagttggactagcgacagttctccacaggagctgggcacaraaggcagcctyttgtgaytgggacatcagactcctccacctaaggatggagctgctcctgawgccctctgcctgtgctctccagcagcagaacaacttcccgcagcactgggccgctgggattctggactcccctctcatggccgggggcttctataaataaagacggttgctcatgg

SEQ ID NO: 1919 - DNA, 6878 bp, Rattus norvegicus
gccggggctgctaactgaagaggccatggacgcgctcgagtcgttgttggacgaggtggccctggaggggctcgacggcctgtgcctgcccgcgctgtggagccgcctggaatcccgctcgcctgccttccctttgccgctggaaccctacacgcaggagtttctgtggcgggccttagtcacgcacccgggcatcagtttctacgaggagccgcgagagcgacctgacctgcagctccaagaccgatatgaagaaatcgacttggaaactggaattttggagtccaggagggacccagtcactctggaagatgtctaccccattcatatgatcttagagaataaggatggcatccagggctcctgccgatactttaaggagagaaaggacatcaccagtagcatcaggagcaagtgtttgcagcctcgttgtacaatggtagaagccttcagcaggtggggtaagaagctcatcattgtggcttcccaggacatgcgataccgggccttgataggcctagagggggatcctgatctgaagcttcctgatttctcctactgcattttggagcggttaggtcgatcgagatggcaaggggagctgcaacgagaccttcacaccaccgctttcaaggtcgacgctgggaagcttcattatcacaggaaaattttgaacaagaatgggctcattacaatgcagtcacacgtgatccgactgcctactggagcccagcaacactccatcctcctcctccttaaccggtttcatgtagacaggaggagcaagtacgacatcctcatggagaagctgtctatgatgctgagcacacggagcaaccagatcgagactctgggcaagctgagggaggagctgggactgtgtgaaaggacgttcaagcgtctgtaccagtacatgctgaatgctgggctggccaaagtggtgtcccttcccttgcaggagattcaccctgagtgtggtccctgtaagaccaagaaagggactgatgtcatggttcggtgccttaagctcctgaaggagttcaggcgaaagatggaagacgaccatgacgacgatgacgatgaagaggccatctccaaggctgtacctcccgtggacatcgtgtttgagcgggacatgctcacgcagacctacgagctcattgagcgcagaggaacgaaaggaatttcccaagctgagatccgagttgctatgaatgtgggaaaactggaagcaagaatgctgtgtcggctccttcagaggttcaaggttgtcaagggattcatggaagatgaaggccggcagaggaccaccaagtacatttcctgtgtatttgcggaggagagtgacttgagccgccaatatgcgcgtgaaaaggcccgaggagagctgctaaccactgtgagcctcgcctcagtgcaagatgaatccctcatgcctgagggtgaagaggccttcctctctgactccgaaagtgaggaagagagcagctgcagtggcaagcgtaggggccgagggtcccgggggcattcaagagcctctggggatgctgggcctggctctcggcctcatcactccactccagccaagggcgggtggaaagtcctaaatctgcacccattaaagaagcccaaaagtgccgctgtggaaagatcccgccgaagctctgcttgtagggatggcctggacaccagcagctcatccgagctcaatataccctttgaccctcacagcatggacagtcacagtggtgacatcgctgtgattgaggaggtccggcttgataaccccaaggagggtggtggctcccagaagggcggacggcatggctcaggccaggacaagcctcacaaaacataccgactgctaaagcgcagaaatctgattatagaagctgtcaccaacctccgcctgattgagagcctgttcacgattcagaagatgatcatggaccaggagaagcaagagggtgtctccaccaaatgctgtaagaagtccattatccgcttggtgcggaacctgtctgaggagggtctcttgagattgtataggactacagtcattcaagatggcatcaagaagaaggtagacctggtcgtgcacccttccatggaccagaatgaccctcttgtgagaagtgctattgagcaggttcgcttccggatctccaactcaagcacagcaaacagggttaaagttccaccggccccagcaccccaagaggaagcagaagagggaaaccaagaaccagaggtcccaagtagatcagcagactctgaagcgaacacatcctcgaagccagaaagcacacgggtgaaaaagacagatgagaaaatgggcataaccccactcaagaattacaaacctgtcatagttcctggacttgggcgctccatagggttccttcccaagatgccacgccttcgggtgatgcacctgttcctgtggtacctggtgtatgggcatcctgccagccacactggggaacagcctactttccacagtgagaggaaaacaggcaagcaggagcccagcagaccaggggtccagccctcctcaggagatgactgggactcctctgaagccaaaaacagcacagaaagcagctcctgggaggcagaaatggaactctccacagagagagtgtatgtggatgagatctcatggatgcgctacgtccctcccatccccatccacagagacttcggctttggctgggctcttgtcagtgacattcttctctgccttcccctctccatctttgtccaagttgttcaagtcagctacaaggtggataacctggaggattttctgaatgaccctctgaagaagcacacactgatccgcttcctccctaggcacatccggcagcagctactgtataagaggcggtatattttctcggtggtggagaacctgcaacggctgtgctacatggggctgctacagtttggacccacagagaagtttcaggataaagaccaggtctttgttttcctgaagaagaatgcagtcattgtggacaccaccatctgtgacccacattacaacctggcccacagcagccggccttttgagagacgtctctacgtcttggattccatgcaggatgtggaaagctactggtttgacctgcagtgtatctgcctaaacaccccactaggtgtggtgcgttgtccatgtgcacagaagatctgccctgatccgggcagtgacccagaaggcagcttgcggaaggagcaagagagcgccatggacaagcacaacctagagcgcaagtgtgccatgctggagtataccacggggagccgagaagttgtggatgaaggcttagtccctggggatggactgggagctgctgggctggactctagcttctatgcacacctgaagcgcaactgggtctggaccagctatatcatcaacaaagccagaaagaacaacacctccgaaaatgggctcacaggaagactccagactttcctgtctaagcgcccaatgccacttgggtctggaggcagtggccgtctgcctctctggtcagaggggaaagctgatgctgagctctgtgctgacaaagaggaacactttgaactggaccgagaacctacccctggcaggaaccgaaaagtgcgtgggggcaagagtcagaagcggaagcggctgaagaaggagcccatcaggaagaccaagcgaaggagaagaggagagcatccagaagccaaaagcaaaaaactacgctaccaagatgaggctgaccagaacgccctccggatgatgacccggcttcgggtttcttggtccatgcaggaggatgggttactaatgctctgccgaattgccagcaatgtcctcaacaccaaggtgaaaggaccatttgtcacctggcaggtcgtgcgtgacattttgcatgctacctttgaagagtctttggataaaacatctcactcggttggacgaagagctcgctacatagtcaaaaatccccaggcctttatgaactacaaagtctgcctggcagaagtgtaccaagataaggcactcgttggrgatttcatgagtcggaaggataactacgaagacccaaaggtctgtgccaaggagtttaaagaatttgtggagaagctgaaagagaagttcagctctggcctgaggaaccccaaccttgagatcccagacacactgcaggaactctttgccaaataccgggtgttggcaatcggagatgaaaaggaccgtgtcaggaaggaggatgaactgaatagtgtggaggacatccacttcctggtgctacagaacctgatccagagcacactgtccctctctaacagccagtccaactcttgccagtccttccagatcttccgcctctaccgggagttccgggagcctgtgctggtgcgggccttcatggagtgccaaaagaggagcctggtcaaccgacgccgtgtcagccactcccagggtcccaagaagaaccgtgctgtgccctttgygsccrygtccyaccagmtctssyagtcatactacaagcttttcacctggcgatttcccaccaccgtctgcaccgaatccttccagttctatgacagactacgggccaacggcatactagaccagcctgatcatttttytttcaaggacatggatagcaatgacccttcaagtgacctggtggcgttttctttggacagccctgkaggacactgtgtgacagccctggccctcttctccttgggcctcctctctgtggatgtccgaatcccagagcagattgtggtggtagacagctccatggtggwgagtgaggtcatgaagagcttggggaaagatggcsgcttggatgatgatgaygaggaggaagacctggatgaaggttcagggaccaagcgtcagagtgtggaagtaaaggcccatcaggcctcacacaccaagtacctgctgatgagaggttactacacagtgcctggcatggtcagcacgcgcaacctgaaccccaatgacagcattgtggtcaattcctgccaggttaaattccgactgcgcaatacccctgcacccacccatcttgggcccactgggcccacagccacaccgctagaagagctccaggctggcccttcctgcctccctgcctcctttaccagcctggtggatccacagctgcacacccgctgcccagaagagtttgcccaccagatggcacagtctgggtacagccctgaggacgtggctgcgtccctagagatcctgcaggctgtggcagctgctgactgcttcggggttgacagggagaagctgagcagacagttctctgccttggagaagatagcggacaagcgcaccaggacgttcctggactatatccaggacctcttggaacagcaacaagtcatggaagttggaggcaacactgtgcgcctagtggccatggcctctgcccagccctggctcctgccttcagtgcgtctgaaagatgtggaaatagacaccaaggcctcaggggatgacagccaatctagactccctgcggggtcttccatcgaagaccacacctctgagggtgcaccaattcctccagtcagctccaatggcactaaaaagcgcccctactgctctattcagagccctgaaactgatgctgaggaagctacaaggctccctgccaagaagcccacattacaagatgtctgtgtggctgccagtcctaggcctggaacagaagagcagacagaggcccaggctcagtttgcagctcctgaagatgcaggtgcagagggccccaggcaggagagccaagagagtgttggtgtctcaggcctagagcagctgggctgtgagttccagcttccagaaaattctgaagaccccagaggacttacagagagcaacatggcccaggtagcatgggagagcggctgtgaaagagtatgttttgtcggtcgcccatggcgtggtgtggacgggcgcctgaacatgcccgtgtgcaaaggcatgatggaagccgtgctgtaccacatcatgtcaaggcccggtgttcctgagagctgcctgctacagtactaccagggcgtcctacagcctgttgctgtgcttgagctgctccggggcttagagtctctcggctgtatccagaagcggatgctgaagaagccagcgagtgtctcactcttctccaggcctgtggtggagggcctaggtcaggccagtgaggccgaggcactctcctgtcaggggagcactgtcaccttttatgaacctactctggactgtaccatccgtctgggccgtgtcttcccccatgacatcaactggaaacaaagtggatccatttatagatgcgtcccaggccagcagaggagcctctgcccgtgcttaattgttccgcctgsactgwsscaagagccccgtccttcacacagctgttaccagagctcggcccagcctagcacaggtgtagcaactagcaggtgacttcagtcccctctgctctcggctgctcttggtcccaggtgcccagccttcctgcagccctgtgtcctgccctggactcaggctctagcatcagcagtatctgcaagggatgttgtttagggagcaggctgatgaccaagccctgagtcacctcwcacgcaccacaccattcagactcagaggaagacacatcacaggtgtacctggcagagtctgctcctcttaaggtagggcatcccaacttggcctgaactgagctcaggtctccagytcccaagggcccctcccgccagaagcaaggcctgtaggttttgcttttgtttttgttwtattttgcgctcttttcactagatacaagcccctggcatgtatttatttattttttwattaaagtwagatgaaatgc

SEQ ID NO: 1920 - DNA, 3236 bp, Rattus norvegicus
ggatccaggatctcagttttctggctgctcctggcgaaggtcaaatgatcaaatgaagctcttggagcaggagaaagaagttggtgagttaggatggccactggtggaatctgccggagaggttggtaaatagggatgggcagaaggcacacagagttgcacacgctccagaaagctgcctccttccaaaacaaagtggaaagggagctgaacacacctttcttggagcaggacccaaaaatgaacccagcactgctgcagactccggtccagctgctgagtgtccggcaggagccgggagttgccgagctccgctacccgattccctccactgtgttgactcagcatccggggcggggcgcaatgccccttataaggctggcggctctggggcctttattcgtctgcgtctgagatacttcatcgtccacgcagctttgagtccacacctctgtctacgcagcagctagtaagttcgcgccgcccagcttccccggactaccagcttgcagcttctggggcctgggctctctgcaccgggcagcttgcaccaagagctggggagttctgggggacaaaacagagaagggacccgggagatagggcaggaggatgcacaactctgaaccctagtcatcccccttctcctacctaacattctttttctgtctactctagtgccaccgtacaccattgtgtacttcccagttcgaggtaggagctaatgactgcatgaggggaggtctcgggtaggctgcagctctgtggggaacctccagaccctacccgctttctggttgcaaggctctgctccctcaccatggcctgtaccctgacctgaggttgctttgaggctgggctatatgctgtccccaaatccttaccctgactctatacagggcgctgtgaggccacgcgcatgctgctggctgaccagggccagagctggaaggaggaggtggttaccatagatgtctggcttcaaggctcgctcaagtccacttgtgtgagtgacacacctagtggagggggggcagaggtagggccttaaggagggctgtaactgggagacggcagcctcatcaagctttgattatcccctccagctgtatgggcagctccccaagtttgaagatggagacctcaccctttaccaatctaatgccatcttgaggcacctgggtcgctctttaggtaagtcctgaactcaggtagtccagctggtggacggggtggtggtgcatcagtctttgtttcagggtatctgccctcctggccactccccttttggtccagtgtggacagagcaaagcagggcgcacagagatagtccttgttaggctgcagctgtggtctgcctgctatgagcttcctgttgcctctcaggagcttaggactcatcgtgactgcccatatcccctcccccaagactgggacctgccaacagccaaacactgcgggcagggagttgaggttgaggtgaggaaattaggtgtcagtcacgctctccctccaccttgcagggctttatgggaaagaccagaaggaggctgccttggtggatatggtgaatgatggggtggaggaccttcgatgcaaatatggtaccctcatctacactaactatgtaagcctggattccccgggggggggggggggggaagctgagcaaaggagctttgtgcacttctccctcccatgtttcctttcctgtgtcagagcccgaggcaggctggggcgggctggggtagtgtaaagagaccaatagacagcttcaggagggggtggggccggcagttacagataggaagagtgtgtgcgcccacacgtgtgtaggtctctacataggagcagaacatgaagagacagagctaggggcaagcaaggcagatcctagaggccttggactctgtgtggggctgttgaagagtctctcttgatggctggatttaaatgtgatgatcctcagaggtgccagctctaagagctttacaggaacaacggccagagaacttaacactgatggtaacacacgcctgcaatcgtggtagttgggaagcctgagctactgtgagctgtccagggcagcctagagtagagaaggagatcatggcagggatggactggtaggatggcgtaggaaagaatgagcagtgaagtgaatgagactggtcaaagcctgggtgttggccacaggcacagtggtaacccgggaggtaggtaatggtaggtcatggccctggggatggggtatctagaattcattatagggcagctggattccagtgcccactgccctgtgagggtgggaggatggtacatctctgggtgtcttcctggcaggagaatggtaaggatgactatgtgaaggccctgcctgggcatctgaaaccttttgagaccctgctgtcccagaaccagggaggcaaagctttcattgtgggtaaccaggtgagcatctcttgcattcccttttccttatggataaaaccaaggagccgtcatttgtaaaatggagcagagatatggggtgggggtgggggtcccttagctctctgccccccwgcctktyccagcyakkgakscmmacwcmtystgssymwscagatttcctttgcagattacaacttgctggacctgctgctggtccaccaagtcctggcccctggctgcctggacaacttccccstgctctctgcctatgtggctcgcctcagtgcccgccccaagatcaaggcctttctgtcctcccctgaccatttgaaccgtcccatcaacggcaatggtaaacagtagtggacgaagggacaggaactccttgtcccccttttcccagactaataaagtttgtaaggcmrarrwammwwrrmwrmwrtttcctagtgaaaggggctctgggaacttcaggctgggaaagggtagaagaccagaaagcttacacacaaggtgggaccaggacatcttcctgcttagtatatgctgaccttttgaaacagaaaggtgtgtgtgtgtgtgtgtggtggataggaagtaaaataaaccagcatctaatgaagagggtttcatgttgatttgccagtcagtcccaggaacactcacgacctgggtgcaggcctggtagaggattataaactattcaaagggcctctgcttggctggcgatgcatgagtgagtgtcaatctcccaaatgctgtgatcacagctgaggagtgtcatgctcaggttgtttctgcag

SEQ ID NO: 1921 - DNA, 336 bp, Rattus norvegicus
ggaagatccatggcctggttctcagccggctcaggcagtgtgaatgtgagcatagacccagcagaggaacctacaggcccagctacactgctgccctctcccagggcctgggatgtggtgctgtgcatctcaggcaccctggtgtcctgcgagaatgctctggtgatggccatcattgtgggcacgcctgccttccgcgcccccatgttcctgctggtgggcagcttggccgtagcagacctgctggcaggcctgggcctggtcctgcacttcgctgctgacttctgtattggctcaccagagatgagcttggtgctggttggcgtgctcgccatg

SEQ ID NO: 1922 - DNA, 1437 bp, Rattus norvegicus
agccacagtaggaagtggggcagacagaaccaggagcctgggaaggaagcaccatgccaacggggacagtagctagagcctgggtactggttcttgctctgtggggagccgtagctggtggtcagaacatcacagcccggatcggagagccacttatgctgagctgtaagggggcccctaagaagccaacccagaagctagaatggaaactgaacacaggaaggactgaagcttggaaggtcctctctccccagggagacccctgggacagtgtggctcgaatcctccccaatggttcactcctccttccagctatcggaattgtcgatgaggggactttccggtgtcgggcaactaacaggcttgggaaggaggtcaagtccaactaccgagtccgagtctaccagattcctgggaagccggaaattgtgaatcctgcctctgaactcacagccaatgtccctaataaggtggggacgtgtgtgtctgaggggagctaccctgcagggacccttagctggcacttggatgggaaacctctgattcctgatggcaaaggsacagktgtgaaggaggagaccaggaggcaccctgagacgggactcttcacgcttcggtcagagctcacagtgaccccagcccaaggagggaccactcctacctattcctgcagcttcagyctgggccttcctcggcgcagacccctgaacacagcccccatccagccccgagtcagggagcccctgcctccagagggcattcagctgttggttgagcctgaaggtggaacagtcgctcctggtgggaccgtgaccctgacctgtgccatctctgcccagcctccccctcaaatccactggataaaagatggcacacccctgccccttgcccccagccctgtgctgctcctccctgaggtagggcatgaggatgagggcatctacagstgcgtggcsacccaccctagccatggacctcaggaaagccctcctgtcrrcaysagggtcmcrgmamsmggtratswwssmyawgctscaggctctgtggatgggtctgggctgggaacgctagccctggccttagggatcctgggaggcctgggaatagccgctctgctcattggggccatcctgtggcgaaaacgacaacccagactcgaggagaggaaggccccagaaagccaggaggacgaggaggaacgtgcagagctgaatcagtcagaggaagcggaaatgccagagaatggtgcagggggaccttaagagcgcccaggcaaaccctgtctccttcagcttccgacctcagctgtgctggctccagacgagctcccccactctacgatcccaattcaacctcgagccactttcttctccaaccagagcccacatgatccatgctgagtaaacacctgacacwtgwwaaaaaaaaaaaaaaaaa

SEQ ID NO: 1923 - DNA, 1731 bp, Rattus norvegicus
gttggtggtcctgccgacctccacgccgacctgctccgcggggacagctttgtgggcggccgctggcttccaacccctgccaccttccctgtgtatgacccggccagcggcgccaagctgggcaccgtggccgactgcggggtaccggaggcccgcgctgctgtgcgcgccgcctacgatgccttcagcagctggaaagagatctcggtcaaggagaggagctcattgctccgtaaatggtacgacttaatgatacaaaacaaggacgagcttgccaagatcataacagctgagagtggaaagccactgaaagaggcccagggagagatcctgtattcagcgtttttcctggagtggttctcagaggaagctcgccgtgtttatggagacatcatctatacctctgccaaagataagcgaggactggtcctcaagcagcccgttggtgtggcgtccatcatcacaccgtggaattttcccagtgccatgatcacccggaaagtgggggctgccctggcagctggctgcactgtggtggtaaaacctgctgaagatacaccctattctgccctggccctggctcagcttgcaaaccaggcaggaatccctccaggtgtctataatgtcattccctgctctagaaccaaggccaaggaagtgggagaggtgctgtgtactgatcccctcgtgtccaaaatctcctttactggctcaacggcaacgggaaagatcctgctgcatcatgcagcaaattctgtgaagcgtgtctccatggagctgggtggcctcgccccattcattgtctttgacagtgccaacgtggaccaggctgtcgcaggagcaatggcatctaaatttaggaatgctgggcagacttgcgtttgctcaaacagattcttggtacaacggggtatccacgattcctttgtaacgaagtttgcagaagcgatgaagaaaagcctgcgtgtaggtaacggatttgaggaaggaacaactcaagggccattaattaatgagaaagctgtagaaaaggtagagaagcatgtgaatgacgcagttgccaaaggggccacggttgtgacaggcgggaagcgacaccagagcggagggaatttcttcgaacccaccctgctcagcaacgtcaccagggacatgctctgcatcaccgaggagacctttgggccsstggcgccagtcatcaagttcgataaagaggaagagsctgtcgccatcgcaaatgcagctgatgttggattggcaggttacttttactctcaagacccagcccagatctggagagtggcggagcagctggaggtgggcatggttggcgtgaacgaaggactgatctcttcagtggagtgcccttttggtgggktgaaacagtcgggccttgggcgagaagggtccaagtatggcattgacgaatatctagaggtcaaatatktgtgttatggaggcttgtagggttctcacttctttaataaattacctagawccatarrramawwmmawmmawwtttttacaatgaacaagtaggttatcagagttatgaatttttaaaaattcagccggtcctgtcttagatgtacaccctaacccttcccttatctaactaggaaccaatggacaccatatacctgtggctgtgggtcccagccagtgctgagaccccagcacaaccccactgcctccatacaaagtacagtgtgagtgttcacatgccctct

SEQ ID NO: 1924 - DNA, 560 bp, Rattus norvegicus
ggaggtggaggaggaggagggggggggggggaagagggggaggagaaggaggattcattattgcagggattggactcagagaaacagacccagggcatggagacaggtggtgcctaggaggaggaggcggtcctgaggggctgcaccccaggggagrgggcrsgsctsrgarkkggatstgcagaacygyswgvsatvyswgsmstrwgctghmrywrccatgtccaacaacatggccaagatcgctgaggcccgcaagacggtggagcaactgaagctggaggtgaacatcgatcgcatgaaggtgtcgcaggcggcagcggagctattggctttytgcgaaacgcacgctaaggatgacccactggtgactcctgtccctgccgccgagaatcccttccgcgacaaacgactcttttgcaccbtgctctgagcccccaagatagttttatcctcccgcgcagaaatatgaatccaataaacttggtgacttggwrrwrmmwrmmawwwarrrraaaawraggcacggggcaaaaacgtgggggccacctttgtgggga

SEQ ID NO: 1925 - DNA, 3737 bp, Rattus norvegicus
taaaggtttacaatgcctcacaattatttactctttcaatggaatttgtcaacagactggagtccttggtgggattatgacagcccaaaagatgggtgcattggagtagctgtgcctgagatctgcatgttcaggctgtccactggagatgattgaatggtgatttacatggcactcagaaacaccactgttcatgtccagagggcagagtaatcctccagtatctcatcactaacttgctgaagggcagcaaggctatgttcctcggaccctggcctttttctcgccttctgtcctggtttgccatttccagcagactgtcaggacagcatggcctcacttcctccaagttcctgagatacttgtgcctcctggccctattacctctcatatggtgggggcaagcactcccctacaagataggggtcataggtccctggacatgtgatccgttcttttccaaggccctgcctgaggttgctgccgctttagcaattgaacgaatcagccgggacatgtcatttgacagaagttactccttcgaatatgtgattcttaacgaagattgccagacttcaaaggccctcaccagttttatttcccaccagcagatggcctcaggatttgttgggcctgccaaccctggctactgtgaggcagcctcactcctgggaaacagctgggacaaagggattttctcttgggcttgtgtgaatcatgaattagataacaaacatagctacccgactttttctcggacacttccttctcctatccgggtgcttgtaaccgtcatgaagtatttccagtgggctcatgctggggtcatttcctcagatgaagacatttgggtgcatacagccaatcaagtctcaagtgctcttcggagccacggcctacctgtaggggtcgtcctgacctcgggacaagacagccgtagcattcagaaagctctgcagcagattcgccaggcagacagaattcgcataatcatcatgtgtatgcattcagccttgattgggggagagactcagacacacttcttggaattggctcatgatctgaaaatgacggatgggacttacgtctttgtcccctatgatgtactgctctacagtttaccttataagcacagcccctaccaggtcctgaggaacaatcaaaagctccgggaagcctatgatgctgtgttgactattacagtggagtcccatgaaaagaccttctatgaagcctttacagaagcagcagccggtggagagattcctgagaagcttgactcacaccaagtttcaccgttgtttggaaccatctacaattcaatttactttatcgcacaagccatgagtaatgctctgaaagaaaatggacaggctagcgctgccagcctgactcggcattccagaaacatgcagttctatggattcaaccagttgataaggacagactcaaatggaaatggaatttctgaatacgtaatcctggacaccaatgggaaagaatgggaactccgtggcacctacactgtggacatggaaactgaactgctaaggttcagagggacccccattcatttcccaggtggcaggcctactagcgcagatgcaaaatgctggtttgcacaagggaagatctgccaaggaggtattgaccctgccttagccatgatggtctgctttgctttgcttctagccttgctgtctatcaatggatttgcttactttatcaggcgacgtataaataaaatccagttgattaaaggacccaacagaatcctgctgactttggaagatgtgacatttattaacccccactttggcagtaagagaggaagccgtgccagtgtaagcttccagattatctcagaagttcaaagtgggaggtctccaaggctgtcattttcttcaggtagtttaactccagctacttatgagaactccaacatagcaatctaccagggtgactgggtatggctgaaaaagttccctcctggagattttggggacattaagtctatcaaatcaagtgcaagtgatgtgtttgaaatgatgaaggacctgcggcatgaaaatgtcaaccctttattgggcttcttctatgattcggggatgtttgccatcgtgtcagaattttgttctcgaaggagcctagaagacatacttacacaagacgatgtgaaacttgattggatgttcaaatcatcactgctgcttgacctcatcaagggaatgaaatacttacaccacagagaatttattcatgggaggctaaagtctcggaactgtgtggtagacggacgttttgtactaaaagtgacagattatggctttaataacattttagaaatgctgagactctctgaagaggaaccttctgaagaagagctgctgtggacggcccctgaactgttaagagcccctgggggtatcaggttaggttcatttgcaggagacgtctatagctttgccatcatcatgcaagaagtgatggtccggggtgctcctttctgcatgatggatctgtctgccaaagaagtcatagacagacttaaaatgcctccccctgtgtatagaccagtggtttctcctgagtttgcccctccagagtgtctccagctgatgaagcaatgctgggccgaggctgcagaacagcgaccaacttttgatgaaatatttaaccagtttaaaactttcaacaaagggaaaaaaactaatattattgattctatgctccggatgttggagcagtattctagcaacttggaagatttgatccgggaacggactgaagaactggaaattgaaaaacagaaaacggaaaagcttctaacacagatgctaccaccatcagttgctgaatccctcaaaaagggctgtacagtggaacctgagggatttgacttggtcaccttgtacttcagtgacattgtgggcttcaccaccatctcagccatgagtgagcccattgaagtggtggaccttctgaatgacctgtacacactctttgatgccatcattggcagtcatgatgtctataaggtagagaccattggagatgcctatatggtggcctcaggcctcccaaagaggaacggcagtaggcatgcagctgagattgcaaacatgtccctggatattctgagctctgtgggtacctttaagatgcgacacatgccagaggtgccagtccggattcgaataggtctgcacacagggcctgttgttgctggagtggtgggccttaccatgcctagatattgcttgtttggtgatactgtgaatacagcttctcgaatggaatcaacggggctaccataccgaattcatgtcagtctcagcacagtaacaattcttcggactctgagtgaaggctatgaagtagagcttcgtggaagaacagagctcaagggtaaaggcacagaggagaccttctggcttgttggaaaaaagggtttcaccaaacctcttcctgtacccccaccagtgggcaaagatgggcaagtgggtcatggcttgcaaccagcggagattgcagcattccaaagaagaaaagcagaaaggcagttggtgcgaaacaagccataagatggaaagaactccagcatttgaatctcctcttgacaaagcaacgctgaagctcattacagatcaaggatattcttcttcttgagcaagatattagtgaatgattgttcttctgaggttgcctaatgtccagggatgggtcaagcctagtgt

SEQ ID NO: 1926 - DNA, 2391 bp, Rattus norvegicus
cggacaggctgagccggagtggaccgccccttcgaagagtccccgcagacatggcggagagctggctgcgcctctgcggagcggggcccggggaggaggccgggccggaaggtggcatggaggagccggacgccctggatgacagcctgaccagcttgcaatggctgcaggaattctccattctcaacgccaaggcccccactcttcccccgggaggcaccgacccccttggctaccaccaagtaccgggtttggtggcgcccggatcaccgctggcggcagaccctgcctgccttgggcagccacacacacccggcaagcccacatcgtcgtgcacatctcgaagcgcgcccccagggctgcaggccccgccccctgacgacgtggactatgccaccaacccacatgtgaagccgccctactcgtatgccactctcatctgcatggccatgcaagccagcaaggccaccaagatcactctgtcggccatctacaagtggatcacggacaacttctgctacttccgccatgctgaccccacctggcagaattccatccgccacaacctgtccttgaacaagtgcttcatcaaagtgcctcgggagaaggatgagcccggcaaggggggcttctggcgcatcgacccccagtatgcagaacgcctgctcagtggggccttcaagaagcggaggctgcccccggtccacatccaccctgcctttgcccggcaggccgcccaggaacccagcactgccccctggggtgggcctctgaccgtgaacagggaggcccagcagctactgcaggagtttgaggaggccacaggggagggaggctggggcacaggagagggaaggctggggcataagcgaaagcagccgctgcccaagagggtggccaaggtcctgcggcctcccagcaccttgctgctgacccaggaggagcagggtgagctggaacccctcaaaggtaactttgactgggaggccatcttcgaggctggcgcactgggtgaggagctgagctcactggagggtctggaactaagccccccgctgagccccagctcacacggagaggtggatctcacagtccatggccgccacatcaactgtcctgctacctggggccctccagtggagcaggctactgacagcctggactttgatgagaccttcctggccacgtccttcctccagcatccctgggacgagagtagtagcggttgcctgcccccagaacccctctttgaagcaggggatgccaccctggccgctgacctgcaggactgggccagtgtgggasccttcttataaaaggtcaggccccaccccatctccggacagtgctcaagtcagggcccagaactgcctcccaagacagkccctttggacatcccagcacccaggcagggactggrccaggtcgctggagggccacactgctgccagctggggatgtcctatatccaagcccagaagaactgggaactggggactrcctccccctcatcagcaacccccatacacacagtgtktcatccaccmgtgttcccccaagcccaagaattggcaaaagcammmmwrmmmmwrmmwrcccccctgtactccgagagccgaagcccggaggggtcctacctaccgggcctgggaggaactgaacagggccctcaccaaagcttcacctcacccacttctgctgcttctccaggtccctacccagagaaagttcccaggtacaacaaatggctcgttagaggataacaaattaacccccaggaggcccctcccggcagagttctctcaggggccctggcagccttggccagggacagcgagggcaggggactggggaagggaacagaawgaggaggcagaaaccaggtgggggcagcaaggyrsgdkgagatggtctctaagcyttstggggccttctcytggcccgacgcctgtgaagggagrctgcaagcttttgagtctgacttgagggtgagagcaacaggaagttggggcttggggtggttggggcagggcagccaagctgctaggtgggggssgagagagattaatatagcgactgtagttatagctaagacttaactggggaaggggtgctgacttctggaacrctgggaccaggaaggggacaaaccctaggcccctgtctgcactgggggggaccaggtcttgctccaccttgacccctggggctggagcctgtatctaccctccacgtggagcaagttaacctttttcatgtaaagttctttacaataaaatttttttttcaaaataaaatwaarrvvkdwawwwmawwwwramwwatcaaacagacgctgcattggaatgtggggttgtttcttttgtgatcttcagatggtgtcattccccg

SEQ ID NO: 1927 - DNA, 577 bp, Rattus norvegicus
ggaattcggcacgaggcaggctgagctacagaccctgtcaacatgtttgtgacatacgtccttgcctctgctttgctctttgggtctgtcctgggccagagatgcagcacctcctggggcatccaacacacctcttaccttattgaaaacctgaaggacgacccatcatcaaaatgcagctgcagtgccaacgtgaccagctgcttgtgcctccccatcccatctgatgattgtaccacaccgtgcttccaggagggaatgtcacaggtgaccaatgccacccagcaatcaaaattctcaccttttttctttcgggtgaaaaggatagttgaaaccctaaagagcaacaagtgtcagtttttctcctgtgaaaagccgtgcaaccagaccacagcaggcaacaccgtgtcatttctgaagagtctcctgaagaccttccagaagacagaggtgcaagtgcagagaagcagggcgtgaagacagatactatttattctatttattgaatttacaaaaccttttctccctaattgttttaattgttacaatgaagaaataaactaagctattctagatt

SEQ ID NO: 1928 - DNA, 8231 bp, Rattus norvegicus
ctcctctgargacttacagatagtcgaaggctgtggccctcacatcagagacgtctcacgtcctcttcaccacagggccacttggatgcttggggtgtggggagggaacggtctccaagttcaagactccacagtcccccacccctgcctggctttggtaggcccttcactggccctcagcccaactggtttgtggttcatgcttgcttgcaagactccttcactctgtaatgttccccaaaagctttcctgggccccagcacttgaattccacatcctctctcctcctcccacttctctgattcaactgtcaaacggtgacactggaaaaagaactgctgtgctgtaagcacaggggtggcacctgagaggagaggggaggggctgcccttctcctggcccatggggaggaggggaggaccagggatgaggctttgaagtcaagaaggcttgggtcattctcggctgtaagtcaaagggtagctctcccgagcctctcatggctggttgattctggctccctcttcactgtagcctgttctcctgtgaggaataggtgggatttcctgaggaggaagctcagtggagctgggaagtggttgtccctggtgccaagatgaagggatagaagcaggagaacccatgcacgcttgtgcccggggactggagactgggctctgccttgacctctccacgggggtgtctgcgctggcagatagtggagggagtgggaacagggtggaaagagggccacccaccctgggccagctgttgattgtgatcaagaaaaggaagtgaggataccacaggggcggggagaaggaagtaggcaaagccctcccccaacaggtctgcccagtgtcctcagttcacagttttagccagctggctgtgagcacacctcttgaccctcacggtgaggacccagtggggtccaagcagttggaagatgagctcttggggaaagagccaagaagccgggagatggggaacgaagttggtggggccagggtcaatctaggcatgaacaagacccgagactctctccaggtctccgggtggcttctcaccttcctgcccactcctccctgttctgcaaaaccttcccgaattcctggggtggggtaggggggagaggggcggcatctctcacgttgctgacttgtctctctgattgggaattaggttccagtaccttcaactttagagactgtaaagtcctacttggaaaccagaaggacttgcctaacgggcaagctgatgcttaatggtcacgtgacttttgccgagttactgacctttccagaatctcagattccccaacagtttccctcttcttctcaggaagacgggacaagccctgtgaagcactttgtccacagccccaggacttggaatcacagacagaagtctgggactgagagctagggagccccacctggtggtggaagcggaagcaaggctgagactgctatctaggctctcccttcctccccttcctttttccagtcagccatcatcattttttttttttttttttttgggaagttccactcaagcagtgaacagattctaggagttgctcccagcagctcggcacagacaaagttcctcatttctgaaagggcagagaatggtggctgtgcctagactgtggccagaggtggcgaggagccacagcaggccaaggtctcatcccacttggagtctcacccatggtcttgtggttagcctaagatttccccctcccccttgatgcctggtttcctctcagcatttccaccccagaggccatgagctacaactccggtagctagcgctcccgaagttcccagtagtctttgtgccctgcagctggtggggaaccgggagctgtcagtcccaaaggctaaagctgtcaccctgtaacattctatgatgctctgggtggataccagaagtatgtgaagcctcaggatggggggtggctgttcctcagatactgaggaggctcttcattctcatccctgcaagcccaggcttgtccttggtagtgtgggagagacagagctcaccaaggaggagtcaggaagatacccaaggagatggggtgagtggggtagaagtaccgtgaagccatggcatgaaggctgaggcaacctagcatgccccaggctgcacctctgtgacagctgtcccaggtgccccttcctgacccagtttccctcctgctaccttttcagtgcctgcgggtgttaggactttcccacacccctcatcactggtggagaggaccaatggctcatgccaactcagcatggaaccatattacctttcctagagaaccaggaagtggtcccgctctatctagacctaatgctgagctcaccgccctggcacagacctgaagctgaaagagattccctccccttctcccaagtccacggccagaaggatggacacctgtcccataatggccctccccccagggatcctttatgtccttcccactgtgctgtcattgatgctggcttatgcacatggttaaacaccccccccccgcaggcccctgcctgttactggctgctccctccagccctttgctgagctctctcagtctgctcagtagaagctggaccttccttccctcctttcctggtgaccttctccagtttgtgggaggaagagggggtgacttgttctcttctgcctggtaattatcttccttcagtgtgggggatgcccaaggcttggcttcaggctgtgggagagcagaggaggagttgggagaacagcctacaacagctgccttccgggagggaccaggctagttcacacttggaagttgggatgccaggagcagccttctgtcttccgaggccttcctgggtctcctggtcagctcattccacactgagatgattctaaagaaagatcctcacacagactctgctggaagaaacaaagtgaagtgtccccagactttatcaggatgaggcccctgattctgttagctgccctcctctggctccagggctttttggccgaggacgacgcatgctcatccttggaagggagcccagacaggcagggtggaggtccacttctgagtgtgaacgtcagtagccatggaaagtctaccagcctgtttctgagctgggtagctgcagagctgggcggatttgactatgccctcagcctcaggagtgtgaactcctcaggttctccagaagggcaacagctccaggctcacacaaatgagtccggctttgagttccatggcctggtgccagggagtcgctaccagctaaaactgactgtcctaagaccctgttggcagaatgtcacaattaccctcactgcccgaactgccccgacagtggtccgtggactgcagctgcatagcgctgggagcccagccaggctggaagcctcgtggagtgatgcccctggagatcaagacagctaccaacttctcctctaccacctggaatcccaaactctggcatgcaatgtctctgtgtcccctgacaccctgtcttacagttttggcgaccttttgccaggtactcagtatgtcttggaggttatcacctgggctggcagtctccatgcgaagactagtatcctccagtggacagagcctgtccctcctgatcacctagcactacgtgccttgggtaccagtagcctgcaagccttctggaacagctctgaaggggccacctcgtttcacctgatgctcacagacctcctcgggggcaccaacacgactgcggtgatcagacaaggggtctcgacccacacctttcttcacctatctccgggtacacctcatgagctgaagatttgtgcttctgctgggccccaccagatctggggacccagtgccaccgagtggacctatccctcttacccatctgacctggtgctgactcccttacggaatgagctctgggccagctggaaggcagggctgggagcccgggacggctatgtactgaagttaagtgggccaatggagagtacgtctaccctgggcccggaagagtgcaatgcagtcttcccagggcccctgcctccgggacactacactttgcagctgaaggttctagctggaccttatgatgcctgggtggagggcagtacctggctggctgaatctgctgcccttcccagggaggtccctggtgccagactgtggctagatggactggaagcttccaagcagcctgggagacgggcgctactctattctgacgatgccccaggctccctagggaacatctctgtgccctctggtgccactcacgtcattttctgtggcctggtacctggagcccactatagggtggacattgcctcatccacgggggacatctctcagagcatctcaggctatacaagtcccctgccaccgcagtcactggaggtcatcagcaggagcagcccatctgacctgactattgcttggggtccagcaccagggcagctggaaggttataaggttacctggcatcaggatggcagccagaggtctcctggcgaccttgttgacttgggccctgacactttgagcctgactctgaaatctctggtacccggctcctgctacaccgtgtcagcatgggcctgggccgggaacctcgactctgactctcagaagattcacagctgcacccgccccgctcctcccaccaacctgagtctgggctttgcccaccagcctgcggcactgaaggcttcctggtatcacccaccgggtggcagggatgcctttcacttacggctttacaggctgaggcctctgacactggaaagtgagaaggtcctacctcgggaggcccagaacttctcctgggcccagctgactgcaggctgtgagttccaggtacagctgtctaccttgtgggggtctgagagaagcagcagtgccaacgccacaggctggacacccccttcagctcctacactggtaaacgtgaccagcgatgctcctacccagctccaagtatcctgggcccacgttcctgggggccggagccgctaccaagtgaccctataccaggagagtacccggacagccaccagcatcatggggcccaaggaagatggcacgagctttttgggtttgactcctggcactaagtacaaggtggaagtcatctcctgggctgggcccctctacactgcagcagccaacgtttctgcctggacctacccactcatacccaatgagctgctcgtgtcaatgcaggcaggcagtgctgtggttaacctggcctggcccagtggtcccctggggcaaggggcatgccacgcccaactctcagatgctggacacctctcatgggagcaacccctgaaactaggccaagagctcttcatgctaagggatctcacaccaggacataccatctcgatgtcagtgaggtgtcgggcagggccgctccaggcctctacgcaccttgtggtgctgtctgtggagcctggccctgtggaagatgtgctctgtcatccagaggccacctacctggccctgaactggacgatgcctgctggagacgtggatgtctgtctggtggtggtagagcggctggtgccgggagggggcactcattttgtcttccaggtcaacacctcaggggatgctcttctgttgcccaacttgatgcccaccacttcttaccgccttagcctcaccgttctgggcaggaatagtcggtggagccgggcggtttccctggtgtgcagtacttctgctgaggcttggcaccccccagagctagctgagcccccccaggtggagctggggacagggatgggtgtgacagtcatgcgtggcatgtttggtaaagatgacgggcagatccagtggtatggcataattgccaccatcaacatgacgctggcccagccttcccgggaagccatcaattacacatggtatgaccactactatagaggatgtgagtccttcctggctctcctgttcccaaaccccttctacccagagccttgggctgggccaagatcctggacagtacctgtgggtactgaggactgtgacaacacccaagagatatgcaatgggcgtctcaagtcaggcttccagtataggttcagcgttgtggcctttagtaggctcaacactccagagaccatcctcgccttctcggccttctcagagccccgggccagcatctctctggcgatcattcccctgacagttatgctgggggctgtggtgggcagcattgtcattgtgtgtgcagtgctatgcttgctccgctggcggtgcctgaagggaccaagatcagagaaggatggcttttccaaggagctgatgccttacaacctgtggcggacccatcggcctatccccatccatagcttccggcagagctatgaggccaagagcgcacatgcacaccagaccttcttccaggaatttgaggagttgaaggaggtaggcaaggaccagccccgactagaggctgagcatccggacaacatcatcaagaaccggtacccacacgtgctgccctatgaccactccagggtcaggctgacccagctaccaggagagcctcattctgactacatcaatgccaacttcatcccaggctatagccacacacaggagatcattgccacccaggggcctctcaaaaagacgctagaggacttctggcggttggtatgggagcagcaagtccacgtgatcatcatgctgactgtgggcatggagaacgggcgggtactgtgtgagcactactggccagccaactccacgcctgttactcacggtcacatcaccatccacctcctggcagaggagcctgaggatgagtggaccaggagggaattccagctgcagcacggtaccgagcaaaaacagaggcgagtgaagcagctgcagttcactacctggccagaccacagtgtcccggaggctcccagctctctgctcgcttttgtagaactggtacaggagcaggtgcaggccactcagggcaagggacccatcctggtgcattgcagtgctggcgtggggaggacaggcacctttgtggctctcttgcggctactgcgacaactagaggaagagaaggtggccgatgtgttcaacactgtgtacatactccggttgcaccggcccctcatgatccagaccctgagtcaatacatcttcctgcacagttgcctgctgaacaagattctggaagggccccctgacagctccgactccggccccatctctgtgatggattttgcacaggcttgtgccaagagggcagccaacgccaatgctggtttcttgaaggagtacaagctcctgaagcaggccatcaaggatgggactggctctctgctgccccctcctgactacaatcagaacagcattgtctcccgtcgtcattctcaggagcagttcgccctggtggaggagtgccctgaggatagcatgctggaagcctcactcttccctggtggtccgtctggttgtgatcatgtggtgctgactggctcagccggaccaaaggaactctgggaaatggtgtgggagcatgatgcccatgtgctcgtctccctgggcctgcctgataccaaggagaagccaccagacatctggccagtggagatgcagcctattgtcacagacatggtgacagtgcacagagtgtctgagagcaacacaacaactggctggcccagcaccctcttcagagtcatacacggggagagtggaaaggaaaggcaggttcaatgcctgcaatttccatgctctgagtctgggtgtgagctcccagctaacaccctactgaccttccttgatgctgtgggccagtgctgcttccggggcaagagcaagaagccagggaccctgstcagccactccagcaaaaacacaaaccagctgggcaccttcttggctatggaacagctgttacagcaagcagggacagagcgcacagtggasgtcttcaatgtggccctgaagcwgtcmmaggcytgmkgccktatgaymccmrcactggagcwgtrtatctacctmkacaactgtctgaacagcscavtgctgaacgsgctgcccagagctgrgaagtggcctgcgccctghtaggygtcatgttscagcaaakccacccaggcctgacttccmtaggagagtggatccaccgggcctcacactgtccaagggcagagtccaggaataaagagacatggtcaaaaaaaaaaaaaaaaaa

SEQ ID NO: 1929 - DNA, 3652 bp, Rattus norvegicus
cgtcagagagtgctcagaaagtgtgacctctgaggaccctggtgtgagaccctcacggctgacaaagatccagtgccaactctgagaggccaccatggcaggtctgcagcagggctgtcaccccgaaggccaggactggacagcgccacactggaagacctgccgggccctgccagggccacggggactcacggtcagacatctgaggacagtctcttccatatcggtcttctctgtggtattttggggtgtcttgctgtgggctgactctctttccctgccagcatgggcaagagagaccttcacccttggggtgctgggtccctgggactgtgaccctatctttgcccaggcactccctagcatggctacccagttggctgtagatcgagtcaatcaggacgcctcactgctgctgggctcacagttggatttcaagatcctccctacaggctgtgacacccctcatgccctggccacatttgtggcccacaggaacacagtggctgcttttataggccctgtcaatcctgggtattgtccagcagcagctctgctggcccaaggctggggcaagtccctcttctcctgggcctgtggagctccagagggaggaggtgccttagtgcccactttgccttctatggccgacgtgctactgtctgtcatgagacactttggctgggctcgcttggccatcgtgtcctctcaccaggacatctgggtaaccacagcccagcagctagccacagctttcagggcccatgggctgcctatcggactgatcacctccttgggacctggagagaagggggccacggaggtttgcaagcagctccacagtgtgcatggtctgaaaatcgtggttctgtgcatgcactcagcgctgcttggaggcctagagcagacagtcctgctgcgctgcgcgagggaggagggcctgacagatggcagactggtcttcttgccctacgacacgctgctctttgccctgccctatcgtaaccgctcttacctggtcctggatgatgatgggccccttcaggaggcctacgatgcagtactcaccatcagtctggacaccagtcctgagagccatgccttcactgctaccaagatgagaggaggggcagctgccaacttggggcccgagcaggtgtccccactctttggaactatctacgatgccgtcatcctgttggcccatgccctgaaccactctgagacccatggaacggggctctcaggggctcacttagggaaccatataagagctcttgatgtggctggttttagccagagaatccggatagatgggaaaggcagaaggctaccccaatacgtcatcctggacacaaatggtgaaggaagccagttggttcccacccacatcctggacgtgagcacacagcaggtgcagcccctgggaacggcggtacacttccctggagggagccctccagcccatgatgccagctgctggttcgaccccaacacactatgcatacgaggtgtgcagcccctgggcagcctcctgactctgacgataacctgtgtcctggctctggttggtggattccttgcttactttatcaggttaggcctccagcagctgcggctgctgcggggcccccatcggatcctgctgacacctcaagagctcaccttcctccagcgaacccccagccggcggaggccacatgtggacagtggcagcgagtcaagaagtgtggtagatggtgggagtccacagtcagtgatccaggggtcaacaaggagcgtaccagccttcctggagcacaccaacgtggccctgtaccagggagagtgggtgtggctgaagaagtttgaggcaggcacggctcctgatctgcggcccagcagcctcagcctcctgagaaagatgcgggagatgcggcatgagaatgtcaccgccttcctgggtctctttgtgggccctgaggttagtgcgatggtgctggagcactgtgcccgtggcagcctggaggacctgctacggaatgaggacctgaggctagactggaccttcaaggcctccttactgttggatctgatccgaggtttgcggtatctgcaccatcgacatttcccccatgggcgcctcaagtccaggaactgtgtggtggacactcgctttgtgctcaagatcactgaccatggttatgcagagttcctggagtctcactgctctttcaggccccagccggccccagaagagcttctgtggacggctcctgagctgttgcgggggcctcgggggccttgggggcctgggaaggccaccttcaaaggtgatgttttcagcctgggcatcatcctgcaggaggtactgacccgagacccaccctactgctcctggggactctcagcagaagagatcatccggaaggtggcatctccccctcctctgtgccggcctctggtgtcccctgaccagggtcccctggagtgcatccagttgatgcagctgtgctgggaggaagctccagatgacaggccaagcttggaccagatctacacacagttcaaaagcatcaaccaaggcaagaagacaagtgttgctgactccatgctgcggatgctggagaagtattcccaaagcctggaaggtctggtccaggagcggactgaggagctggaactggagaggcggaagacagagaggctgctctcacagatgctccccccgtctgtcgcccatgctctaaagatgggaacaactgtggagcccgagtactttgaccaagtcaccatctatttcagtgacatcgtgggctttaccaccatctcagccttgagtgagcccattgaggtggtgggcttcctcaatgatctctacacgatgtttgatgctgttctagacagccatgatgtgtataaggtagaaaccataggggatgcctacatggtggcatctgggctccctcggcgcaacggaaatcggcatgctgctgagattgccaacatggctctggagatccttagctacgcaggcaacttccggatgaggcatgcacctgatgtgcccatccgtgtcagggccggtctgcattcagggccctgtgtggcaggtgttgtgggtctcaccatgcctcggtactgcctctttggggacaccgtgaacactgcttccaggatggaatccactggactgccatacagaatccacgtcagccgaaacactgtccaggccctgcttagccttgacgaaggctacaaaattgatgtcagaggtcagaccgaactgaaggggaagggcttggaggagacttactggctgacagggaagacaggattttgcagatccctccctacacctctgtccatccagcctggagacccatggcaggaccatataaaccaagaaatccggactggctttgcaaagctcgccagagtctgctgagccaggrgttcaggggacactgggccaggtcctgatagcaagtcggtgggaggtgccaaggcagccaagatgccccatcacccctgcctcctacgaatgtctgcctgccaccatgagtggtatgaggagctgctgtcttccctagtgactctgggggtgtccttgcctcctgtcaggaaaacaataaaaatggaaatactcccttccaaaaaaaaaaaaaaaaaa

SEQ ID NO: 1930 - DNA, 1163 bp, Rattus norvegicus
gtgctagttgtgtttccttgtttaaaaaaaaaaaaaaaaacaacacaaatccccacaaacgttttgtkttgtttaaaagcaaggcatgcttgtgctgactgtaaccgactaattcagatcgtcagagctgctccctggtccatgtggagagtatctggggcatcttagtgtcttctgttgttttgttttgtttttcttcaccttttagggtgtgtatgggttgtttcttagacttgtattttaaaatttgtaaacctgaggacagcctgtggggagkaggacagatgatttcacattccactccctaggtctagtttagcaactgtgtcccamctggtgactcttagggaggagtgtgggaatgacctcgtttaataacgtactccttcttgcaaagtctgaccttttctctcamcttaagstggacmcagtctttgactgaaactcatgcaggtgggtgggagctgtcttgmcacctctctagatgccctactgtgactgtgactcaagggattgttgcattgctgwttkggggggggggggataacttctaacttctttcattgctaaagtgaaaaaaagctattgcaccttttagcaaatactaccaaactggcattgagttctataaaararwwmwwwwrmmmmwrwmarwmawwrwmttatatgcttagcatagatttgcaactaagtagtatatgtgttcctagaatgcagctgaagacctgttacgtagaggaaatacgaggggtggtgttggaacacagccgccacctgtggaatgattcacatcctctcaagttaggaggatacaggcctgcttcattaagaagctattagggtgggggtggggagaacacttaacaacatgtggggtggggagcatacttttaaccggaacatggggaccagtcagggctgtaccctttttttcttccatcctatagagaatcttaacaactggctgaagctctctcaaatgcgagagattcatcaccttataacacctttatagtgtactttatcagattttgtttgcaagttccagtttttaaaaatgttaggtactctggggagtctgatctgtagatcgttagtccgacatctctcatgtctcatctagcgatcagcaccgcgcgtactagtgatcgagctcgtcagct

SEQ ID NO: 1931 - DNA, 878 bp, Rattus norvegicus
  misc_feature (864)..(864): n is a, c, g, or t
cacgaggtcttctctgagtattacacaccaagtactacctaatcatgagttcccascagcagaagcagccttgcactgtaccccctcagctgcaccagcassaggtgaaacagccttgccagccaccaccccaggaaccttgtgctcccaaaactaaggagccctgtcaccctattcctgagccctgcaaccccaaggtgccagagccctgccagcctaaggtgccagagccttgtcaacctaaggtgccagagccttgccagcctaaggtgccagagccttgccagcctaaggtgccagagccttgccagcctaaggtgccagagccctgccagcctaaggtgccagagccctgccatcccaaggcacstgagccctgccaccctgttgttcccgagccstgccagcctgttgctcytgagccmtgccagcctgttgttchtgagccctgccccccaactgycactccatcaccataccagcagaagacaaagcagaagtaatattgyccatagccaagcytgaagatytgatcaccagatgctgaggstgcttwccatcytgcttatgagtcccattsccttgtgctacacatgctgtgacctccagtcttaatcctccatccttgcaccacctrrrrrgttgtctctcatcctcatcctcaagaagttctcgagccactcaacattacccaaagtctcatgaatggmtaatctttsgattcatytgaatgggggtggggaataagacaagtatatgwtcmatattcttcccctcwwwaaacaccttttadctcmaaaarrrrrrrmmmrrwammmaattcgccctatagtgagtcgtattacaattcactggccgtcgttntacaacgtcgtgac

SEQ ID NO: 1932 - DNA, 690 bp, Rattus norvegicus
acaagaatgagaggcttcatcttcactcgacacagtcaaaccacagccaatccttcatgccctgaaggaacacagccactctacagtgggttttcccttcttttcgtacaaggaaatgagcacgcccatggacaagaccttggtactctgggcagctgcttacagcgattcaccacaatgccattcttattctgtaacgtcgataacgtgtgtaactttgcatcacgaaatgattattcatactggctgtcgacaccagccccgatgcccatggacatggccccaattactggcagagcccttgagccctacgttagcagatgtaccgtctgcgaaggtcctgcaatggctatagctgttcacagtcaaaccactgctatccccccatgtccccagggctgggtttctctctggaaaggtttttctttcgttatgtttacaagtgcaggctctgagggtgctggacaagctcttgcctcgcccggctcctgcctggaggaattccgagccagtccatttatagaatgccatggacgagggacctgcaactactactcaaactcttacagcttctggctggcttcactaaatccagaaagaatgttcagaaaacctattccatcgactgtgaaagctggagacttggagaaaatcataagccgctgtcaggtgtgcatgaagaaaagacac

SEQ ID NO: 1933 - DNA, 290 bp, Rattus norvegicus
ctacatccgcattgctgataccaatatcaccagcattcctcaaggtcttcctccttcccttacggaattacatcttgatggcaacaaaatcagcagagttgatgcagctagcctgaaaggactgaataatttggctaagttgggattgagtttcaacagcatctctgctgttgacaatggctctctggccaacacgcctcatctgagggagcttcacttggacaacaacaagcttaccagagtacctggtgggctggcagagcataagtacatccaggttgtctaccttc

SEQ ID NO: 1934 - DNA, 2319 bp, Rattus norvegicus
ggcacgaggtctgcggctcccactctcagaggggacctagggtattgggggagatggtgtcagggacatggactccaacccccaagggtctctgctgctggctactctcctcttcaggctctggggccgtgagagcctagggaaggaccctggacatcccgtctctccgggaagattttaacacagagtgcttctcagggggaagaattcgaagcaaaaccagaccccgcaggatccccgctgcggccgccatggcgcaggagaacgccgctttctctcccgggtcggaggagccaccgcggcgccgcggkcgccagcgctacgtggagaaggacgggcgctgcaacgtgcagcagggcaacgtccgcgagacctaccgctacctgaccgacctgttcaccacgctggtagatctgcagtggcgcctcagcctgctcttcttcgtgctcgcctacgcgctcacytggctcttcttcggcgccatctggyggctcrtcgcckacggccgcggcgacctgkagcacctggaggamaccgcgtggacaccgtgcgtcaacaacctcaacggcttcgtggccgscttcctcttctccatcgagacagaaaccaccatcggctatgggcaccgtgtcatcaccgaccagtgccccgagggcatcgtgctgctgctgttgcaagccatcctgggstccatggtgaacgctttcatggtgggctgcatgttcgtcaagatctcgcagcccaacaagcgcgccgmcacgctcgtmttctcctcgcacgccgtggtgtctctgcgcgacgggcgcctctgtctcatgtttcgcgtgggggacctgcgatcctcgcacatcgtcgaggcctccatccgcgccaagctcatccgctcgcgccagacgctcgagggcgagttcatccctctgcaccagaccgacctcagcgtgggcttcgacacgggggacgaccgcctcttcctcgtctcacctctcgtcatcagccatgaaatcgacgccgccagccccttctgggaggcatcgcgccgcgccctcgagagggacgacttcgagatcgtagtcattctcgagggcatggtggaagccacgggaatgacgtgccaagctcgaagctcgtacctggtagacgaagtgttgtggggccaccgattcacatccgtgctcaccctggaggacggtttctatgaggtggactacgctagcttccatgaaacctttgaggtgcccacaccctcatgcagtgctcgggaactggcagaagctgcagcccgccttgacgcccatctctactggtccatccccagcaggctggatgagaaggtggaggaagaaggggctggggagggggcaggcgcaggagatggagctgacaaggagcaaaatggctgcctgccacccccggagagtgagtccaaggtgtgactggttttctacaaccccctgtggcagaccagggggccagacacaggtccatggaggctgcagaatggagatggaagtagaggaggcaggcagtgtcccaaggaatggttaacgttgggagaggcccactgagtccaggatccagtggggaaggcccaaggtcctggtttgaggaaaatagagggtgggggtggagagagatcatatcggtctgtctgtgtttgactttgacatctgttcatgggtggatggatagacagaaggatgggcttatgggggttgaatgggaaggtgggcagaaagagacagtcaatggatagcttgggtggattgacagttggtgaacggccggtgcagcactcctttgtgcaaaatctacaggcacccttttcttccacggcatgggtagcccttgaaccaagggtccatggcttagggagcagattgtcaggtagactgcagtccccactcaccaccccccaactggcctccctatgtgtggcatgcctgcccaactagacaaagtggccacagagaagaaagcactgggtggaggtgggcacagatgtgggtgccctccccaccttcactgtcccataccgatgggtcagaaaggtgccaatggccttaatcctcaggttacaggcaaacaagcggtggaggtaaacccggagcaggggccctggagagggacctgaggagacccaaggacaactatttttcgagagagaggaatgaaaccttgcaggtactgccggagaagcaagaaggcagagagagattccgaaggaaaagaaaggccatgggaggggttggggatttagctcagcggcttgcctagcgagcgcaaggccctgggttcggtccccagctccggaaaaaaaaa

SEQ ID NO: 1935 - DNA, 4813 bp, Rattus norvegicus
gagctcccagcaatggctccattcctcagtgggagtcaccatgcctgcccataacaatacttcccgagagtgttcattcatgtggacatagaccagactgttatcagggaggaattagaaccagatatgctggacacagatcctggattgggcacacattatcttgtcggattctttcctgctgtaaatactgggaggtttgctcaactcagattcacccctctttgctgggcatttgactggtttcagggctgggtaggggtcccaaggagcatcacactcacttagaaactaaaccatctttgttcttggccctcaacttgagcccctcagtgtcttctaagtttactaacaaccctgacctgggacctcttcataactccctcaggggttgatttatgtgtagatcttactcctgctaggcagccctcccagggctaggaggcagatgagacctatattacaatctctgactggtaccatgtcaagtttcatcaggctagccttgtacccatcttggccatgaatcagccactctggttttcaagcagcttatagggcaggagcctgtgtcagggctggctggctgtgggaacagcccagcccaaagctggcttgagggaacattttgtgcaagacatttcccaagtgctggtgagattgtgccacagctctgcagcccctggcgaygcccaygcccttcccacaccttgttataaaagtcactgcactctccagccaccagttagctcttcctgggccggtgcctctgagtgtcttcggcatggcgctgcacatggttcttgtcgttttgagcctcctgcccttgttggaagctcagaacccagaacctgccaacatcaccctaggcatacctattaccaatgagaccctgaaatgggtgagtgcctgcctggggcatggacctgaccattgtaggtgcctttttccctctgggctttcctttccctgtctgtgttcctctctgggctcccggtgctgcccttccctctcctggggattgttgtggcatccccctgcctccaaacccagaagcatcactctgaggtctctcggcaggggacagagtcataggatggttgacttctgagttgtccatgggatcctggcctgaaacttcagtcttcccatgtatggctcaaacgccatcactcacctgcccctcattgttgctaactgccaagctccatactccaaaccctgttcatctgcgtgcctgcttctttcttcccagctctcagacaaatggttttacatgggagcagctttccgagaccccgtgttcaagcaggcagttcaaacgatacagacggaatatttttaccttacccccaacttgataaacgacacaattgaacttcgggagtttcagaccacgtgagtccttgcagcagccagcccaccccagccctggcctccaatccctggggcctagagacctgaacaaactgcccctgcctggcctcccagccgccttcaggaatcgggagggctgttcttgtctacctgcctcttgcccatctctccaccctgtgctggtcagatctcctctctctctgttacccaacttctctttgctttatagagacgaccagtgtgtctataacttcacccatctaggagtccagagagagaatgggaccttatccaagtgtggttgagagtgttgaaactcgaagctttctggggggaggggggggtcattgcaaggacctgagggggaagcagagcagggcagtttagtctgttaggtcactcctgaggctggtaagtagaagcagatttcaaaccagagtccagctcccagcccagtctcgcttttaaccattctttatgatccttkktgagctcagcgtggaacccatgggtgggaagccagtgacttcagccacatctcccatgtcatcyagggacwaacacaccaaacactggtgggccagatcagcctctccttagctttgaatcatccctaaggggatgttttaatgtttaaggggaagttttaactgtgccccaccaccccaccaccaagggccctttccaaggctccagccgttcagtatctataaagaatgagaagttaggctggcacccaacagggactgagcacatggtatcctcagggagccgcaggcatttgccatgggsaccacggcaccattctagtgtcttacaaagcccttccttccgcagcaggagcagtgaaaatctttgcccatttgatagtgctgaagaaacatgggaccttcatgcttgcctttaacctgacagatgagaaccgggggctgtccttctatggtaggctcctcagaaccytggaccccagttctgctgggccttacccttggtcccccacccacatccctatctggtctcccatttgcttggacccttacccagaacacaccccacccccttctcccttgcagctaaaaagccagacttgtccccagagctgcggaaaatattccagcaggctgtcaaagatgtgggcatggatgaatcagaaatcgtatttgtcgactggacaaaggtaagcgacgaggctgcatgatgccaccctggcagtggtcccgttttcaagtgtccctagaggctcagagagggtcagctctggttaaggcagcacagcaaggcgggtatcttgctgttgagaacgcccgtssstactgtgacagctgagattcacagagatcttagatgggcagtgagcctgaggtgggtggggttaagtaggagatacyagaaagacyggaatcaggggcgagaccagaagggtgattgagggaacagctggtgccagagtcccaggtttctccctgcctttcattttcacttcctatacaagccagagttgtgactaaagtctccctgtgccagcaagcccaatggccttggggatgggggggggtgccccacacaccaagtcatcttgatgctctgtctaaatttgtgcagagggaaaggccatcagctttggctttacccccagctgaggccacaggatcaaccaatcagcttkcacttagtgcagacacasttgatacttttgtgactccattctctgggcaccttgagccttttcctgacatcaccagacccccyaggttccyaggggaaaggtgtctgcatacagacactgccattgagctgttttgcaacctgccttccctgcctagccagccagtggggtcagtaaattcaccctgtacctgtaggcagaattgttcacagaaaacgcctccacttgggggactctgttcttccattcattggaataayaagctggaacttaagagaccagttggttctcaaggctgacactatcctgccctttcaggtcaaccacccccagaaatgtattcattgctagtgtgtgtgtgtggggggggggtgggcatgcccatgcacaagcatgccataagacgtgtgtagatgtcagaggacaactgtggggcgtgtcctcttccgacattctctcatgggctctggggattgaattcaagctgtccttcaggattacctactatgccargttttttgttctgttttgtttgttgttttgtttttgcatctctrccctgcagcccargttaccctgcaactcatagcaatcctcctgcttcagtatactccaacccagatgtgtgccaccacccctargctccgtcactttggtcactttgctctcttccctcgtatcttctaggataagtgcagtgagcagcagaagcagcagctggagctggagaaggagactaagaaggagaccaagaaggatccttaggccaggcatgaactcagctctctgaactccggggactgtccccatgcccactctacccccactcctgtgcacctcgattctattttccacaataataaaggtttggttaaacaatcagtatcacttctttgttccctccctcccttctttccttcctccctcccttctggagaggaggactgccatgagtggagacttagctaagtccaataagccctaccyagggaatctgagagggctctggaaggggcattttgagtcaggctagacggaactgatagaacctgattatagcttcttgctataatccccaaacccttagagggcacatttggtgaagacaaagtmgaagacccaagcagcggtgastcggtgagtggggagccyaggttgttgccgtttyctgtcacaggggccttcacttcagatgtgccattggaactctggaagggaggtgagttgggagacaggaaggcgtcgatgctagctatggtcacggtataaaaggccaaggcaagtggcatagacttagggctagactagaggggttggatatccccaggaagagaactcagtggtccgtgtgggacaccgtgagatgacactgcttccctagaggccagttgacatctatttcacaattgtgttcaaagtcctgaggcacagtcactcagtggcaaacacagggtctgagataatctttacacttgacttgattgggcagtcacctaagggatgtgctcggtgtgtgtctgtaaggacatttccacagagagtcacctgccttgactgtaggcagcgccatcccttgggcttggtcccccaattaacaaaaggagaaaactagctgagcacccacagttcatctgtctgctaagcttacgactgtcccagttggatacagtatgacatgggcaggtgtccctcctcacccatgagccccacttcaatagctttcgtcaactattttgtcacagaagggggaaagcagttcttatggagctc

SEQ ID NO: 1936 - DNA, 939 bp, Rattus norvegicus
  misc_feature (706)..(706): n is a, c, g, or t
cacgaggcgcggcttctgctgggcagactccggtgtgaaatggagtgggtgtgggcgctcgtgctgctggcggctctgggaggcggcagcgccgagcgcgactgcagggtgagcagcttcagagtcaaggagaacttcgacaaggctcgtttctctgggctctggtatgccatcgccaaaaaggatcccgagggtctctttttgcaagacaacatcatcgctgagttttctgtsgacgagaagggtcatatgagcgctacagccaagggacgagtccgtcttctgagcaactgggaagtgtgtgcagacatggtgggcactttcacagayacagaagatcctgscamgwksaagatgaagtactggggtgtagcctcctttctccagcgaggaaacgatgaccactggatcatcgatacggactacgacaccttcgctctgcagtaytcctgccgcctgcagaatctggatggcacctgtgcagacagctactcctttgtgttttmtcgtgaccccaatggcctgaccccggagacacggaggytggtgagrcagcgrcaggaggarctgtscctagagaggcaktacagatgsatcgagcacaatggttactgkcaaagcagaccctcaagaaacagtttgtakcaaystcaaggatgtataaagttggaaaacttstgmttagctctmawmmarwmwwmawmwnwatywatsytagaagkttagtttccccacctcccctcccttctytaggtggacattaaaaccatcgtccaaatacawrrraawrmhwraawmcattcacacaaacgtgtatcttactgagaagttcccygagagacgtttgaggcytgggatkccaaacttgatttattaaacgtatagtcmccmwmaaaaaaaaaaaaaaaaaaaaaaaaaaagtgtggctgccgcaagctt

SEQ ID NO: 1937 - DNA, 2237 bp, Rattus norvegicus
cgccgccgccgtcaccaccgccaccgccaccggctgagtctgcagtcctcgaggagatcccagccatcatgtctatacagaagatctgggcccgagagatcttggactcccgtgggaatcccaccgtggaggtggatctccatactgccaaaggtcttttccgggctgcagtccccagtggggcctccactggcatctatgaggccctggagctaagggatggggacaaacagcgttacttaggcaaaggtgtcctgaaggctgtggaccacatcaacagcaccatcgcaccggccctcatcagctcaggcctctctgtggtggagcaggagaagctggacaacctgatgctggagttggatgggactgagaacaaatccaagtttggggccaatgccatcctgggtgtgtccctggccgtgtgcaaggctggggcagccgagaaggacttgcccctctatcgccacattgctcaactggctgggaactccgacctcatcctgcccgtgccggcctttaatgtgatcaacggtggctctcatgctgggaacaagttggccatgcaggagttcatgatcctcccagtgggtgctgagagctttcgggatgccatgcgacttggggccgaggtgtaccacacactcawgggggtcatcaaggacaagtacggcaaggatgccactaatgtgggggatgaaggcggctttgcccccaatatcctggagaacagcgaagctttggagctggtgaaggaagccattgacaaggctggctacacggaaaagatggtgattggtatggatgtggctgcctctgagttttaccgcgatggcaaatacgacttggatttcaagtctccygctgacccttcccgatgcatcactggggaccagcttggggcactctaccaggactttgtccggaactatcctgtggtctccattgaagacccattcgaccaggatgactgggcagcttggtccaagttcacagccaatgtcggcatccagatagtgggtgatgacctgacggtgaccaaccccaagcgcatcgagcgggcagtggaggagaaggcctgcaactgtttgctgctcaaggtcaaccagatcggstcagtcacagaagccatycaagcgtgcaagctkgcccaggagaacggctgkggggttatggtgagtcatcgctctggagaaaccgaggacacgttcattgcagacctcgtagtgggactgtgtacaggtcagatcaagactggtgccccatgcagatctgaacgtctggcgaagtacaaccagctcatgaggattgaagargavytskgsvasraggctcgcttcgcgggacacaacttycggaatcccagtgwgctgtgaccccmtgcttgcctgaacaccggaacatcatctcattctcctggagcctctttcttgctgtcccgaccygccatagttaccttgataccttgagccccaagtcacccagaacacctcgactcacctgctctggctgttcttggcttccacaaccccttgctgtctcctactcttcctcctctctgggccccatttttggggggattccagtctgcccactttcccttctattctctctaatcttaaaaaaaaaaaaaaaaawgrcgackakaagaagcgggtccacagaagaaccgccagcgtccgasaggagcttcaggattggtgtgttggggcgtttaaagtggggccacgtggcacgtgtgcttccctgccatccatggtgtgttaagccttgaactatgcacagagctggtgtttggggarwgstgratrwgyktgygkycrcawwkgwttktttktttwtttwtttattcacttawttatttctcagcctgtcagtcgtctgccattactcttacagtctgaaagcatcagtattttyacgtggttccatttcaagatgacctargatgggaggttttgttagcatgggaaaggtcacagaaaggttagcaatggtttttcatttggtgcactaactgaagctcgrtacwtkacagaatggggctgtrwaccckgrgacwkttctcmtataactctctcccccagccstaggttcctcagystktttctccggbtgcaccagagcgmtgcctcawtcccccgtgccatgtcccacagttgccactgtctctgtggctttgraatgaccaccactattaaagtctgaaycacmstgyrcvscaaaaaaaaaaaaaaaaa

SEQ ID NO: 1938 - DNA, 3108 bp, Rattus norvegicus
tgagcatcgagatccccgcggggctcacggagctgctgcagggcttcacggtggaggtgctgaggcaccagcccgccgacctgctggagttcgcgctgcagcacttcacgcggctgcagcaggagaacgagcgcaagggcgccgcgcgcttcggycatgagggcaggacctsrrssgacgmsrgckcwrccrcmggrkgcrgaacccccagtaagggtgtcaacttcgcsgaggagcccatgcgctccgattccgagaacggcgaagaggaggaggccgcggaagcaggggcgttcaacgctccagttataaaccrgktcacaaggcgtgcctcggtatgtgcagaagcttataatcctgatgaagaagaagatgatgcagwgtccaggataatacatcccaaaactgacgatcaaagaaacagattgcaagaagcctgcaaagacatmctgctgtttaagaaccyggatccagaacagatgtctcaarkattagatgccatgtttgaaaaattggtcaaagaaggggaacacgtaatcgatcaaggtgatgatggkgacamcttttacskcatcgacagargaacatttgatatttatgkwaaatgtgatggcgktgsaagatgcgttggtaactatgacaatcgtgggagttttggagaactggccttaatgtacaatacacccagagcagctacaatcactgctacctctcctggtgctctgtggggtttggacagggtgaccttcaggagaataatagtaaaaaacaatgccaaaaagaggaagatgtacgagagctttattgagtcactgccattcctcaagtctctggaggtttctgaacgcctgaaggtggtagatgtgattggcaccaaagtttacaacgatggagaacagrkcakwgctcagggagactcggcggattcgttcttcattgtagaatctggagaagtgagaattactatgaagagaaagggtaaatcagacatcgaagagaacggtgctgtggaaatcgctcggtgtctccggggacagtattttggagagcttgccctggtcactaacaagccaagagcagcatctgcacacgccattgggactgtcaaatgcttagccatggatgtgcaagcatttgagaggcttctgggaccttgcatggaaattatgaagaggaatatcgccacctatgaggagcaattagttgcactgtttggsacaaacatggatattgttgagcccactgcatraagcaaaagtgtggggaagaaagcgcgttagtgaagcagttacatagcagtggttagtccmccgagratgtgttygtgtagatcaagcattttctgtgacttcaggttttccttttttaaacagaaaccatttacaatatatcagtgamcagtagtgatttaatagtaggctttaacatcactttytaatgggtagttcataaattaacataatcataaaaacgactttctatttcataaaactgactgaaaggtttattcaaatggttataatatattgagagcatacatgtttaagaagataattaaaagatgkactcataggccgacctgtgtgtttggattattcaagtatcgtgttagtgactctgcccctttacgagggaagctggcacgtggcttgtgcactcacattctttttataactcgtcagacagtaagattgccaatcatttcattttctaccttttctggcttagtaagttatgtgttagccttggcctatcggtaacatggtgtggaaatcatatgcaattttaaaattttttatatttttgcaataaactacatttcaacttctttgacaactgtcagccagcagcctgggtagttgagtggcttttggggcctggtaatttagctgttgtgatgattgggcagagagccttttaggatgaaagctcataactgcgtctttcattatcctttctccatcatcaccgcttcccgctttgtatttagcaacctcctgggttccttacagatcgcattttgacgtttaatgtcacaagggttgtattggttctcaaggcaatttcatcttaatctgacaatttgttttgtcctctaaaagtcccgaatcttctattcagaaaaatgaaagcttccctatcaaaagacatttgggattcttagcccacgcccacagaacatggctttgctctgtaggtcccagtgctgcgaccctgtgtgtgtgtctgtggtcccctgcccttccctgtcctgagcaccagccagcgagcacattggtcagcagccaatcaagtgcgtttgccctttccaaccttcaaaaacttcaacaacggtggtggaaagaagtctgtgtataagcaaagccatacatgagtattaatgggatttttctctatcctacaccttattaggccttgttcttagctttaaagtcagcccacagttaaaagtacacaaagtacaaaattttttttggtcaacaagatacttacttttatgccaaatacgatgaattgttaaaaccaaagcaatatacttttatgtgattttcaggccccttgaccaaatgtctaaaggcattaattctcaccagtttaattcatgttgaaatgggtaattttactttggggaacatgtttctaaggaacagaggtatcatgtatgttaaattcatctgtgactgtctcgatcttacaagagaatgtttacagtcctacgtgtacgctatactgtwaccwacacctttagccgtgcttttgaaatgtcagtcttgcaaaatctttamgtaggaaaaaaagctctctacatgaaggtaacatgttttytatttcagagttcagaagccatgtgttcaaacaagaaacaaatcccaaaaacagaaaawcaagaacaaaagccwcccaaattcckggctcatccttckgtgttcttttctctcttttccaagttctctttggttgcattgcataggytgagtgttgacgttcacggaaaccaatgcctgtggaataaagagccccaaccaaggctacagaggccagctgtgttattttcagtattgttggttatatttaaattttccttataataaagcacacttttataat

SEQ ID NO: 1939 - DNA, 418 bp, Rattus norvegicus
cccccccccccccccccggcgcccgcagcccgcagcccaggcggcgccggccgcggacggagcccatgcgccgacccggtcggcgcccgtccacgcgccccgccctgccccggccccggccccgggggcagtcgcgccagcaagcggtggggcaggagctcctggattggcagcccctgtagaagcgatgacagaatacaagcttgtggtggtgggcgctggaggcgtgggaaagagtgccctgaccatccagctgatccagaaccattttgtggacgagtatgataccactatagaggactcctaccggaaacaggtagtcattgatggggagacgtgtttaatggacatcttagacacagcaggtcaagaagagtatagtgccatgcgggaccagtacatccgcacagggaagggc

SEQ ID NO: 1940 - DNA, 3373 bp, Rattus norvegicus
cccgggaaagggaaaatcagaaaggcccagaaaggcccagaaacatacatacatacaactagacttggggtgaacgaggagcatgattagctgagaagagccaggattctcagcgaggcagaacccataccaggccccagccccccgggcggcccgttgagtaacagggcttggacgctggaacacccgagaaaagtgccgaggctgggaagggtaatcacagcatcacagcgaggccggctacggtcgggagcgcgtactcttccgagtgagagacagaaagagaggacccgagtctcacagccctgagggaactgacaacgacaagaccccactctccactccccgggggcccaacgtgaggggaggacctggacggttaccggcggaaactggtttccaggtgagaggtcacccgagggacaggcagctgctcaaccaataggaccagctctcagggcggatgcgcctctcattggcggtccgytaagaatgaccagtagccaatgagttcggctggggggcgcgtaccagtgacgtgagttgcggaggaggccgcttcgaatcggcagcggccagcgttggtggcatgaaccaaccagcggcctccaacgagtagcgagttcaccaatcggaggcctccacgacggggctgcggggaggatatataagccgagtcggcgaccggcgcgctcgatacyggctgtgactacactgacttggacacttggccttttgcgggtttgagaggtaagcgtcgcggcctgcttccaggctaccctgattttggttcgtggctmctystgacmctkrgmacytytktsgyytsagatcagaaccgtcgtcgcgtttcgggctacagcctgttgctggactctgtgagacacctgaccgaccgctgagcgactgactggtccacagcgccggcaagatgaagttcactgtggtggcggcggcgctgctgctgctgtgtgcggtgcgggcggaggaggaggacaagaaggaggatgtaggcayggtggttggcatygacttggggaccacctattcctrcgtmrgtgtatkcaadaacrdmsgcgwggagwtcmtagccaacgatcagggcaaccgcatcacaccgtcgtatgtggccttcactcctgaaggggagcgtctgattggcgatgcggccaagaaccaactcacgtccaacccggagaacaccgtcttcgacgccaagcgcctcatcggacgcacttggaatgacccttccgtgcagcaggacatcaagttcttgccattcaaggtggttgaaaagaaaactaaaccatatattcaagttgatatcggaggtgggcaaaccaagacatttgccccagaagaaatttctgctatggttctcactaaaatgaaggaaactgccgaggcgtatttgggraagaaggtcacccatgcagttgtgactgtaccagcttacttcaatgatgcacagcggcaagcaaccaaggatgctggcactattgctggactgaatgtcatgaggatcatcaatgagccaacagcagctgctattgcatatggcctggataagagagagggagagaagaacatcctcgtgtttgacctgggtggtggaaccttcgatgtgtctcttctcaccattgacaatggtgtctttgaagtggtggccactaatggagacactcatctgggtggggaagactttgatcagcgggtcatggagcacttcatcaagctgtacaaaaagaagactgggaaagatgtcagaaaggacaacagagctgtgcagaaactccggcgtgaggtagaaaaggccaagagagccctgtcttctcagcatcaagcgaggattgaaattgagtccttcttcgmwsgwgmmgacttctcagagacccttactcgggccaawtttgaagagctgaacatggacctgttccgctctaccatgaaacctgtccagaaagtgttggaagactctgatctgaagaaatctgatattgatgagattgttctggttggcggatctactcgaattccaaagattcagcagttggtgaaagagttcttcaatggcaaggagccgtcccgtggcatcaacccagatgaggctgtagcatatggtgccgctgtccaggctggtgtcctctctggtgatcaagatacaggtgacctggttctgcttgatgtgtgtcctcttacacttggtattgaaactgtgggaggtgtcatgacaaaactgattccgaggaacactgtggtgcccaccaagaartctcagatcttctccacagcttytgataatcagcccaccgtaacaatcaaggtstacgaargtgaacgacccctgayaaaagacaatcaccttctgggtacatttgatctgactggaatccctcctgctccccgtggggkamcccagattgaagtcacctttgagatagatgtgaatggtattcttcgagtgacagctgaagacaaagggacaggaaacaaaaacaaaatcaccatcascaatgaccaaaaycgcctgacccctgaagaaattgaaaggatggkcaatgacgccsagaagtttgctgaggaagacaaaaagctcaaagagcgcattgacmcgaggaatgaaytggaaarctatgcywmctctcttwagamccagatcgragaymaararrwgytskraggtmarctktctyytgarratammgrvacsakgraraaagctgtagaggaaaagatygaatggctggamagccaccaggatgcrgacattgaagactttawagcyaaaaagaaggaactagaagaaattgttcagccaattatcarcaaactctatggaagtggagsccctcccccaastggtgaagrggatacatcmgaaaaagatgagttgtaggtgcactgatctgctaragctgtaatattgwaaawactrgactcaggaactttcgttgggrgaaaattgrgagaacttaagtctcgaatgtaattggaatcttcacctcagagtggrgttgaaaatgctawwrcccaagtgsctgkttamtgcttttcattarcagttgctcacgtgtyttggggtcagggaraggaggaattggctattttaaaaktggggaaaagytgggtcagggtgtgtgttcmccttggatatgttytatttaacggwtggktcatgcacatytggtgtaggaacttttttytaccataagtgacmccawtaaatgtttgttwtttmmmmwrrwmwarwwwwwrwraaaarmwtgtaattawatccatcttttattttagataactaaaatttaagrctggaaaaaaaaaaaaaaaaaaaaaaaaaaaaaaaaaaaaaaaaaaaaaaaaaaaaaaaaaaaaa

SEQ ID NO: 1941 - DNA, 17249 bp, Rattus norvegicus
  misc_feature (162)..(162): n is a, c, g, or t
  misc_feature (567)..(567): n is a, c, g, or t
  misc_feature (766)..(767): n is a, c, g, or t
  misc_feature (1661)..(1661): n is a, c, g, or t
  misc_feature (1664)..(1664): n is a, c, g, or t
  misc_feature (1731)..(1732): n is a, c, g, or t
  misc_feature (1816)..(1816): n is a, c, g, or t
  misc_feature (1832)..(1832): n is a, c, g, or t
  misc_feature (1959)..(1959): n is a, c, g, or t
  misc_feature (1961)..(1961): n is a, c, g, or t
  misc_feature (2023)..(2023): n is a, c, g, or t
  misc_feature (2207)..(2207): n is a, c, g, or t
  misc_feature (2524)..(2524): n is a, c, g, or t
  misc_feature (2533)..(2533): n is a, c, g, or t
  misc_feature (2544)..(2544): n is a, c, g, or t
  misc_feature (2553)..(2553): n is a, c, g, or t
  misc_feature (2637)..(2637): n is a, c, g, or t
  misc_feature (2893)..(2893): n is a, c, g, or t
  misc_feature (2968)..(2968): n is a, c, g, or t
  misc_feature (2993)..(2993): n is a, c, g, or t
  misc_feature (3274)..(3298): n is a, c, g, or t
  misc_feature (5775)..(5775): n is a, c, g, or t
  misc_feature (6208)..(6208): n is a, c, g, or t
  misc_feature (6512)..(6512): n is a, c, g, or t
  misc_feature (6882)..(6882): n is a, c, g, or t
  misc_feature (6905)..(6905): n is a, c, g, or t
  misc_feature (6908)..(6908): n is a, c, g, or t
  misc_feature (6912)..(6914): n is a, c, g, or t
  misc_feature (6932)..(6932): n is a, c, g, or t
  misc_feature (6978)..(6979): n is a, c, g, or t
  misc_feature (7366)..(7366): n is a, c, g, or t
  misc_feature (7382)..(7382): n is a, c, g, or t
  misc_feature (7386)..(7386): n is a, c, g, or t
  misc_feature (7389)..(7389): n is a, c, g, or t
  misc_feature (7396)..(7396): n is a, c, g, or t
  misc_feature (7455)..(7455): n is a, c, g, or t
  misc_feature (7530)..(7530): n is a, c, g, or t
  misc_feature (7554)..(7554): n is a, c, g, or t
  misc_feature (7615)..(7615): n is a, c, g, or t
  misc_feature (7689)..(7689): n is a, c, g, or t
  misc_feature (7704)..(7704): n is a, c, g, or t
  misc_feature (7722)..(7722): n is a, c, g, or t
  misc_feature (7829)..(7829): n is a, c, g, or t
  misc_feature (7894)..(7894): n is a, c, g, or t
  misc_feature (8091)..(8091): n is a, c, g, or t
  misc_feature (8646)..(8646): n is a, c, g, or t
  misc_feature (9558)..(9558): n is a, c, g, or t
  misc_feature (9568)..(9568): n is a, c, g, or t
  misc_feature (9570)..(9570): n is a, c, g, or t
  misc_feature (9632)..(9632): n is a, c, g, or t
  misc_feature (9906)..(9906): n is a, c, g, or t
  misc_feature (9911)..(9911): n is a, c, g, or t
  misc_feature (9914)..(9914): n is a, c, g, or t
  misc_feature (9941)..(9941): n is a, c, g, or t
  misc_feature (9957)..(9957): n is a, c, g, or t
  misc_feature (10061)..(10062): n is a, c, g, or t
tctagacccaatgctttcctcctctctcagccccatcgagcatgtgcccattgctgaggggggagggtgggtaaaacatagccagctgacgacctttctggaacagttggggaccttgacctcctcctccaggccctgtctcctcatccttgaccgcttggncctctctctgggcattctactacttggtcaggggctcgttgggcacacctgccccttccatgcccgtgcccagccaccatctgctggccaatgggtgccagagaagatcagatgtcactataacatgaaggggtgaggccgttggacagtgcctgctgctggtcctgtccacaaggagcccccaacctttctcagactcaactgcaggtgggtatggatgggacagccctgcctaggagtgggtgactgtgtcagggcttaggctgtttagcatataacggattcagtgggtacctgtgcctcttgctgtgttaaatgttgatgactagaatcatggcgcttgagaacttgggatgacatagagtacttactctaaaccagactagaaaggcatgcaaagcaggnaaggagtggggctccgggcgatctcagaactaaggagtcctctaaggtatgatctagggagaagtgaagagggtgaatagatcaatcaagagttgcagagctctagactgcgctatccgctgcctggcagcgtctgaagccactctggactctgaaagaatgaccttagaaaaaagaattggatttcacgtcgatcccnnggaccgtaggagctgggtccattttcgagatagcttatctcctcacctaggtagaaactccagtgagagtatctgtgaccgcctggggcggattcctaaggttcaggtgaagacaatcaggagccaagctgaaagccggacagggaatgaaagtccctgggcctaagccaggaagctcatatctgatccgtgtggctgggaaaacaggtgggcccggagccctccaggccccccgcctttgttaagtctccaggctgggattcctgacttcctgagtttgaggctttctagaatgtccttggaatccttggaggagatgggaccaagcaaggttggtcagaggagactagggccaaagtgggaagtgacaagggtctttcttagcagcaagtgagtgaagggccccttacccctttttgggctttgtcacctttgaaggaagggaccttggcatggatccccaaggaaactgacctcgcaggctattttcatgcaccctcttctaaggccagaattccctacagaacaactgttttcactctccgtcgtttgttgtttattggtcatcccatccagtccctgacaccccacctctgcctctccctaatttacagggatgttgaaatgggggtggggaggcatagatatgctcaagtgggccttcaggacctctatagaagaccagaaacctcagtttcccaacctcaaacaagggcattgctacctcactttggaagggtgcaaggctgtccttgctggatggatgcccgtagagccaggaggggagccaagatggctgggttgttctcagtatcctgcccattgccatcttgggtttcaggacagaggagtcttgctaatttgatgcctatttttggacatttcagctgccantgntccttataaacgcatgacaccacacatacacacacacacattacccctccctccattgctggcacannaccccacacacacattaccccctccctccattgctgacaggtgtgtgggtccagtggacaccagaggtagcaaaacctaagctnaattgctccaccccantggccttcccaccccacagagtgcccctgttggaggtggggagtgcagaagacagtaaagaaggcagttagaaggactggtagagatcagagcagacgaagaagatggggcaggtctggccaggtgntntacttatggttggtgaagtctacacagaggctctgggagaggcagggctgagcctggtgctngacgggcctcccagtatctgtgggttaattttgcaggaagtttcagttgttctgggaaagctaatgttatcaacggggcttagaaacagctcccaccttagcattgggctgctggtgcatttttagccactgaacaagttttcttatgtgttccctggggacgccaaagctattgtcttcaagntcagctgtgctgtgtttttatgacctttgtttgtcaaaccctgagtcaacattctgatacagttctttgaaggttcccaggccccagacactgtaggcatgtacaatgaccaattcacaggaaccaagttctctctctcttctgtagccatcatgcctgagcctgtgccatccagtcccagatgtaggtgctaggaggacctgaagctctgttagctcaatccattcggcacatggctgtcagctcaggcttccacagagaagtttctcaggctcactctgtgagtccagtcccatgtcctaccctgtgagttcagnctccaaatntttcacagaantgggagatngagactgaacatttatggacactgtaatttgaaggggtagctcagaggatttcagagaacacaaaaaaggacccggggcttgancttctaaggcaaacatgaggcacagcaggagttttgagctcactcagggaagaagagctggcagacagaatatctataccttaaagttgggctcagctttttagggtggttccctagccagagcatcaattcagacaagcaaggatgtccccagatccagagggttcctgaagctcttacccacatcctgtgactgtctctgcatttttggatgcattccgtgaaaatgctggtgacaggggcatctggccagggntggatgtatatgacaaccttcccacggctgatcagctatggagtctaagtcccaggctggaaccaggaagagaanaagggggatcagagtcatagggagnaaggtcaattaggggatcctcaactgcagtctataaacattccctctaggcccccatctccgagcctgcttttgtgaggcttctaaaccaaggcaattcctaaactgtcccttttgttgatgttccctctccagacacaacccaccgccactatgtctgacgaggaaacgtgagtaccctgctgtatggtcacctctcttgctggtggaatgggacccttgggacttacagacatttgcctcaagtcaacagttcaaactcatctctctctctctctctcnnnnnnnnnnnnnnnnnnnnnnnnntctcctctctctctttccccaccactataccctccaccatgacagtgaacaagttgagggtaagtaccttctctactttctctctatacacttccatctctagacgaagagtcactcttgttgtgggaggcgaactttgactatggacccaatggggtacccattgcccaagactccctgaccagctagatcagtcattgagcttcagagagatccctctcccaaacaacccttgaatctctggcttactttttttcctgtggtgctcacactctgacctgccccaaacctgtatacctgcgtcgtctgtgaagccctgagaactcgagtctgggtgggcagcttccctgtccctgtcacctttggtcactcacatggccatagcaggacatgaaatctagagacatcccaatgtctcccttgtggctgaaatgttttcccctctaagccacaaagcctctgtgttcgtgtgtgtgtgtgtgtgtgtgtgtgtgtgtgtgtgtgtgtgtcccccccgcgcgcgttttcagatgtgctacacatgtgttcatacgtgtgggccagagatcaaccttggatgtcctttctcaggaactctcctccttgccttttgagatgggctcggggggtcgggccctctctcactgaacctgaagcttgatgattagtctaggctggctggccagaagcccctgtgtgtgtcctcctgtctttgcctctcggcactgggattataagagtgtgtaaccacattgccttttatttgaatcctggtatctgactcgggtcttcgtgcttacatagcaagcactttgctgactgaccatctccctaagctaccacaaagcactgactcctctgggccaaagatcccaaacctgattgatccctagctagctacaagtaccagctgtctacagtcagagcaggcgatgtgtccttcaaacgtctcaccccctccagtcctatctctgctaactcagctcctttctttttgttctattctaaatgcagaacagtacgaagaggaaggtaactcaaggaagtcagaggcctctcaaagcccatccctgggaaggccttgggcatcctccctgagctgacaattaacagtttactcccttcctcaagattgcactattaaccatcatcactcatcattaattaactgttattgattaataatgccattatttaattaatggtcaatggcttgatcattaataaaccattaatccgctatctcttcggtggattaatagacactcattaaccactcacacatgccctgtggtcactgtgtccatggtgtgtgaagcggggtgttgtttctgggccattaaaactcattcattaataacaaaggtctttgactcatgcactgtaaccctcagagtcactgtagcttctcttatgtctccttatctgtctctccagtgctttctctgtctctctttgtctccatcgtcttcctctacttctttgtctttatccttttctctctctctctgcctttcttaagcatctctccttcactgtaccttggctgccagagaccctcctggctctgtcgtgcctgggcaggtgtgggcgggcaaaacctgagtctcgtgcacctggaagcagcccagcacagcagttccaggcctgacaagctgtctgctcctaacacctgctcagcttaggagactcacgagactcaccagacaggccatcctgcaaaggctgctgggtagctgtgtttgcaaaatattttgaaaatacctgctaccttaacaacctgagcaaacatttgctgtcagtagatgaaagctgttctgagtgagaggtggcctggggctgcccttcctaggttggccataagggtctgttttctcaaagcctcttgacctacattcattctgggcagctagatggacacctaggtcagaaatggttaaacacaagagcttcacccagatcctcactcccatgccctatagaatagaattacaaacccagacatgggatgtagggtatagaggcaaggcctgaggaaggtacaaactcaggttaccacagggacattggtggatgatgcttaagggtcccggttcactgtgctagccgctgtgggccaagcatgggaatctgacctgctcatcctgcttgccagagaaccagaaagccctgtctaatgtctgcccttgtcattctcttccctacatgctatctctctgtcacctttgctcatcctcagaggaggcccaggaggaaggtgagttggcttaggacttgacccccacttgcccttgccctctaagtgaatttgtgtaaccttccctcttacaggctgagacttcagcctcagtctctaagggcctgccgtgtgctcctttctaatcctatcctttctcctccctgccaccctgcactccctggcattcctccggctgcagaagtccaggaggaaggtatgaggatacaggacttctggnccccatgtggagcccagggtctggctggagcatgtggtgtggggaagggggcaggaaagcaaggtggcacagcaaccaggggccccccatgtggcccacataacccactaaccatggccaacgcttgaccaaagagaatgagaattcaagaagcccacaaactgtacagctacccaaattttgaccaactgtttcaatgctagagggggacgctagtaaggagtgatggagagactatagagcaggtgtgcgttgagtctccttctcccagagaagtcaagtgaaagccaatggtgatgactgagacctttgctaagcagatccaccaagccaaatgtccaaagagctcaggtcattaggaagagatgcagcactagccagaggcctgcttcagcgtgatgtgaggacagaccgcagcctcctccctagtcantttctctagccagttgtgtcccccatcaaccccaatcacactctcatctcaaccctctttaggggttatacatgcagtgtccaaggaaagggctttacgactcgctctgggatggcaagaaagaagtatttggatagactctgctcccttgtacagagctcagtaggcttcagctctagattgggccagctgaggacacagagtggaagatgaggaagagctaaatgacacgctgcaacaaaagaaagaacccgatcccaaccctcagtctcgttccctactgtgagcaggacaggttggggtngagtttgttctcttcagcccctcctatcccaagtctgagccggggcccagaatctgggctaggatgaggtgcgtgaccccaagctaactctaacagtattgctcgctccctgcacgtacccacccccggtgaccggctgccttttaacctggatcccttctctgacctctgacccgtggttttgcctcttgttccgtggccctccttagccccggaaccaggtatgctgacgtgacttcaatgccacatgacatatgtggccatgtgggggtgtgtgccaggagccagccaaaaaggaacaagagggtgccgtgtaactcacccatctctgcctataactgtttgtccctctccctctctcccacactgncttgcactcattcattctctctnctncctnnnttctcctgtgctgctcanagaggaagtccaagaaggtacggtcaggtccaccttcacagccatnnccctcctccctcacccctctctgattaactgtctctactcccttaccaatgcacccactaccaactaagccctgctggcctctgggctgaggacagtacagaatggggaagctagcctaacctcctgggctcggtggcagacagtgtgagtttcagtcacagcatttaaggacaaggagcaacaaggctcttcttgtgcctccgtcagagactgaatggggcgtgtgggctgcctgggtcttcagagtcagtcttacttaggaagatggtgctagagattcatggggacctctgtgacctcatcaggacatgtagagcaaagcaaagaggctggataggtagcctccaacctacccagatagcaagccagagggaggaaagtaagangggtgagtctgaaggnaggntgnaggggcnagtaggtgaagcagacagtcagctgaggccaaggtggggatgtcagagacctggaacancaggggccatgcatgcgaacaggcaatcagtcagatcccagcatcccatcctgctgcctggcctgagccagacanacccgtcaagcagaattgacgggnttggaggagggggctgtcagcctagcagcagggcttgttacactggggaagggaggagggnctggactcaggaacccattcagcccctccgttcacatgctgacaggctcctggtgctgggcctgaaaggaaggnacctggataagaggnatgctaggagagggaacnaagggatgttctcaggccacacatctcaggttgccaggcctccctgggactagaactgagacttattggcagacaaatggacagacagaagggtggagagacagaanacgggggaagccttaccttgccattatgcagctgcctctcatacaactcttgggagcacaccatncttccctgtcctcagaatgtcataagggtagggtgagcccatcagtccctcacttcctccccaggccactcccctggacctcatgcaggcgaaggtctacagctctccactgctccctgggcggccactcctaagatgttaggcaagagtgatatcaggttttctgtagatctaagctgcctattcaacacactttngttgttaagtaaccatatgtctttcagaggggtaagaactaggtcttccagaagggcactggtcagaacatgcagcaagaccccccacccacaaggtgatggggcttgttggctcctggctaagtgcaaatgtactaggagtcccagatgcttccctgtcaggcttcaccattttccaggcagacagaatgcacatgtgtcagtggtcttgcttctctaaagcagcgcagggctaatggacagtgcaaggaaggtatgtagcagccgtgtcaatgaccagtcccaacctctgctgatgggtcacactcagaggaagtagcctttcctgcaggacaaccggcctagcaaggctctaaaggaagggaaggaagagaggccccaccaaaacgcatgggaaaaagcctcttggaggtcagagggcaggttcccaggatcaggaggccctgtcctaggggctgaacctgtcaaagctcacagatacggatgagccaaaaaatatttttggatccaggcaggatctatgaacaaagacttcgacaaagagtttgaaatgangtgactgtcaaaaccatagtatgtgcccaggtacaagactaggtgggagaaggcaacggaagattccatgacactggaaggtagagaacagcctcaggatcttcccagtgggaaacctagctccaggtccccacactctctcctcagagcccagccttcttgcccagcatgcacaaagccctgggttcagttaccagtgctgcatagaccaggtgtggcagagcagacccctcatcccagcacttgggaggtggagggaaaaggaattcaaagtcatccttagctacactgagagttagaggccagccttgactgcaagcttccacgaataggatgaagcctatgggaaggtgtaggagctgccctgccactctcaggcacgggctctgtcggtgcctgcctctgctgttccgtgtggccaccgctgctgtgtggcctctgcacttctgcagcgcgtggcttttttcttgcatgtgcgcttgccacacctatgaagatgctgtcgccgaggaggagcgggaggaggacgaggaaggtaaggcctgcagccgctgttgcagccccctgctccacctgcacaggcctctcgaagaaggaccaacagtcagtgtctgtgttgtcaactctccagccttttactctatctgtccatgtctgtctgtcttccttttctccctggcatgggacctcagtgacaaggtgctaaggctttatctgcagccgccatggagttagcgggctaaggcaggcttctgtcacttaagaagcagggtggttggttggtcagtaaagacaagccagcatctcagatgttagaaacctgtcccctaggcctcttcttaccttcctcctccatcctctaggacacacatgtcttttttcccttcttcccttcattgcccacaccctaantccttcctananccttagggtaatttcatagcatgtcttctgaaagaggtcgcctggtggcttgagtagaactntggcaggagttcgtcctaccttacctgatctctttttcttcctcttccaatcatagctgtacatgagtagaggagaaaccaagacccaagtaagtgtgaatccaggtagagctatgggggactgccagaacagggtgggttgggcagtccaggcctgttttagaagaaaagctcaactggcagaggataatggggactatcgttggcagtgaaatgaatagaaagacagtaggttgggattctttcccatcagccagtgcagtcaaggaggganactgncancaggctaaagctcaggattgagactgnaggcaccacagatctntctgccttagtacgctggagactgcccaggtctccagataggtctgtttttaattttttaaaaatggcttgagaggtgaggatctctcacttcagatgagaccnnactctggatggacccctccaaaagaacagagctgagcccctgtgagccactctgcagagaggtagatgaatccacaaccttccatgtgccgttccttctgtccctttgaacctctctgctggtccccctctctgagccaggttgaacttttggcacttacccctcattccctccccattccccagagaagaatggagctaggtgaagcgtgggctggcccacactcctcccttgaatgctgttttaaatcaagttcacataaagtaatgcaggattctgagatagtttctcatcttagaaaaattatttatgttccaatatgaaaataaaacacctcattaagaaaatttggaaaatacataaaagtcaaatgaagggaaaaaaatccatccataattctcccactcacccaccagccagactgcggaaaagaccagggaggggaaaaaagatctttatttcttcctgttctttttctacatgaagttcttggaaaataaagatcttgactatgttttttcaagcacaggactgtctatacagccttgaattctcgttttaaaaaaaatttagcactattcataagtatttttccatgtttttacatagtcttcttaaatattttgatggccacataatattccatcaattggacaaaccataattttcctaaccattccccgatcacaggcttcccccaatattttacaatcataaataacgctgggcagaaatcattttccagcttgagggctatttgctaggcacattccagaactggaattactgggtcaaagaagaccaatgctctgaagactttgacgttcactgccaagttgctttccaccagggcccagcaaggcgtctcctacgtgggctgtgagcagtcttgtgtcccacaccctccgcgccaaagggaacaccgggcgtgtgccctcactcgttgatgacagccaaccgcatctcatggttgtttgtcttcgcatgcctctgatggcaccaccactaaccgtccatgtttgttaactggtcgtctttctttgcaagtcagtggcttggccctcgctcgtttatctcatggccgacacgtctccgtgtttgcttaatcgtccgtttactcagggatataaatcttctctgtatttgctgaaaaggttttttctttttcttttttttttgttctggatattttccccctctctgtttcaatttttgcttctttttttccccccacatatatatagtttttcacttctgacatacatcttctgtatagcatcttccttgtaggaactttgggcttctagagcttatgaaaaatcccttccctctcccaggtttgtacctgtattctagctcccctttcttctgtggcctgttctaaaagccgcggcctgttctaaaagccgcggttgtctgggctctctgctccatctggaatgtgttggcaggaggagggggtgcctcgttacgggctcctcgttactttgggcgctcacaaagattaaaagtgttcagagccacagaacaggtcttgccccagaagctgatgctagtcactgcccctggaggacctgtggtagcaccctgccttctgttaggacctggctacatttgtttatgtgtctgagaaaggtggcatgaagcagtgagtaaaacaagaggtggacagaagcggggtgataccttctaggaaaggacaaactactcctggggtaggggtaggggacatgggttagaaacccaagaacaaagggtcaggcaaagcttctttagctaagacatacatgctctgttgggtgccaggggtgcaagaaagagaaggagggccagcctagattccagtctggctgggctcctctgtgggatggtccagttgtccctgcttatgaaacaacttctgtgtctcttccccagacttactgctcctaagatcccggaaggagagaaagtagacttcgatgtaagtttgtgggacccatatcaccctcaccccaaactctagcctttgaactttgggctaggcttcaggtcttctcaagccaccatacgcaaggcagcccaactctaggccacactcccctaattcactcctagagtcccaggaagtcaacatcccttcccactccctccattcattcttgaacccaaaatccatccatcatctgcctatcctctctgaactgtctctcatttagccacgatcgactgtccatttatttgttcaagcactcatccacgtatgcagcaagttagtctcacagtttcctctctaccatggccaagaggctatctctgaggatgacagagccaagtctgagccaggtcactcaagaattgtgctgggcttcatgattggctagggtctagattcctctatgggaagggcattatcttgatcccgtggttcaggccacactgagcctcactcaggaaggcagcagttgtagggaacctggcagaaggtatccctactgagtggtcccagctgcaagaaaggtgaaacttttctcttcctccccacccaggatatccagaagaagcgtcagaacaaggacctcatggagctccaggccctcattgacagccactttgaagctagaaagaaagaagaagaggagctaattgcacttaaggaaagaattgtgagcgctactgccctggaactcctggtactccacagggactgggcatgacagggaaggctgaccagtttggcttcttggctgcaggaaaagcgccgtgcagagagggctgagcagcaaaggattcgcgctgagaaggagcgggagcgccagaacagactggcggtaaggctatgtctgcggcctccaagcctgtgtagccagaaaagcacagggtcttagacattccttttactgggtcctctgttagggcccaacaatcagagcttaatattttcttgctctagagaaaccctgaaaaaagagcagcttccttccaggagccgtctcaaaggacagccctgaggatcttggggtggggtgggtctccacaggaggagaaggccagaagagaggaggaagatgccaagaggagagctgaagatgacttgaagaagaaaaaggctctgtcctctatgggtgccaactacagcagctacctggccaaggtaagagcacactcaaagcctgaaggacggccttcatggggctgtttgtctcacctaccttcctgagactgggcccttcatcgcctttcccctccctaggctgaccagaagagaggcaagaaacagacagcccgggaaatgaaaaagaagattcttgctgaaaggcgcaaacctctgaacattgaccatcttagtgatgataagctgaggtgaggaagccatgcaaaatgttctctgtgttgctggaagaggaagcagggtcctgggctctgcttttctagcttcaccccatcaaacctcctcgttttccgtcttccagggacaaggccaaggaactctgggataccttgtaccaactggagactgacaaatttgagtttggggagaagctgaaacgtcagaaatacgatgtgagtccagacatctctagttcttgggtctgcagctgcagatcttactctctcgagggggtcaactctcctcccatatcccagtcatattctggtcctgcctttgccttgagacctggctccactaaacccagcgggaccactgctgaagactatccttcagggcaggcctatccatcagcctggccctcatctgaactggccagcgctgtagctaactgttatgtgttctcaaacgttttgaggtccccatgacatctcggtttttcagggaagacaatcacataactagggtgactatacactcatctgaaactgaaaaggtggtttagtactgtgtcttgttgggggctgggggagggtcagggacatctagaatgggttgcagacacttacgattaggagatagttgggatgagtgaagcttgttcctacacaccacggaagcagggaaggacaccgtctggtgccttactatccttagggcaaatgcaaacaccttgggttcactggcaaatcagtgctgtccttctctcctgtctctccagtgccagtgaggggagaggtaggaactcatgcacgggcattcccatagccatcaagatagacaatctagtagtcccatctccttcttccaacctctgggaagatgagctaaaactgtcctgcaacttctgggtagatgacaggacttagctgttcaactttgaagagccttggtctccaactcatcaatgcatccccctcccccagaaagagatccatccctcagcctcaaggctaccccagaaactagttcaaagaaggctccacccagcagaaaccaggccattcttttcagagcagtagctgggtcaggaacccataacctccagatacactctgccagtatctgatctcttgggttcaaagagtctgcctggttcatcagaagactggcccgatacctatcagggccttgaagcctcagctgcccacccaccctggtaaccatcttgatttttcagatcatgactgtccgggccagggtggagatgctggccaagttgtgagcagggcagacgtgctataggccaggcttgtgggtgtgcaatgctcagctagcatctcgcatggcaaagacttgggttgttgaggatgctggtgcaaaggggctttccctcctgccccagctcctccctcctgacttcagctggtggctatgaggcaggctgatccgttgttcggagataagaaaggaaggcccttgctctcagagacttctgccacaagtcaggagcaggcaacatggacaaggagcaggaagtcaggatcaggagtcagagtcagtgtggacttagagtctaaagccttacctccaccctgcccttcgcgctcgctgatcctcgacagccacaaggtaagtggccagctgggagctgctgtgtgtggtagctagagagagcaagtcaagacacagcccaaggacaaacaacatgccctctcacaaaggagccaggatacagtaaggaaaatggtacaggaggctgtgtccctgcaatgagaataccgtggggatgcacagttggcctgccctgtgtgagacatttcccctggccagtgctcgacggatccctgtcacagtaagtcacctgtgttgttacagattaccaccctcaggagccgcattgaccaagcccagaagcagtaagtagcccagcccattcttgctctgtgctgggcctagagtccccggggccagtcacctgcaacctacgtaggacctagacattttagccagttcctgaacgagggttcctggctagctggccctaagcagagcggtaacaagatctaactgggtccgggtcactggctccttcctctcctgcatgtaggaggtggcagaaggggtctgttagttgatatatctcccctctgtgatgtgctaaccagtagggagcctgtaacagagtgtggtaatgagtatctgcaatctcaatgcctctccagagttggaaacaggatcaaggccagcctgggctacttgaagcctatctcaattaacaacaacaataacaacaaaagaggttgcgtgagggtatggctcagaaggtcattgtacgtgtccagcatgcacaaggcctgttagttggatctgagtaccttagtcggagcagattcataatccagaacttagagcaagcagagatcagagttcaatagattgataatctcaaggccagctaggatcacagaagatggagagaatggactttggaaatggatgaataataaactaattgaccgtcgatacaagaatcagatgccacagattcagacctgtgcaacgtgacccttaccgggttcttagtttgatataatgctaggagtctgagtctgagcctggacatggggttgggggttgtcacacaaaatcaagttggaggtgcttagacttcctgtttcttgggatttctccctccttccacattaccaggaaggggatctattgctcacggctctgttgggaaggttgcagggtcatggcaggctgcttgatgaaagctatgtgcacatgggtgtaacatgtgtcggatgttcaggaaaacccgtgagaccacgtcgccaggcaaaatccacttggggtagtcagagctgagctcatgtacctttatcctctgccagccggagcctcacacagcacttaccctgcttccagcctgctgggtactgaggtgctcagataatgtaaggggatccttacatcctgggactggctatccttaactgcatcctgaaacgcacaggcttttacaaacaaagctaggatggcatgggtctgtctgcagcagttccctggctaaagcaggaggacggaaggtgagccaggtaatccgctaacataactaacacactagtgtccatggcctgtcctggactgcaggtgagtcaacgtccactgctcagtctggcacagtttgcacttgaatcagcaacagcttgggagacaggaactgaaggtctccattagctagctgaccatctgacccctaagcccaatttgcttcccatttgcagcagcaagaaggccggtgccacggccaagggcaaagtcggcgggcgctggaagtaaacgagccaagaggtgccctgcagcagagaccatcaaccctgactcttgccagggtcccttattccagctctgtattctccaaccctcatgcccaggcacttttgggaactcagggcccaccctgctgcaatgtcctcgcctctggggtctagaaataaagttatcagactcccctcttctgtctgtgtgttgtgttatcatgcacaggggacctggagaggttgggaggtagtgctgcaggacaggagcacatggggagtgcgcctcagacagccccgggaaaactgaggtatcttactgctactcagaacttggtctgtagcctcaaaagtcagagactttttattcctaggccctctttgtccccgatcccagaacgagccctccagttagaaaagactgcctgagcagcccaaaaaacagcactgtttaaagaagaaacagcccagcctcgggagggttagggaggaaggctgggactgcctggagacgttgcagacacccgaaagggggggagcgaggggagctc

SEQ ID NO: 1942 - DNA, 710 bp, Rattus norvegicus
gaattccgcttgtgtatttcattgagggaaatgcccactctgacctgctgtgtaaacgacccgggacgtaccaaaatgagcgcacctccaataaagatacacatcatgtcgtcttcacatctcttctacctggcactctgcttgctcacctttaccagctcggccacagccggaccagagaccctttgcggggctgagctggtggacgctcttcagttcgtgtgtggaccaaggggcttttacttcaacaagcccacaggctatggctccagcattcggagggcaccacagacgggcattgtggatgagtgttgcttccggagctgtgatctgaggaggctggagatgtactgtgtccgctgcaagcctacaaagtcagctcgttccatccgggcccagcgccacactgacatgcccaagactcagaagtcccagcccctatcgacacacaagaaaaggaagctgcaaaggagaaggaaaggaagtacacttgaagaacacaagtagaggaagtgcaggaaacaagacctacagaatgtaggaggagcctcccgaggaacagaaaatgccacgtcaccgcaagatcctttgctgcttgagcaacctgcaaaacatcggaacacctgccaaatatcaataatgagttcaataccatttcagagatgggcatttccctcaatgaaatacacaagtaaacattcccggaattc

SEQ ID NO: 1943 - DNA, 1328 bp, Rattus norvegicus
gaattccatcctggaaccttcccacccagcttcggctcagtagcacctttcctggctgacttggacacaacagatggcctggggaatgtgtattatcgagaagacttatctcccttcattattcagatggcagcagagtatgtccagagaggcttcccagaggtctctttccagcccactagtgtggtggttgtcacttgggaatccatggctccctgtggagggcccagtgggagccttgttgaggaaggcaagagaaacacgttccaggctgttctggcctcctcaaattccagctcctatgctattttcctttatcctgatgatggtctacagttctttacaacattctcgaagaaggatgaaaaccaagtacctgccgtggttggcttcagcaaaggtctagaaggatttctatggaagagcaatggagcctataacatatttgctaatgacagggaatcaatggaagatttggccaagagcagcaacgctgggcaccagggtgtgtgggtgtttgagattggaagtcctgctactgccaagggggtggtgcctgcagatgtgaacctggacgtggatgatgatggagcagactatgaggatgaagattatgacctacaaacctctcatctcggcctggaggatgtggccacccaacccttcccctcccatagtccaagaaggggataccctgatccacacaatgtacctaggaccctagtctsctagtctassaggctacagagagaccccatggaatccctactgagaggaccaaatctttccagctgccagtggagagattcccccagaagcacccccaggtcattgatgtggatgaagtagaggaaacaggagttgtattcagctacaacacaggttcccagcagacgtgtgccaacaatagacaccagtgctctgtgcatgcagagtgcagagactacgctactggcttctgctgcaggtgtgtgtgtgtttgcgcgtgtgtgtgagagtgcgtgcgagcacatgtatgcacgccatgtgcccgtgaacctggacaagcttcgtcccaagggctcattttatgctttcttttttggtgacgtgtgtattatgtccccagctccctgcctgcctttcagacggtctccctctcctcctcctcccttacacaggtcagcwtcagcagagctctgactgtgtacctgtccctcctctgtccctcagctgcctgcgtagcagacggtcaagcagagtcctcccttccccttccgtgctgactgctttgtgcttggggaaaggacattttaataaagccttggtgctcgggaaaacccgaattc

SEQ ID NO: 1944 - DNA, 2591 bp, Rattus norvegicus
caacttcacgcctgtcaatggcagctcagccaatcagtctgtgcgcctggtcacagcagcccacaaccacctggagacagtggagatggtgttcattgctacagtgactggctccctgagcctggtgactgttgtgggtaacatcctggtgatgctgtccatcaaggtcaacaggcagttgcagacggtcaacaactacttcctcttcagcctgggctgtgcggatctcatcataggggcattctctatgaacctctacactttgtatatcatcaagggctactggcccctgggtgccgtggtctgtgacttgtggctggccctggactatgtggtgagcaatgcctctgtcatgaaccttcttatcatcagcttcgatcgttacttctgcgtcaccaaacccctcacctatcccgcccgccgcactactaagatggcaggtctcatgatcgcagctgcctgggtcttgtcctttgtgctctgggctcctgccatcttgttctggcagtttgtggtgggcaagaggacggtgcctgataaccagtgcttcatccagttcttgtccaacccggcagtgacctttggcaccgccattgctgccttctacctgcctgtggtcatcatgacggtactgtatattcacatctcactggccagccgcagccgcgttcacaagcatcgacctgagggccccaaggagaagaaggccaagactctggctttcctcaagagccctctgatgaagccgagtatcaagaaacctccaccagggggcgcttctcgagaggaactgcgcaatgggaagctggaagaggctcctccgccagccctgcccccgcctccacgcccagtgcctgacaaggacacttccaatgagtccagctcaggcagtgccacccagaacaccaaggaacggccacccacagagctgtccaccgcagaggccaccactccagcgctgcctgcccctaccctgcagccacgaaccctcaacccagcctccaaatggtccaagattcaaattgtaacaaagcagacaggcaatgaatgtgtgacggccatcgagattgtacctgccactccagctggtatgcgcccagcagccaatgtggcccgaaagtttgccagcattgctcgcaaccaggtgcgcaagaagcggcagatggcggcccgggagcgcaaagtgactcggacaatctttgccattctgctggccttcatcctcacctggacaccctacaatgtcatggtcctggtgaacaccttttgccagagctgtatccccgagagggtgtggtccatcggctactggctctgctacgtcaacagcaccatcaaccccgcctgctatgcactctgcaatgccactttcaaaaagaccttccggcaccttttgctgtgccagtatcggaacatcggcacagccaggtagacaggcaggtgccctaggaggtgctggtgtcatgagtgtgtaccggggaaccacatggctcaccggctgtggaggagagagtaggcggccccactctgagttcgcatctgctgaagagaacaggtctcccagacaccgtgaggtaccagaggcccttcgctaggatgggagagatctctactgaagcctagaaggctcagcccagggagggtctgaactgtcaccacccggcccacatctgttaccttgcctcaggaagatgggggacaatggctggagtgggcagtggctctacaaaggccaaccatcggccgaagtgcatagagccgagcccaggagcatctcgggaggagcaaaaggagccaggcttgcaagggcggggtcccccatgcgctgtaatcggtgctttccgccttcctgcaccctcctccccctgcatgtaggctcagcccttcccctgaccccaagtcccactccagggtgagagagtgccctgctaatgttgctcagccaggctctgggtgggaaaccaagacctttsrcaskcccctggccagcagtcatatctggatggggcaactgggaaatcatgctaagctgagacagattccagggcactgagtcaattagtgctggatcatatggtcaaactgtcaagagcccacccccacccccaggtcacacatcaaatgagtggcagcagcgttcctctctcctctacaaggagggaggtgtggatccaagggaggaaaggtggtggtagggaccttggtgatctatacaggcctcagtgacaggtgacacaagcaagcaccctcattagtccccaaggagagcattccagactggcagtagcctggaccagaaagactcttgactaggtgaggcakagttcaaatgagtcacctgggttctcttssstaaccccagccctgtgggtccctgggagagataacacccaaggggccctggaagacatttttgtwaatgttctgctctttccactaattgttgggagcacttcttacgtagccctccgctcccctcagtacatctttccccatcctcccacccccaacaaagctccctggcaaactccctgggaaggggcttttatatattaaaaaagaggcttttattggaaaaaaaaaaaaaaaaa

SEQ ID NO: 1945 - DNA, 1267 bp, Rattus norvegicus
tctgcttgctaaatctcactgtcgctgctaaattcagagcagatagagcctgcgcaatcgaaataaagtcctcaaaattgaaatgtgactttgctctaacatctcccatctctctggatttccttttgcctcattattcctgcccaccaattcatttccagactttgtacttcagaagcgatggggaaaatcagcagtcttccaactcaattatttargaystrccwmwrtgackycytsmagataaagatacacatcatgtcgtcttcacatctcttctacctggcactctgcttgctcacmtttaccagctcggccacagccggaccagagaccctttgcggggmtgagctggtkgacgctcttcarttcgtgtgtgsrscamgrggyttttacttmaacaagccmacaggmtatggctccagcattcggagggcaccacagacgggcattktggwtgrgtgttgcttccggagctgtkatctgaggaggytggaratgtamtgtgctccgmtgaagcctacaaagtcagctcgttccatccgggcccagcgccacaytgacatgcccaagactcagaaggaagtacacttgaagaacacaagtagaggaagtgcaggaaacaagacytacagawtgtaggaggarcctcccgaggaacagaaaatgccacgtcacsgcaagatcctttgmtgcttgagsaacytgcaaaacatcggaacacctsccaaatatcawtaatgagttcaataccatttcakagatgggcatttccstcaatgaaatacacaagtaaacattcmramawwrwmwwwarrarwrwwwrwtaaaaaaaaaaamaaaaaacaaaaacaaaaacaaaaaaaaagcttgcaccttgcaaaagtggtcctggcgtgggtagattgctgttaatcctttatcaataacgttctatagagaatatataaatatatatataattatatctcctagtccctgcctcttaagagccgaaaatgcatgggtgttgtagacattcggttgcactaaattcctctctgaattttggctgctgaagccgttcatttagcaactgtttataggtggttgatgaatggttccttatctccatttcttcctatgtagcttaagccgcttccttcacagaatctaataatctcgtctaggccattagccctgccctttcttaacattcttgtatttgttgaatttggcctcctcgaaagcaatagcaactgggtggcccacccaagttttaacgccc

SEQ ID NO: 1946 - DNA, 1103 bp, Rattus norvegicus
caaaagctggagctccaccgcggtggcggccgytytwkwwythkytkkwtccssckggmwscakgrakkckgyaccagagaagawawagaaggttgccgctgcgcyakgaacccttaagaagaaaaaggttcctgcggtgccagwwacccttwagwwawagcgaaggaatttcgcagagttgaaggtcaagcgcctgakgaagaagtttgccctgaagacactgcgaaagsmaaggaggaagytcatctatgagaagsmaaagcactatcacawggagtacagacwgatgtwccggactgarattcgcatggctwggatggcgaggaaagctggcaacttctatktgcmcgcwgdaccmwaattggccttkgwcaksagawtccgaggtatcaatggrgtkagcccaaakgtgcgcaaggtgytgcagytgctccgtytccggcwgatcttcaatggcacctttrwgaakckcamsarggcttcagtgaacatgytgaggatcgtggagcsywacakkgmatgggggtwmcccwacctgaagkcagtawacgagctcatytacaamsgaggctwtggcawaatcaatwwwwagcgcwttgscwygasagataacyccttggttgctcgatctcttggkmamdwkggcatcatctgcatggaggatytaattcmtgagatytatacagttggaaamcgctttraggaagcaaataacttcctgtggcccttcaaactgtyttccccacgaggtggaatgaagaaaaagacarctcactttgtagaaggtggagacgctggcaacagggaagaccagmtaaacaggcttattagmcggmtgaactaaggtattgcccgtggtatttttataatstggtcggttwataaacagtcacagstwrrcrawwwdhvwmvwraarmararaaaaamwmragggggggcgcggtacccaattcgccctatagtgagtcgtattcaattcactggccgtcgtttaaaacgtcgcgactgggaaaaccggcgggaccacttaacggctggagaaatcccctttgcagtgggtaaacgaaaggcgacgaagcctcccaaaggggcgccgcaggg

SEQ ID NO: 1947 - DNA, 1963 bp, Rattus norvegicus
atgaattggcattttcccttcttcatcttgaccacagtgactttatcctctgtgtactcccagctcaactctctgtcactcgaggaactaggctctgacacagggatccaggttttcaatcagatcatcaaatcacagcctcatgagaacgttgtcatttctccgcacgggattgcgtccatcttgggcatgctgcagctgggggctgacggcaggacgaagaagcagctctcaacggtgatgcgatacaatgtgaacggagtcggaaaagtgctgaagaagatcaacaaggctatwgtctccaaaaagaataaagacatwgtgaccgtggccaatgctgtgtttgtcaggaatggctttaaagtggaagtgccttttgcagcaaggaacaaagaggtgtttcagtgtgaagtacagagtgtgaacttccaggacccggcctctgcttgygatgccatcaatttttgggtcaaaaatgagacgaggggcatgattgacaacctactttccccmaawmwrawmratagtgctcttaccaaactggtcctcgttaacgcagtgtatttcaagggtttgtggaaatcccggtttcaacctgagaacacgaagaaacggaccttcgtggcaggtgatggaaaatcctaccaagtacccatgctagcccagctctccgtgttccgctctgggtctaccaaaaccccaaatggcttatggtacaacttcattgagctaccctaccatggtgagagcatcagcatgttgatcgccctgccaacagagagctccaccccactgtccgccatcatccctcacatcagtaccaagaccatcaatagctggatgaacaccatggtacccaagaggatgcagctggtcctgcccaagttcacagctctggcacaaacagatctgaaggagccactgaaagcccttggcattactgagatgtttgaaccgtcaaaggcaaattttgcaaaaataacaaggtcagagagccttcacgtctctcacatcttgcagaaagcaaaaattgaagtcagcgaagatgggaccaaagccgcagtagtgacaactgcaatcctaattgcaaggtcatcgcctccctggtttatagtagacaggcctttcctgttctgcatccgacacaatcccacaggtgccatcttgttcctggggcaggtgaacaagccctgaaggacggacaaaacaaaagccacgcaaagccaagatgactttgctccgaagagagactcccttccccacatctttcatagttctgkyaarkatttttawacactgctttccttttttgaaactggttcatggcgacagttaagtgacacaagtgtttctggtcagggctgtgtcagaagaaagggcaggatggctgggatgctgtacggaagaacgaakaggcgggtttcaggacgtctagaagatttctttaaaytactgatcagttacctaggttaacaaccctctcgagtatttgctgtctgtcgggttcagcatttttgtyccgttcttgtgtatatgtgtgacgttccgggasaggtttaatcagtgtgatagraggggggaaaaagacatttwatagtagtttttwtktttttayggamrrcagwrkcatttgcctttttwwttyyktttctctcacttccacccgaaggccrgaaggtggtgaggtggtgagggrtggagctagaaaagccgtagcctcttcgtgtgttgtttcygttgctgttgctatcgctgttttatatactgcatgtgttcactaaaataaagttggaaaactaamrwmwmrvwrramamaatttgctgtcgagccacgtgcctgtcactactggtctgtactctttggattggcwttkwtttttgtattttgtataaagtaaaaagaaatwmamgtgkkccrmgtagtaaaawwwwwaaaaaaaaaaaaaaaaaacgcctcgtgccg

(The sequence listing continues in the following parts.)
